United States Patent Application Publication US 2014/0259212 A1 - sequence listing, part 8

SEQ ID NO: 24338 - protein, 386 aa, Medicago sativa
MAIHHHHHNHQQLQQHTSSLFDALYCDEEEKWEDDDEGEVVDEGAQSDVTTTNYDILDSTSLLPLLLLEQNLFNEDEELNTLFSKEITQQETYYEDLKNVINFDSLSQPRREAVEWMLKVNAHYGFSALTATLAVNYLDRFLLSFHFQKEKPWMIQLVAVTCISLAAKVEETQVPLLLDLQVQDTKYVFEAKTIQRMELLILSTLKWKMHPVTTHSFLDHIIRRLGLKTNLHWEFLRRCENLLLSVLLDSRFVGCVPSVLATATMLHVIDQIEQSDDNGVDYKNQLLNVLKISKEKVDECYNAILHLTNANNYGHKRKYEEIPGSPSGVIDAVFSSDGSNDSWTVGASSYSTSEPVFKKTKNQGQNMNLSPINRVIVGILATATSP

SEQ ID NO: 24339 - DNA, 1119 bp, Scutellaria baicalensis
  CDS (1)..(1119)
atggtttcggaatttcaggagcacgaatcccttctccaaaaccctatctttgatgccctttattgtgacgaggagcgttttgatgaatgtgtaggcggcgctggttcgggcttcaaagagcccgaaatcaacgattttaatgagattcacaataacccttttgcttttctgtttgagcacgaccttttctgggagagtgaggagcttgacgccctgttaacgaaggagaaaacgcagacccatttgacttttgatgaaataaactcagatgcgtctttgaaggcgatgagaaatgaggcgattaactggatgctgaaggtgattgcccactacggcttcaatgcgctgactgctgttttggctgtcaactattatgatagattcatcactagtgtttgttttcagaaggataagccatggatgagtcaattagctgctgtggcttgtctttctgtagctgccaaggtggaggaaactcaagtgcctcttttgttggatttacaagttgaagaatctaagtatttgtttgaagctaagaccatccaaagaatggagcttttggtgctttctaccctccaatggaggatgaatcctgtgacgccaatctcattctttgaccacattgcaaggagatttgagtttgtaaagaacctacattctgtatttttaaggaggtgtgagagtttaatcctctccattatcactgattgtagattggtaaagtattttccttcagttattgcttctgcagcaatgatatatgcgattagagagtttgagactcctgatgctctggaatatgaggatcaactcttgagtgtgctaagaactagcaaggacaaagttgatgattgccgcaaactcattgtggatgcaatgtatggtggtttcagccacaagccttgctataaacgcaaatatgagtcgatcccaagcagtccaagtggtgtcattgatgcgtatttgagctctgatagctctgttgattcgtgggctgttacattatcagtgtcatcgtcgccagagccttcgtttaagagaagcaaagctcaagatcagcacatgagattggctccactaagcagtgtatctcttggccttgctcatcgtattaattga

SEQ ID NO: 24340 - protein, 372 aa, Scutellaria baicalensis
MVSEFQEHESLLQNPIFDALYCDEERFDECVGGAGSGFKEPEINDFNEIHNNPFAFLFEHDLFWESEELDALLTKEKTQTHLTFDEINSDASLKAMRNEAINWMLKVIAHYGFNALTAVLAVNYYDRFITSVCFQKDKPWMSQLAAVACLSVAAKVEETQVPLLLDLQVEESKYLFEAKTIQRMELLVLSTLQWRMNPVTPISFFDHIARRFEFVKNLHSVFLRRCESLILSIITDCRLVKYFPSVIASAAMIYAIREFETPDALEYEDQLLSVLRTSKDKVDDCRKLIVDAMYGGFSHKPCYKRKYESIPSSPSGVIDAYLSSDSSVDSWAVTLSVSSSPEPSFKRSKAQDQHMRLAPLSSVSLGLAHRIN

SEQ ID NO: 24341 - DNA, 1104 bp, Nicotiana tabacum
  CDS (1)..(1104)
atggttttccctttagatactcagctcctaaatccaatttttgatggccttttctgtgaggaagatcgatttttggatgatgatgatttaggagaatggtcatgtactttagaacaagtagaaaataatgtgaaaaagactctacctttattagaatgtgatatgttttgggaagatgaccagcttgtcactcttttagctaaggaaaaagagtcccatttaggttttgattgtttaatctcagatggagatgggcttttagtagaggttagaaaagaggcattggattggatgttgagggtcattgctcactatggtttcactgctatgactgctgttttagctgtgaattattttgataggtttgtatctggactttgctttcagaaagataagccttggatgagtcaacttgctgctgtggcttgtctttctattgccgctaaagtggaagagacccaagtcccccttcttttagaccttcaagtggctgattcaagatttgtgttcgaggcaaagactattcagagaatggaactcttggtgctctcgactcttaagtggaaaatgaatccggtgacgcctctatctttcattgatcatatcatgaggagatttggattcatgtccaatctacatttggattttcttaggagatgtgaacgcctcattcttggtattatcactgattctaggctcttgtattattctccctctgttattgcaactgcagtaatgttttttgtaatcaatgagattgagccttgcaatgcgatggaataccagaatcagctcatgagtgttcttaaagtcaaacaggatagttttgaagaatgccatgatcttattctagagctaatgggcactcctggctacaatatctgccaaagcctcaagcgcaaacatcaatctgtacctggcagtccaagtggtgttatcgatgcatattttagttgcgacagctctaatgattcgtggtcagtagcatcttcgatttcatcctcaccagaacctcagtataagaggatgaaaactcaggatcagacaatgacactggctccactgagttctgtttctgttgttgtgggcagtagtcctcgttga

SEQ ID NO: 24342 - protein, 367 aa, Nicotiana tabacum
MVFPLDTQLLNPIFDGLFCEEDRFLDDDDLGEWSCTLEQVENNVKKTLPLLECDMFWEDDQLVTLLAKEKESHLGFDCLISDGDGLLVEVRKEALDWMLRVIAHYGFTAMTAVLAVNYFDRFVSGLCFQKDKPWMSQLAAVACLSIAAKVEETQVPLLLDLQVADSRFVFEAKTIQRMELLVLSTLKWKMNPVTPLSFIDHIMRRFGFMSNLHLDFLRRCERLILGIITDSRLLYYSPSVIATAVMFFVINEIEPCNAMEYQNQLMSVLKVKQDSFEECHDLILELMGTPGYNICQSLKRKHQSVPGSPSGVIDAYFSCDSSNDSWSVASSISSSPEPQYKRMKTQDQTMTLAPLSSVSVVVGSSPR

SEQ ID NO: 24343 - DNA, 1032 bp, Saccharum officinarum
  CDS (1)..(1032)
atggcgccgagcagctacgagatggcggcttccatcctgctgtgcgccgaggacagcagcagcatcctggacctcgaagcggaggccgaggaggaggaagtgatgctggcgcggagcagcaggacgcgcggggatcccagcgtggtcttccccgtgccgtccgaggaatgcgtcgccggtttcgtggaggcggaggcggcgcacatgccgcgggaggactacgccgagaggctgcgcggcggcgggatggatctccgcgtccggatggacgccgtcgactggatttggaaggttcacgcgtactacggtttcggccctctcactgcctgcttggccgtcaactacttggaccgcttcctctcgctctatcagcttccggaaggcaaggcttggacgacacagctgctgtccgtggcgtgcttgtccctggctgccaagatggaggagacctacgttcctccgtctctggacctgcagatcggggacgcgcggtacgtgttcgaggcgaagacgatccagaggatggagctcctggtcctcagcacgctcaaatggaggatgcaagcggtcactcccttctcctacatcgactacttcctccaccggctcaacggcggcgacgcgccgagcagacgcgccgtccttcgatccgcagagctcatcctctgcaccgcaagagggacgcactgcttggatttcaggccctcggagatcgccgcggccgtcgccgccgccgtggccggcgaagagcacgccgtggatatcgacaaggcttgctgcacccaccgtgtacataaggagagggtgtcgcgatgccttgaagcgatccaggccaccgtggccctgccgggcaccgtgccgcggagccccaccggtgtgctggacgctgcaggctgcctcagctacaggagcgatgacacggctgttgctgctgccgccgccgcctcgcatgcgagcagcagctcctggtgcgacgaggacgacgacagctccccggttgtttgcagcaagaggaggaagattagcagatga

SEQ ID NO: 24344 - protein, 343 aa, Saccharum officinarum
MAPSSYEMAASILLCAEDSSSILDLEAEAEEEEVMLARSSRTRGDPSVVFPVPSEECVAGFVEAEAAHMPREDYAERLRGGGMDLRVRMDAVDWIWKVHAYYGFGPLTACLAVNYLDRFLSLYQLPEGKAWTTQLLSVACLSLAAKMEETYVPPSLDLQIGDARYVFEAKTIQRMELLVLSTLKWRMQAVTPFSYIDYFLHRLNGGDAPSRRAVLRSAELILCTARGTHCLDFRPSEIAAAVAAAVAGEEHAVDIDKACCTHRVHKERVSRCLEAIQATVALPGTVPRSPTGVLDAAGCLSYRSDDTAVAAAAAASHASSSSWCDEDDDSSPVVCSKRRKISR

SEQ ID NO: 24345 - DNA, 1068 bp, Euphorbia esula
  CDS (1)..(1068)
atggaagacagcactcagatttcattgatttttgatgggttgtactgcgaagaacaaggcattgttgaagattttgacgatgggaatgaagattatgtgaaaaaggagttatctttatcttctgttttgcttgagcaggacttgttttggaccgatgatgagttgttaaatctgatttcaaaagaaaaagagtctcattttagttttgggaatttttcttcagatgggtctttaatggtggctcgtaaagaggcaatagattggattttgagggtaaaagggttttatggattcaatgctttgagctgtgttcttgctgttaattatttcgatagattcatttcgagtttagtttttacaagagataaaccatggatgggtcaacttgctgctgttgcttgtttatctttggctgctaaaatggaggagactcaagttcctcttcttctagatttacaagtggaagaatcaaagtatgtgtttgaggcaaagactataaagagaatggagcttcttgtgctctctactcttcaatggaggatgaatcctgtgaccccaatttgctactttgatcacattataaggaggctaggacttaaaaaccatctgcattgggaatttttgaggagatgtgagcttttacttctctctgttatttctgattcaagattcatgagttatgcaccttctatattagcaacattaattatgatccatgtgattaaggaggttgacccatttagtcaaatggaataccagaaccagcttttggatgtgatcaaaatcaacaaggaggaagtgaaccagtgttacaagctcatcttggagctatcgggtaagcaagatcaagggttcaaacgcaagtatccctcaagacccggtagcccaaatggtgtgattgatgcctattttagtggagatagctcgaatgattcgtggggagtttcttcctcaatctcatcatcaccgtcgattcctcgatttaaaaggatcaaatcccaggatcaacagatgaggttgccttcaataaaccgtatgtttgtggatgtgcttagtagtcctcattga

SEQ ID NO: 24346 - protein, 355 aa, Euphorbia esula
MEDSTQISLIFDGLYCEEQGIVEDFDDGNEDYVKKELSLSSVLLEQDLFWTDDELLNLISKEKESHFSFGNFSSDGSLMVARKEAIDWILRVKGFYGFNALSCVLAVNYFDRFISSLVFTRDKPWMGQLAAVACLSLAAKMEETQVPLLLDLQVEESKYVFEAKTIKRMELLVLSTLQWRMNPVTPICYFDHIIRRLGLKNHLHWEFLRRCELLLLSVISDSRFMSYAPSILATLIMIHVIKEVDPFSQMEYQNQLLDVIKINKEEVNQCYKLILELSGKQDQGFKRKYPSRPGSPNGVIDAYFSGDSSNDSWGVSSSISSSPSIPRFKRIKSQDQQMRLPSINRMFVDVLSSPH

SEQ ID NO: 24347 - DNA, 1191 bp, Glycine max
  CDS (1)..(1191)
  misc_feature (117)..(117): n is a, g, c or t
atggcaattcagcaccacaatgaacaactagagcataatgaaaatgtctcatctgtccttgatgccctttactgcgatgaaggaaagtgggaggatgaagaggaggaggaagaagantatgaagaaagtgaagtaacaacaaacactggaacttctcttttccctctgctcatgttggagcaagacttgttctgggaagatgaggaactaaactctctcttttccaaagagaaggttcaacatgaagaagcctatgactataacaatctgaacagtgatgataatagcaatgatcacagtaataataacaataatgtgctgtcggactcttgtctctctcagcctcgtcgtgaggcagtggaatggatactgaaagtcaatgctcactatggattctctgctctcactgcaacactggccgttacttacctggataggttccttctaagcttccattttcaaagggagaagccatggatgatccagcttgtggctgtcacttgcatctctttggctgcaaaagttgaagaaactcaagtgcctcttctcttggaccttcaagtgcaagacacaaagtatgtgtttgaggcaaagactattcagagaatggagctcctggtgctgtccaccctcaaatggaagatgcaccccgtgacacccctctcctttctagatcacattataagaaggcttggattgaaaacacatcttcactgggagtttctcaggcgctgtgagcatcttcttttgtctgtgcttttagattcaagatttgttggttgtcttccttctgtgttggccactgcaacaatgctgcatgttatagaccagattaaacacaatggtgggatggaatacaaaactcagcttctgagtgttctcaaaattagcaaggagaaagtagatgagtgttataatgcaattctccaactctcaaaggccaataaatatggtcataacaacatcaacaacactagcaagcgcaagtatgagcaaatcccaagcagcccaagtggcgtaattgatgctgcattttgctctgatggttccaacgattcgtgggcagtggggtcatcattgttatattcaccaccagagcctctcttcaagaagagcagaacccaaggacaacaaatgaatttgtcaccacttaaacggttcattatcggaattgttggcacccctccttaa

SEQ ID NO: 24348 - protein, 396 aa, Glycine max
  misc_feature (39)..(39): The Xaa at location 39 stands for Asp, or Glu.
MAIQHHNEQLEHNENVSSVLDALYCDEGKWEDEEEEEEXYEESEVTTNTGTSLFPLLMLEQDLFWEDEELNSLFSKEKVQHEEAYDYNNLNSDDNSNDHSNNNNNVLSDSCLSQPRREAVEWILKVNAHYGFSALTATLAVTYLDRFLLSFHFQREKPWMIQLVAVTCISLAAKVEETQVPLLLDLQVQDTKYVFEAKTIQRMELLVLSTLKWKMHPVTPLSFLDHIIRRLGLKTHLHWEFLRRCEHLLLSVLLDSRFVGCLPSVLATATMLHVIDQIKHNGGMEYKTQLLSVLKISKEKVDECYNAILQLSKANKYGHNNINNTSKRKYEQIPSSPSGVIDAAFCSDGSNDSWAVGSSLLYSPPEPLFKKSRTQGQQMNLSPLKRFIIGIVGTPP

SEQ ID NO: 24349 - DNA, 1521 bp, Glycine max
  CDS (250)..(1335)
  misc_feature (34)..(34): s is g or c
  misc_feature (36)..(36): s is g or c
  misc_feature (1351)..(1351): d is a, g or t
  misc_feature (1352)..(1352): d is a, g or t
  misc_feature (1418)..(1418): b is g, c or t
agcccagcattgaaacagagagagagagagagasasagaaacaaaacgattgcgtggggctctatagtggttttgttcttatttccacagattgtcatttcttcattttaacaagttcataaaagaaactccactcgcctactcacacacagaccctatcaataatctgaacataaagtttcgtttttttttttgtgcgtgaagaatttggaggaagagggtagttgagtttcaattcgaggtcttgcaatggcacccagttttgactttgcttctagcctcctttgcacagaggacagcaccgttttcgacgagagtcataataatgggggtacgattatgacggcgatgggggtgtacgaggacacgaggagtcctaggaggccccactttgacgaagaaccagatgatttgccattgctaagtgatgagagcttggtgatgatggtggaaaaagagtgccaacactggtctggtctgcgttacttgaataagtttcaaactggggatttggacttcggtgccagaatggaggccattgattggattcacaaggtccgatcgcattttggatttgggcctctctgtggatatctatctataaattacttggaccgattcctctttgcatatgaattaccgaagggaagagtttggacaatgcaattgttggctgtggcgtgtgtatctctagcagccaaattagatgagacagaagttccactctctcttgatttgcaggtgggtgaatcgaagtttttatttgaggctaaaaccatacagagaatggagcttcttgtactaagcacattgaagtggagaatgcaagcaattactcctttcaccttccttgattactttctttgtaagatcaacgatgatcaaagtccattaaggtcttcaattatgcgatccatccaacttatatcgagcactgcaagagggattgacttcttggaatttaaaccatcagagattgcagcagcagttaaaccatcagagattgcagcagcagtggctatgtatgtcatgggggaaacccaaacagttgacactgggaaagcaatttctgttctgattcaacacgtagaaaaggagagactattgaagtgtgttcaaatgatccaagagttatcatgcaacagtggctctgccaaggattcaagtgcttctgtcacttgcttaccccagagcccaattggtgtgttggatgctttgtgcttcaactacaaaagtgatgacacaaatgctagttcatgtgttaattcttcacacaatagtcctgttgccaaaaggaggaagttaaacaaaacctgtggagctgagcaattgtagtgatgttggagtgggddttttacaatcatccataggatgcttttccaaaaaaatgggcatcatgtgtgttttatggaaggtgbtcccctcaaagcaataccaaaatgaggcaggaagacatagctagaaatcttttatttttttaatttctcaaaaagaaaaaaaaaaaaaaaaaaaacactgtca

SEQ ID NO: 24350 - protein, 361 aa, Glycine max
MAPSFDFASSLLCTEDSTVFDESHNNGGTIMTAMGVYEDTRSPRRPHFDEEPDDLPLLSDESLVMMVEKECQHWSGLRYLNKFQTGDLDFGARMEAIDWIHKVRSHFGFGPLCGYLSINYLDRFLFAYELPKGRVWTMQLLAVACVSLAAKLDETEVPLSLDLQVGESKFLFEAKTIQRMELLVLSTLKWRMQAITPFTFLDYFLCKINDDQSPLRSSIMRSIQLISSTARGIDFLEFKPSEIAAAVKPSEIAAAVAMYVMGETQTVDTGKAISVLIQHVEKERLLKCVQMIQELSCNSGSAKDSSASVTCLPQSPIGVLDALCFNYKSDDTNASSCVNSSHNSPVAKRRKLNKTCGAEQL

SEQ ID NO: 24351 - DNA, 1501 bp, Euphorbia esula
  CDS (224)..(1276)
  misc_feature (205)..(205): k is g or t
aaagaattcctacaacctatgccttcttccccactcagatacccaaataaaaacacatacccttagataactggtcactacccctcttcctgctctttttgtttctttgacaaagagagagaaatggctcaaactgagtctttaactctctctttaatgttcatcttctattcctttgccctataatgaaccccaatctcaattktatcttcttagaaagaagatggcaaatcattctccattatttctctatgatgctctttactgctcagaagaagataactgggaaggagaagttgttgatatttttcatgaacaagaagatcaaggagaaaacacctctgtctttccccaaaattcttccccagtagacttaaattgggaagaagatgagcttacgtctgtattttctaaacaagagcaaaaccaactatataaaaaactagaaatcaacccatgtctagctaaatctcgccgtgatgctgtggattggatgatgaaagtcaatgcccattactctttcactgctttgacttcagttttggccgttaattttcttgatagattcctttttagcttcgatcttcaaacggagaagccatggatgacccagctcacagctgtagcttgtctctccttagcagcaaaagtagaagagacacaagtcccacttttattggaccttcaggtggtggacagtaagtatgtgtttgaggctaaaactatacaaagaatggagcttttggtgctttctactcttcaatggagaatgaaccctgtaactccattatcatttattgattacatgacaagaaggcttggttttaaggattatctttgctgggaatttatccggagatgcgagcttattgttctctctataatctcagatatgagatttataccttatctccctagtgaaattgcttccgcaataatgctacatgtgattaatggtatagaacccagtcttggagatgaattcgaaacccagctattcgggattcttggaattgataaggagaaggtgaataattgcagagaaatgataatcgagttaggatcaagatattacggcaaccaatcaaacaaaagaaaatacgggtcggatccgggtagtccaaattgcgtaatggatgtctcatttagttcagataattcaaacgattcttgggcagtcggatctaaatcatcatcagtgtcttcctcacccgcggcgaagaaactcagggcagtttcagggatgaaccatgaaaatgcgataatactttcctaagcatgaacattttttaatccttaaaatctttttaatttatttcatttgaatccccttttgaggacttggttgtattaaactgttaataattgatgttgttagttaaattgccgggcatctctgcttctccaatctcaattaaaatcttaattagaattttggaagcagagatggttggcattttatccggaaattagtagtaaaagagaaattgcactaaaaaaa

SEQ ID NO: 24352 - protein, 350 aa, Euphorbia esula
MANHSPLFLYDALYCSEEDNWEGEVVDIFHEQEDQGENTSVFPQNSSPVDLNWEEDELTSVFSKQEQNQLYKKLEINPCLAKSRRDAVDWMMKVNAHYSFTALTSVLAVNFLDRFLFSFDLQTEKPWMTQLTAVACLSLAAKVEETQVPLLLDLQVVDSKYVFEAKTIQRMELLVLSTLQWRMNPVTPLSFIDYMTRRLGFKDYLCWEFIRRCELIVLSIISDMRFIPYLPSEIASAIMLHVINGIEPSLGDEFETQLFGILGIDKEKVNNCREMIIELGSRYYGNQSNKRKYGSDPGSPNCVMDVSFSSDNSNDSWAVGSKSSSVSSSPAAKKLRAVSGMNHENAIILS

SEQ ID NO: 24353 - DNA, 1425 bp, Euphorbia esula
  CDS (202)..(1269)
  misc_feature (1347)..(1347): n is a, g, c or t
tttttttttcttctctgcctctctatccattccttctcttctctctgtctctgctatcaatagacccctagtgagagaaacagagataaagcaaattgtatggtgatatgatttgcaatgagattgagattgggattttattttctttgatggtataatgagcaaaggattgaatctcttcttctctgaagaagaacaaaaatggaagacagcactcagatttcattgatttttgatgggttgtactgcgaagaacaaggcattggtgaagattttgacgatgggaatgaagattatgtgaaaaaggagttatctttatcttctgttttgcttgagcaggacttgttttggaccgatgatgagttgttaaatctgatttcaaaagaaaaagagactcattttagttttggggatttttcctctcatgggtctttaatggtggctcgtaaagaggcaatagattggattttgagggtaaaagggttttatggattcaatgctttgagctgtgttcttgctgttaattattttgatagattcatttcgagtttagtttttacaagagataaaccatggatgggtcaacttgctgctgttgcttgtttatctttggctgctaaaatggaggagactcaagttcctcttcttctagatttacaagtggaagaatcaaagtatgtgtttgaggcaaagactataaagagaatggagcttcttgtgctctctactcttcaatggaggatgaatcctgtgaccccaatttgctactttgatcacattataaggaggctaggacttaaaaaccatctgcattgggaatttttgaggagatgtgagcttttacttctctctgtcatttctgattcaagattcatgagttatgcaccttctatattagcaacttcaattatgatccatgtgattaaggaggttgacccatttagtcaaatggaataccagaaccagcttttggatgtgatcaaaatcaacaaggaggaagtgaaccagtgttacaagctcatcttggagctatcgggtaagcaagatcaagggtacaaacgcaagtatccctcaagacccgggagcccaaatggtgtgattgatgcctattttagtggagatagctcgaatgattcgtggggagtttcttcctcaatctcatcatcaccatcgattcctcgatttaaaaggatcaaatcccaggatcaacagatgaggttgccttcaataaaccgtatgtttgtggatgtgcttagtagtcctcattgatcttttacttttgttatctattgcctacttcgaaacaatgccattataaatttctctattttgcatattatttgtatncccgtggttacttgggtacatttccggcctaatatttgaactcactcaagctagacaaattgaaaaaaaaaaaaaaaa

SEQ ID NO: 24354 - protein, 355 aa, Euphorbia esula
MEDSTQISLIFDGLYCEEQGIGEDFDDGNEDYVKKELSLSSVLLEQDLFWTDDELLNLISKEKETHFSFGDFSSHGSLMVARKEAIDWILRVKGFYGFNALSCVLAVNYFDRFISSLVFTRDKPWMGQLAAVACLSLAAKMEETQVPLLLDLQVEESKYVFEAKTIKRMELLVLSTLQWRMNPVTPICYFDHIIRRLGLKNHLHWEFLRRCELLLLSVISDSRFMSYAPSILATSIMIHVIKEVDPFSQMEYQNQLLDVIKINKEEVNQCYKLILELSGKQDQGYKRKYPSRPGSPNGVIDAYFSGDSSNDSWGVSSSISSSPSIPRFKRIKSQDQQMRLPSINRMFVDVLSSPH

SEQ ID NO: 24355 - DNA, 1491 bp, Populus alba
  CDS (116)..(1231)
gagaaagatatgcaatatatgcaaagagaagcctgagagatttttatctccctttttcatttttgatggtgttctataatgagaagaggattaaatctcttcttctctgaagaagatgtctttcttacaacaacaagagactcataatcaaagcccagcattggctcttgacgggctttactgtgaagaggatggatttggagaggattattcttgtggtttggatgatgaaactagccaggtttatgatcaaaatgtgaaaaaggagcaaaatttatcttctgttttgcttgagcaagacttgttttgggaagatagcgagttactgtctttaatctccaaagagaaagagacccatgttgtttttgatagtgtaggatctagagatggatctttaatggtggttcgtagagaggcagttgagtggtttttgagggtaaaggcacattatgggttcagtgctttgactggtgttcttgctgtgaactactttgataggttcatttcaagttcaaggtttcgaagagataagccatggatgggtcaacttgctgctgtggcttgtttgtctctggctgctaaagtggaggaaacccaagtgcctcttcttttagacttgcaagtggaggatgcaaagtacgtttttgaagccaagaccataaagagaatggagctgtgggtgctgtcaactcttcattggaggatgaatcctgtaacctcaatttctttctttgatcacattataaggagacttggattaaagacccacatgcattgggagtttttatggaggtgtgagcgattgcttctttctgtcatttctgattcaaggttcatgagttatcttccttctatattagcaactgcgacaatgttgcatgttatcaaggaggttgagccacgtaatcaactgcaataccaaactcagctcatggctgtgctaaaaaccaatgaggatgaagtgaatgagtgttacaggctcattttagagcaaccaggcagccaaaaccaacgccacaagcgcaagtacctgtccacacccagcagcccaaatggtgtcatcgatgcatctttcagctctgagaactcaaatgattcgtgggctgtggcatcatcaatctcatcatcatcatcagtgcctcaattcaaaagaagcagggcccaggttcagcagatgcgattgccttcactaaatcgtatgtgcgtggatgtgcttagcagtcctcattagtctttccttgtcttaatgcctcgagctatcataatcttcctgttttgcgtattaattgttgtatgtgtaagaggtacagacgttttatgaaactgacccattcttggatgagaaatgaggtatctgctctgctctctctttgttcgagagaggaatgaagagattgtggtgtttttccaataggtatgaacatgatgtctgtatttcaaccattgctctattaaatgttacatgattcactaggaaaaaaaaaaaaaaaa

SEQ ID NO: 24356 - protein, 371 aa, Populus alba
MSFLQQQETHNQSPALALDGLYCEEDGFGEDYSCGLDDETSQVYDQNVKKEQNLSSVLLEQDLFWEDSELLSLISKEKETHVVFDSVGSRDGSLMVVRREAVEWFLRVKAHYGFSALTGVLAVNYFDRFISSSRFRRDKPWMGQLAAVACLSLAAKVEETQVPLLLDLQVEDAKYVFEAKTIKRMELWVLSTLHWRMNPVTSISFFDHIIRRLGLKTHMHWEFLWRCERLLLSVISDSRFMSYLPSILATATMLHVIKEVEPRNQLQYQTQLMAVLKTNEDEVNECYRLILEQPGSQNQRHKRKYLSTPSSPNGVIDASFSSENSNDSWAVASSISSSSSVPQFKRSRAQVQQMRLPSLNRMCVDVLSSPH

SEQ ID NO: 24357 - DNA, 1734 bp, Physcomitrella patens
  CDS (321)..(1403)
gcacgagcttttcgtgcagcgccacggttctcgcgcttcactcggggtacggtgtgtttggggttcgagctcgagtgcagtctccgattatgccttgatcggctgccccgagcctgttgaccgtttagattgggagtcattgtatatatacatatatatatatatacattttccttcgcgtttgtggtgaggcaccagccgaggtgactgaggttgggacggcgagcccaggttggaattgtgaagagaactgagataccccggggatgttctctgcatgaagtggttcgtcggtagtgcgttctggggtcgccagaaggatgtctcccagtgttgattgcttggcaagcttgtattgtgcggaggatgtgagtggcacggcgtggaatgagagtgagatgtgtggcgccgcggacagagtgtttgagtctcagcctgctgtgtttatggatttccccgtggaggatgatgaggccattgccactctgctcatgaaagaggcgcaattcatgcccgaggctgattacctggagaggtaccagtctcggaaattgagccttgaggctcgtctggctgctattgagtggattttgaaggtccactctttttacaactacagtcccttgactgtagctttagcggtgaattacatggaccgttttttgtcgcgttattactttccggaaggaaaggagtggatgctgcagcttctgtcagtggcgtgcatatctctcgctgcgaaaatggaggaatccgacgtgccgatactgctcgattttcaggtcgaacaggaggaacacatatttgaagcccacactattcagaggatggaactcttagtcttgtccactctagagtggcggatgagtggagtgacgcctttctcgtatgtagattattttttccacaagcttggtgttagtgacttgctgctgagagctcttctctctcgagttagcgaaattattttgaaatccattcgtgttacaacttccctccaataccttccctcggttgtcgcggcggcatctattatctgcgcactggaagaagtgacaactattcgcacgggagatctacttcgaacattcaacgagttgttagttaatgtggaatctgtgaaggactgttacatcgatatgaggcaatctgagataggtccttactgtgtccgcatgggtctgaagaggaagatattgcacgcatcggaaccccaaagtcccgttggagtattggaggcagccgatgtgagcagccccagtgggactgtgcttggattctcttctcgcgagtccagtccagatgtgacggattcaccgccttcaactaattcccagcgcaagcgtcgcaagttgtgtcttcacaatgagagttgtctccacgtagagagcgccagcctataaagtgtccatcgaaccgaatttttttcactggcagtttccgttgcatgaaaacgtcctcaatccgcttgccgaactcggcatcagttccaccatgcaccatagttactagatgtgtttgtctatccatagcggttttgacgggatgcctgagtctatacccaaactcagggacgacgaagaattatgtcagcattttttagccgtatttttaatgcggctaattgtttagtcgtattatgagcattctttagcaggtgcgccaacagtatctgctcctatataataacaagaagtttacttgccgagttattgcaaaaaaaaaaaaaaaaaa

SEQ ID NO: 24358 - protein, 360 aa, Physcomitrella patens
MSPSVDCLASLYCAEDVSGTAWNESEMCGAADRVFESQPAVFMDFPVEDDEAIATLLMKEAQFMPEADYLERYQSRKLSLEARLAAIEWILKVHSFYNYSPLTVALAVNYMDRFLSRYYFPEGKEWMLQLLSVACISLAAKMEESDVPILLDFQVEQEEHIFEAHTIQRMELLVLSTLEWRMSGVTPFSYVDYFFHKLGVSDLLLRALLSRVSEIILKSIRVTTSLQYLPSVVAAASIICALEEVTTIRTGDLLRTFNELLVNVESVKDCYIDMRQSEIGPYCVRMGLKRKILHASEPQSPVGVLEAADVSSPSGTVLGFSSRESSPDVTDSPPSTNSQRKRRKLCLHNESCLHVESASL

SEQ ID NO: 24359 - DNA, 1400 bp, Helianthus tuberosus
  CDS (48)..(1121)
ttgaaccttcatttcttttcttttcttctttctaatcaccaaccccaatggccattttatcaccatattcatcttctttcttagacacactcttttgcaatgaacaacaagatcatgaatatcatgaatatgagtatgaagatgaatttacacaaaccaccctcacagattcatctgatctccatcttccccccctggaccaactagatttgtcatgggaacatgaagagcttgtgtccttgttcacaaaagaacaagagcagcaaaaacaaaccccttgtactctctcttttggcaaaactagtccctcagtttttgctgctcgtaaagaggctgtagattggatccttaaggtcaaaagttgttatggattcacacctcttacagccattttagccatcaattatcttgataggtttctttctagcctccattttcaagaagataaaccttggatgattcaacttgttgctgttagttgtctctctttagctgctaaagttgaagaaactcaagtgccactcttactagatcttcaagtagaggacactaagtacttgtttgaggctaaaaacatacaaaaaatggagcttttggtgatgtcaactttgaaatggaggatgaacccagtgacaccaatctcatttcttgatcacattgtaagaaggcttggattaactgatcatgttcattgggattttttcaagaaatgtgaagctatgatcctttgtttagtttcagattcaagattcgtgtgttataaaccatccgtgttggccacagctacaatgcttcacgttgtagatgaaattgatcctcccaattgtattgactacaaaagtcaacttctggatcttctcaaaaccactaaggacgacataaacgagtgttacgagctcattgtcgagctagcttacgatcatcacaacaaacgaaaacatgatgcaaacgagacaacaaccaatccggttagtccagctggcgtgatcgatttcacttgtgatgaaagttcaaatgagtcatgggaacttaatgctcatcatttccgcgagccttcattcaagaaaacaagaatggattcaacaattcgggttcgggtttggttcacttataagctttaatcgagggtagttgtaaacatgtaatccgcatgcacgctattaatcctacggtccactactacatataatcggcctataaaattataggttaagatgaccagtcgtaggcgtcgagatgtccttatggttggtcaatttctctatggttttaggtcgtttttaatgtgagataaattaaattcggtatgttaagtctttatcaagcaatggacgttatatttattgtttgatattgagaattaaattccatgggaaaaaaaaaaaaaaaaaaaaaaaaaa

SEQ ID NO: 24360 - protein, 357 aa, Helianthus tuberosus
MAILSPYSSSFLDTLFCNEQQDHEYHEYEYEDEFTQTTLTDSSDLHLPPLDQLDLSWEHEELVSLFTKEQEQQKQTPCTLSFGKTSPSVFAARKEAVDWILKVKSCYGFTPLTAILAINYLDRFLSSLHFQEDKPWMIQLVAVSCLSLAAKVEETQVPLLLDLQVEDTKYLFEAKNIQKMELLVMSTLKWRMNPVTPISFLDHIVRRLGLTDHVHWDFFKKCEAMILCLVSDSRFVCYKPSVLATATMLHVVDEIDPPNCIDYKSQLLDLLKTTKDDINECYELIVELAYDHHNKRKHDANETTTNPVSPAGVIDFTCDESSNESWELNAHHFREPSFKKTRMDSTIRVRVWFTYKL

SEQ ID NO: 24361 - DNA, 1405 bp, Populus tremula x Populus tremuloides
  CDS (11)..(1141)
ctggaagaagatggcatcaatgtataacccagaaacgagtgcggtacaagaccaacaacaaaaccctacattactttatgatgctctctattgttctgaagagaattgggtggaagaagttagagaggactggtttcaagatgaactagaaggagagagctattgtagcaacaatagcaataaactaaacacttttccaatattgctagaacaggacttaagctgggaagacgaggagctttcctctttgtttgccaaggaggagcaaaatcagctgtgcaaagacttagaaaccaacccgtctttggctagggctcgctgtgaggctgtagagtggattctaaaggtcaatgaacactactctttcaccgctctaactgcagttttggcagtgaactatcttgataggtttttattcagtgtccaccttcagaaagagaagccatggatggcccaacttgcagctgtgtcttgcctctcacttgctgccaaagtggaggagacgcaagtgccccttctattggattttcaggtggaggacagtaaatacgtgttcgaggccaaaactatccagagaatggagatcctggtgctttctactcttaaatggaagatgaatccagtaaccccaatatcgtttcttgattacatcactagaaggcttggcctagaacactatctttgtttggaatttctcaagaggtgtgagcgcatggtcctctctatcttggcagattctaggtctatgccttatgttccttctgtaatggccgctgccacgatgctctatgttattgataacatagaacccagtcttgcagcagaataccaaagccagctgttgagcattcttggaatcgataaagacaaggtagaggattgcagcaagttcttaatggaatttgctctaagagaccattttaagcttctctcaaacaaacgcaagttttgttcacttccaggcagtcctagcggtgtggttgatgtgtcttttagctcagacagctcaaatgattcatggtctgtggcatcatccgtgtcttcatcaccaaagcctctgtccaagaagagtagggcactgcagagtctaaacaacgcaacaacttcagatttttctcagcattcctcgccagtgccttaaaattactgtttttccctaatggaccacctcttgtacggttaataagtcttgtgctttttcaatgttcaagttaaattgcctgccatctctgcttttccagctcagaccaatgcttagaacgctgaaatattgattgggtactgggaattggaagcagagatggttggcattttaccggaaatgaagaacagaacagaacaaaaaaaaagaaaaaaaaagagccgatgaggaagagttctggtagtaaaaaaaaaaaaaaaaaaa

SEQ ID NO: 24362 - protein, 376 aa, Populus tremula x Populus tremuloides
MASMYNPETSAVQDQQQNPTLLYDALYCSEENWVEEVREDWFQDELEGESYCSNNSNKLNTFPILLEQDLSWEDEELSSLFAKEEQNQLCKDLETNPSLARARCEAVEWILKVNEHYSFTALTAVLAVNYLDRFLFSVHLQKEKPWMAQLAAVSCLSLAAKVEETQVPLLLDFQVEDSKYVFEAKTIQRMEILVLSTLKWKMNPVTPISFLDYITRRLGLEHYLCLEFLKRCERMVLSILADSRSMPYVPSVMAAATMLYVIDNIEPSLAAEYQSQLLSILGIDKDKVEDCSKFLMEFALRDHFKLLSNKRKFCSLPGSPSGVVDVSFSSDSSNDSWSVASSVSSSPKPLSKKSRALQSLNNATTSDFSQHSSPVP

SEQ ID NO: 24363 - DNA, 1636 bp, Daucus carota
  CDS (213)..(1361)
actcactatagggctcgagcggccgcccgggcaggtggagacacatataaaattacatatgctcacacaacacagcaacacacatttataaatgtatatataaagctcacttctttgctacagtctatctatcccaaacttcatttcatcactttacagccatgcttcttgatttctttatatcaagttctctaatttcttattcattttagatgagattcactagggtttacacagaggttttcaatatgacagaccatagcctcctctgcacagaaaccaataacttgtgttttgatgatcttgaggctagagatgatcaggacccgagaatagattgtgaaaatgtggtgggtaatgaatcagaagctttgatttgtgccgtcccattacagagagatgaagattttgtgtttgtgtttgagagcaaggtgaatttttgcccagaggtgattttctccacagatagaagtggtgagcttgatttgtgtgtcagaaaagaggcccttgattggatttataaggctcatgctcattacaattttggagcattgagtgtttgcttagcagtgaattatttggatcgctttctttctctttatgaattgccgagtggaaaaaagtggactgtccaattgttagctgttgcctgtttatcactggcagcaaaaatggaggaggttaatgtgccactaactgttgatttacaggtggctgatcctaagttcgtgttcgaggcgaaaacgattaaaagaatggagcttttggtgttgagcaccttgaaatggagaatgcaagcctgcaccccttgttcattcatagattacttccttcgaaaaatcaacaatgctgatgcgcttccatcggggtctctgatcgataggtcgattcagttcattttgaaaacgatgaaaggtattgattttctggaattcaggccctcagaaatttcagcagctgtggcaatttgtgtaacaagagaagcacaaacactagacattaataaggcaatgtctaatatcatacctgttgaaaaggatagagtattcaagtgtattgaaatgattcaagatctgacattggttactgagactagtaatgtagctagtggtagaacaagagcacaagtgccacaaagtcctgttggggtgttggatgctgcatgcttgagctataagagtgatgagagaacagttgggtcatgtcctaattcttctttacatactgagactagtccacacactaaaaggaggaagctgattgagatcatgaaatgtggattttactctatcactcagtttcagatttttagtgaatgggagttttggtgtggctgcctttgcaagcgaccacctttatgatagaggaaaaataatatataaatataaaaatatgtagagagagagagaggggagagagaatcttgtgccttgagcatgaatatagttgtgaccagctgttaataaaatgtcattttaacagtaaaacttagtgtgggggaagtggccgggccaggagtaaagaggtttttgctatttcagttgtttattaattattattactacatacagaatatattcttcaaaaaaaaaaaaaaaaaaaaaaaaaaaaaaaaaaaaacaaaaaaaaaaaaaaa

SEQ ID NO: 24364 - protein, 382 aa, Daucus carota
MRFTRVYTEVFNMTDHSLLCTETNNLCFDDLEARDDQDPRIDCENVVGNESEALICAVPLQRDEDFVFVFESKVNFCPEVIFSTDRSGELDLCVRKEALDWIYKAHAHYNFGALSVCLAVNYLDRFLSLYELPSGKKWTVQLLAVACLSLAAKMEEVNVPLTVDLQVADPKFVFEAKTIKRMELLVLSTLKWRMQACTPCSFIDYFLRKINNADALPSGSLIDRSIQFILKTMKGIDFLEFRPSEISAAVAICVTREAQTLDINKAMSNIIPVEKDRVFKCIEMIQDLTLVTETSNVASGRTRAQVPQSPVGVLDAACLSYKSDERTVGSCPNSSLHTETSPHTKRRKLIEIMKCGFYSITQFQIFSEWEFWCGCLCKRPPL

SEQ ID NO: 24365 - DNA, 1565 bp, Lagenaria leucantha
  CDS (137)..(1279)
tggacacgaatttcttcgactagtaagcaccaaaagctccataaaagagaaaaaaaaaaggggggaaatggggtttctcttcctctccctataatgactccgcaatactcaatcctcttcttccaagaagaagaagatgaagaagatggctttgcactcaaataaacacagaacccaacgcctccataactctctcttcttcttcgacttcctccactgcactgaacaacaacaccttcaaacagagcatcccattttccttaacaatgggggcaccaacgacttccctcttttccaacaaacaaccacccatttccttgtttacgaagacgaggagctcaatcatttgttgtccaaagaaaaggaccaaaatctccaaaccggtgctgttttgaaaaccttggttcaaacagataatgctctgtctctcgctagaacagaggccatcgactggttgcttaaagttaatgccttttatggtttctcctctctcacagctctcttagccattaattacctcgatagaatcctctctgggccctattttcaaagagataagccatggatgcttcagcttgctgctgtaacttgcatctctttagctgctaaagtcgaagaaattcgtgtccctcttcttctagacctccaggtggaagattcaaagtacatttttgaagcgaaaacgatacagaggatggagcttttagtgcttactgctctgcaatggaagatgcacccagtggcccctgtttcgtttcttggcattatcacaaaaggacttggaatgaagaatcagtacattcaaagagagtttcttagacgctgtgagcgtattcttctctctctcgtctctgattcgagatcggtggggattcttccttctataatggcggtatcagcaatggtgagcgttgttgaagagatgggaaactgtaacccattggaggagtttcaggatcagcttcttaatgccctcaaaataaataaggggagagtgaaggagtgttgtaaagtgataatggaggcaaaaataaaaggatcagggaagaggaagcatgtggaggaggaagcagaagcagaagcagaatcagaatcatcagaagcagaaacagagggagaagcagaagcagaagcagggagcccaaatggagtaatggaggctaatttcagctgtgaaagctccaacgattcgtgggaaatggggacgattgtgtcagaatacacacatttttcttcttcttcttcttcttcttccaaaagaatcagacccactcgatgaattatttgaataatgaattgaaccaaatttgcagagattcaatatccattacattagccttcccctgttctgaaatggcacattggcaaacacacaaaaaccagagacaaaaaagtggggaaaaacagagaagtaatgatgacgatgatgatgagagaggttgttcttctctttctttatagctcattaattatgttgtatatgatgaaattgatgagtatttgcttctattaatattgctctcttcttcatttcaaaaaaaaaaaaaagttgaccacgcgtggcc

SEQ ID NO: 24366 - protein, 380 aa, Lagenaria leucantha
MKKMALHSNKHRTQRLHNSLFFFDFLHCTEQQHLQTEHPIFLNNGGTNDFPLFQQTTTHFLVYEDEELNHLLSKEKDQNLQTGAVLKTLVQTDNALSLARTEAIDWLLKVNAFYGFSSLTALLAINYLDRILSGPYFQRDKPWMLQLAAVTCISLAAKVEEIRVPLLLDLQVEDSKYIFEAKTIQRMELLVLTALQWKMHPVAPVSFLGIITKGLGMKNQYIQREFLRRCERILLSLVSDSRSVGILPSIMAVSAMVSVVEEMGNCNPLEEFQDQLLNALKINKGRVKECCKVIMEAKIKGSGKRKHVEEEAEAEAESESSEAETEGEAEAEAGSPNGVMEANFSCESSNDSWEMGTIVSEYTHFSSSSSSSSKRIRPTR

SEQ ID NO: 24367 - DNA, 1630 bp, Lagenaria leucantha
  CDS (337)..(1395)
aagagcacaagaaagctcatccttaactgctttcttcacagggctggttgcttctgtcgacggggattcgggtgtgagctttttatttttctccgtgtctcgtaccccctcggagggttagtcctatgagctcccggtgtcctcgctgctcaattcagctttgaggtcctctccttcttttccactctgaataagatagaggaaaagagagaaaccccagcttacagccatgggtgaggattggtcttcttcgccattttcctctgtttttctccatttccttctctcaagctctacaatgaaccaaaatcacagcctctttcttctcagaagaagatggtaccaccgtatgcgcttgattctctttattgttcagaagaccactgggagaacgacgacgaagaagaagaaaggggttttcatgagcaaccttattctaatttaacaaccgaatcaagttctccgattctggcagtggcagagcaggatctgttttgggaaaacgatgaattaatttctctgttctcaagagagaagcctaatgaactgtttaaaaccattcagattgacccttctcttgctgccgcccgacgaagcgccgtcgggtggatgctgaaggttaatgcccattattctttctctgctctcactgcggttctcgccgtcgattatttggatcggtttctgtcctgttttcattttcaaagagacaagccatggatgtctcagcttgctgctgttgcttgtatctctcttgctgccaaagtagaggagacccaagtccctcttttattggacctacaagtggaagacagtagatatctatttgaagccaagacaattaagaaaatggagcttcttgtgctctctacgcttcaatggcggatgaatcctgttaccccattttcttttgtggattatatctcaaggaggcttggattcaaggaacatatctgctgggaaattctttggcagtgtgagcgaactattctctctgttattttagagtcagattttatgtcctttcttccttctgtaatggccaccgctacaatgctgcacgttttcaaagctatggaagaacccaccctcagcgttgaatacgattcccagcttcttaacatcctcggaatcgacaaggggaatgtggaagaatgctgtaagctgatctcaaatgcatcaagaagaaacggcaaccaattcaagaaacgtaaaattgggtcgattccgggtagcccgaacggcgtgatggacgtgtcattcagctccgatagctcgaacgactcgtggtcagtggcctcgtcagtttcatcttcgccagagccattaacgaagaagaacagagccaatggatcaatgtctggagattgcgaaacattcagaaccctctcttaattaacttccctttcttctttttcctcgtaatccttgtatgttgaataagaattagaatcaatctttttatttatcgaattctgcgagttaaattgccttaccatctctgcagttaagagccaatggatgggcaatcggaagtttaaaacgcagagatggctggcattttatccggatgcaaaggacattgaacgtataacaatgaagagtagtttaagttgtttaaaaagaaaaa

SEQ ID NO: 24368 - protein, 352 aa, Lagenaria leucantha
MVPPYALDSLYCSEDHWENDDEEEERGFHEQPYSNLTTESSSPILAVAEQDLFWENDELISLFSREKPNELFKTIQIDPSLAAARRSAVGWMLKVNAHYSFSALTAVLAVDYLDRFLSCFHFQRDKPWMSQLAAVACISLAAKVEETQVPLLLDLQVEDSRYLFEAKTIKKMELLVLSTLQWRMNPVTPFSFVDYISRRLGFKEHICWEILWQCERTILSVILESDFMSFLPSVMATATMLHVFKAMEEPTLSVEYDSQLLNILGIDKGNVEECCKLISNASRRNGNQFKKRKIGSIPGSPNGVMDVSFSSDSSNDSWSVASSVSSSPEPLTKKNRANGSMSGDCETFRTLS

SEQ ID NO: 24369 - DNA, 1193 bp, Helianthus annuus
  CDS (9)..(935)
aatacccaatggccattttatcacgatattcatcttcgaacacactcttctgcattgaagaacaagttcatgaagatgaagatgagttaacacatcaagattcctctgcaatccatccattagacctacaagatttgtgttgggaacatgaagaacttgtctctcttttcacaaaagaagaagaacaacaaaagcaaaccccttggccttcttcttgtactttgtcttttcgtaaagaggctgtggattggatccttaaagtcaaaggttgtcatggattcacacctctaacagccattttagccatcaattatcttgatcggtttctgtccagtctccattttcagaaagctaacacaccttggatgattcaccttgttgctgttacttgtctttctttggctgctaaaattcaagaaactcatgtgcctttgctcttagatcttcagctagaggagagtaagttcttgtttgaggccaagaacatacaaaagacggagcttttggtgatgtcaacactgaaatggaggatgaacctagtgacaccaatctcatttcttgatcacattgtaagaaggcttggattatcaaatcatcttcattgggatttcttcaagaaatgtgaagctatgattctttacctagtggctgattcaagatttgtgtgctataaaccatctgtgttggcaaccgctacaatgctttgtgttgtagaggaaatcgacccgaccaattccattggctacaaaagtcaacttctggatcttctcaaaaccactaaggaccacataaatgagtgttacaagcttgttatggatctatcctatgataatcacaacaaaggaaagcgtgatgaaaacgagagaacaatttatccggttagtccagctggttttattggttttatgtgccacgaaagttcaaatgattcatgatcctcgctcaagaattgatcaataattagggtttggctcacttgtaagctttaaaccactcgcaagcactcgttatccataacctatacaatcagcagaagttgcgctaataatagacccgtcggtccaccactagttatgttgtatggtatggtctttaatttctctgttgttttaggtcgtttttaatgtgagataagttaaactcggtgatgttatcatgtcttattcaagcaatgaatttatatattttacatc

SEQ ID NO: 24370 - protein, 308 aa, Helianthus annuus
MAILSRYSSSNTLFCIEEQVHEDEDELTHQDSSAIHPLDLQDLCWEHEELVSLFTKEEEQQKQTPWPSSCTLSFRKEAVDWILKVKGCHGFTPLTAILAINYLDRFLSSLHFQKANTPWMIHLVAVTCLSLAAKIQETHVPLLLDLQLEESKFLFEAKNIQKTELLVMSTLKWRMNLVTPISFLDHIVRRLGLSNHLHWDFFKKCEAMILYLVADSRFVCYKPSVLATATMLCVVEEIDPTNSIGYKSQLLDLLKTTKDHINECYKLVMDLSYDNHNKGKRDENERTIYPVSPAGFIGFMCHESSNDS

SEQ ID NO: 24371 - DNA, 1173 bp, Zea mays
  CDS (1)..(1173)
atggcgccgagctgctacgacgcggcagcgtccatgctcctctgcgccgaggagcacagcagcatcctgtggtacgacgaggaggaggaggagctggaggcggtcgggagaaggagaggccggtcgccgggctacggggacgacttcggcgcggacttgttcccgccgcagtcggaggaatgcgtggccggtctggtggagcgggaacgggaccacatgccggggccgtgctacggcgacaggctgcgcggcggcggcggctgtctctgcgtccgccgggaggccgtcgactggatttggaaggcttacacgcaccacaggttccgccctctcactgcctacttggcagtgaactacctcgatcgcttcctctcgctgtctgaggtgccggacggcaaggactggatgacgcagctcctcgcggtggcgtgcgtttctctggccgccaagatggaggaaaccgccgtcccgcagtgcctggaccttcaggtcggagacgcgcggtacgtgttcgaggcgaagacggtccagaggatggagctcctggttctaacaaccctcaactggaggatgcatgccgtgacgccgttctcctacgtggattacttcctgaacaagctcagcaacggcggcagcacggcgccgaggagctgctggctcttgcagtccgcggagcttatcttgcgtgcggccagaggaaccggctgcgtcgggttcaggccgtccgagatcgccgccgcggttgcagccgccgtggccggagacgtggacgacgcggacggcgtcgagaacgcctgctgcgctcacgtagataaggagcgggtgttgcggtgccaggaagcgatcgggtccatggcgtcctcggcggccattgacggcgacgctaccgtgccaccgaaatctgcgagacgcaggagctcccccgtgcccgtgcccgtgcccgtgccgcagagccctgtgggggtgctggacgcggccgcctgcctcagctacaggagcgaagaggcagcgactgcgactgcgacttctgctgcctcacatgggccccctggctcttcaagctcgtcctcgacctccccggtgaccagcaaaaggaggaaactcgccagccgatgtgatggatcgtgcagtgaccggtcaaagcgcgcgcccgcccaatggaccaaagagtga

SEQ ID NO: 24372 - protein, 390 aa, Zea mays
MAPSCYDAAASMLLCAEEHSSILWYDEEEEELEAVGRRRGRSPGYGDDFGADLFPPQSEECVAGLVERERDHMPGPCYGDRLRGGGGCLCVRREAVDWIWKAYTHHRFRPLTAYLAVNYLDRFLSLSEVPDGKDWMTQLLAVACVSLAAKMEETAVPQCLDLQVGDARYVFEAKTVQRMELLVLTTLNWRMHAVTPFSYVDYFLNKLSNGGSTAPRSCWLLQSAELILRAARGTGCVGFRPSEIAAAVAAAVAGDVDDADGVENACCAHVDKERVLRCQEAIGSMASSAAIDGDATVPPKSARRRSSPVPVPVPVPQSPVGVLDAAACLSYRSEEAATATATSAASHGPPGSSSSSSTSPVTSKRRKLASRCDGSCSDRSKRAPAQWTKE

SEQ ID NO: 24373 - DNA, 1821 bp, Zea mays
  CDS (235)..(1311)
gaaaaaaaggcaaaaaacatttaccttttttctatctgtatattatctgaataaatcaagaggaggaagaggggagggagcgagggagggggaggagtagcaaatccagactccatagcaaccagctcgcgagaaggggaaaagggggaggaagagcttcgcttgtgtattgattgctcgctgctccagtccctgcattcgtgccgtttttggcaagtaggtggcgtggcaagcatggtgccgggctatgactgcgccgcctccgtgctgctgtgcgcggaggacaacgctgctattctcggcctggacgacgatggggaggagtcctcctgggcggccgccgctacgccgccacgtgacaccgtcgccgccgccgccgccaccggggtcgccgtcgatgggattttgacggagttccccttgctctcggatgactgcgttgcgacgctcgtggagaaggaggtggagcacatgcccgcggaggggtacctccagaagctgcagcgacggcatggggacctggatttggccgccgtcaggaaggacgccatcgattggatttggaaggtcattgagcattacaatttcgcaccgttgactgccgttttgtctgtgaactacctcgatagattcctctccacgtatgagttccctgaaggcagagcttggatgactcagctcttggcagtggcttgcttgtctttggcttcgaaaatcgaagagacttttgtgccactccccttggatttgcaggtagcggaggcaaagtttgtttttgagggaaggaccataaaaaggatggagcttctggtgctaagcaccttaaagtggaggatgcatgctgttactgcttgctcatttgttgaatactttcttcataaattgagtgatcatggtgcaccctccttgcttgcacgctctcgctcttcggaccttgtcttgagcaccgctaaaggtgctgaattcgtggtattcagaccctccgagattgctgccagtgttgcacttgctgctatcggcgaatgcaggagttctgtaattgagagagctgctagtagctgcaaatatttggacaaggagagggttttaagatgccatgaaatgattcaagagaagattactgcgggaagcattgtcctaaagtctgctggatcatcaatctcctctgtgccacaaagcccaataggtgtcctggacgctgcagcctgtctgagtcaacaaagcgatgacgctactgtcgggtctcctgcagtatgttaccatagttcttccacaagcaagaggagaaggatcactagacgtctactctaattgtggtacgcttcaggtgtgctcctcaccgctctaggagtttttgattggttcaaacatcttaaatttagtttggccgctggaggattatggtttagtcaagtagttgctgaatggaacaacaaaacacgcacactacttggtccataaagacaagaaaataactggcagcgtcccgcgagccagcgctgcaatccagttcatgcaagaccctagagtccagggggggtgctggtgtaggtagagagggaacaaggcattcacatacgccgtagagatgagagagcctctcgtatgttttgtacttttgctccttcagtttgcaatgaactatataaacaaggattgccttggggcagtgaacatttgtcggatgaaaagaatcaaaaaggatgggggtcggcagaggaatagaacaatttgatatatttccataaactacagatatgtttcctttttcataatgatgagctatcatttttgttgatggtaacaaaaaaaaaaaaaaaa

SEQ ID NO: 24374 - protein, 358 aa, Zea mays
MVPGYDCAASVLLCAEDNAAILGLDDDGEESSWAAAATPPRDTVAAAAATGVAVDGILTEFPLLSDDCVATLVEKEVEHMPAEGYLQKLQRRHGDLDLAAVRKDAIDWIWKVIEHYNFAPLTAVLSVNYLDRFLSTYEFPEGRAWMTQLLAVACLSLASKIEETFVPLPLDLQVAEAKFVFEGRTIKRMELLVLSTLKWRMHAVTACSFVEYFLHKLSDHGAPSLLARSRSSDLVLSTAKGAEFVVFRPSEIAASVALAAIGECRSSVIERAASSCKYLDKERVLRCHEMIQEKITAGSIVLKSAGSSISSVPQSPIGVLDAAACLSQQSDDATVGSPAVCYHSSSTSKRRRITRRLL

SEQ ID NO: 24375 - DNA, 1518 bp, Solanum lycopersicum
  CDS (181)..(1260)
ctccttttggctcttcctattccctctctctcttccccttttttctgtcctttagagagagaaaaaaaatccataagccaagcagcagatatgttactgggtccaagattgagttttggcttaccttaaagataatgagtagagccttcattgtcttcttccctctagaagaaggagaagatggttttccctttagattcccagctccaaaatcctatttctgctcttcttgatggcctttactgtgaggaagatcgattcttggatgatgatttaggggaatggtctagtttagatgtcggaaatgaaaatgttaaaaagactctgcctttattagaatgtgacatgttttgggaacatgatgagcttgccacacttttatctaaggaaaatgagtttcatttgggttttcaatctttaatctcagatgggtctttaatgggggctagaaaagaggctttggattggatgttgagggtcattgcttactatggttttactgctaccactgctgttttagctgtgaactattttgataggtttgtgtctggatggtgctttcagaaagataagccttggatgagtcagcttgctgctgttgcctgtctttccattgctgctaaagtggaggagacccaagttccccttttgttagacctacaagttgctgattctagatttgtgtttgaggcaaagactatacagagaatggaactcttggtgctttctactcttaagtggaaaatgaatctggtgacaccattatctttcattgatcatattatgaggagatttggattcatgagcaacctgcatatggattttcttaagaagtgtgaacgcctcattcttgatatcatcactgattctaggctcttgcattatcctccatctgttattgcaactgcatcgatgttttatgtgatcaatgacattgagcctagcaatgctatggaataccaaaatcagctcatgagtgttcttaaagtcagaaaggacatctttgaggaatgccatgatcttattcttgagctaatggacactgcctgttacaagctctgccaaagcctcaagcgcaaacatcattcagtacctggtagtccaagtggtgttattgatgcatattttagtagtgagagctcgaatgaatcatggtcagtagcatcttcgatttcatcctcacctgagcctcagtataagagaaacaaaactcaagatcagcgaatgacactagctccactgggtagtaatcttcactgatcgatatcttgttctctagattacctagtatttcggcaatggtttactctcttttttggtatgttctcttaaaaatgcaattgcacaatgctctgatgctccatttaagttttactggacttaatttgtccgatgatcgtctagactatgtgaacatcaactccacccccctccttcattggacatgggattggtggagttttcccttgagttgaatcaatgctgctgaattatgttgaaaaaaaaaaaaaaaaaaaa

SEQ ID NO: 24376 - protein, 359 aa, Solanum lycopersicum
MVFPLDSQLQNPISALLDGLYCEEDRFLDDDLGEWSSLDVGNENVKKTLPLLECDMFWEHDELATLLSKENEFHLGFQSLISDGSLMGARKEALDWMLRVIAYYGFTATTAVLAVNYFDRFVSGWCFQKDKPWMSQLAAVACLSIAAKVEETQVPLLLDLQVADSRFVFEAKTIQRMELLVLSTLKWKMNLVTPLSFIDHIMRRFGFMSNLHMDFLKKCERLILDIITDSRLLHYPPSVIATASMFYVINDIEPSNAMEYQNQLMSVLKVRKDIFEECHDLILELMDTACYKLCQSLKRKHHSVPGSPSGVIDAYFSSESSNESWSVASSISSSPEPQYKRNKTQDQRMTLAPLGSNLH

SEQ ID NO: 24377 - DNA, 1449 bp, Solanum lycopersicum
  CDS (101)..(1111)
acaaaccttatttttctttttctttttttaaattcagtttcttgaattagtatgaagtaaatgaaaacacaactaaacttcttcttctcagaagaagataatgtctcaccattatcaagaacaagaacaactagaagcacaaaagattccatttttattagattcactttactgtgaagaaaataatatactcactgaagtatcaatagagacagagagtttttcttcacatgatttgttatgggaagaagaagaacttacctctctgttttctaaagaaacagagtatgaaataagctacaatgtgttagaaaaaaaccagtcttttatttcatcaagaagagaatcagttgaatggatactcaaaacaactgcttattactctttttctgctcaaactggatttcttgcagttaattactttgatagatttctgttatttagttttaatcagtctctgaatcataagccatggatgaatcaacttgttgctgttacttgtctttcattagctgctaaagttgaagaaactgatgttcctctgcttcttgaccttcaagttgaggaatcaggatttttgtttgaatctaaaacaatacagagaatggagatgttgattctgtctacacttaaatggaagatgaatccagtaaccccattttcatttcttgattttataactagaagacttggattgaagcactgtctatctttggaatttctgaggagatgtgagaaagtgcttctttacacaattactgatgatagattcattggttaccttccttctgcaatggcatctgccacaatgttgcatgttcttgataggcttaagccttgcattggagaaaagtaccaagatcaacttttgggcattcttggaattgtcaaggagaaggtggaaggatgttacaggctaatacaagaagtggcttgcaacattgactttggttcaaataagagaaagtttgggacattaccagggagtccaacaggggttatggatatgtcatttagctcagattactccaatgactcatggtcagtggctacatcagttacttcatcacctgagccattgtccaagaagattagggagtcaaatgaatgactaattaaatgtcttttaaatatttccttattagtagactagttattattgttattattagatatgtataatgtccaataacagtgatccacttgtctcttagtttaagtattagtaattaattaagttcttgtttattcacatgttaattttgcttacatgtaaaaattcaaacccccttttgacaattatcacagctagctagctaatggaccatttgtttaatgctgtactgtctatagtggggctatgagattttgtactagttaaaagatggtttggcactttattccaaggaaataaaaacttgcatgaaaaacaaaaaaaaaaaaaaaaaa

SEQ ID NO: 24378 - protein, 336 aa, Solanum lycopersicum
MSHHYQEQEQLEAQKIPFLLDSLYCEENNILTEVSIETESFSSHDLLWEEEELTSLFSKETEYEISYNVLEKNQSFISSRRESVEWILKTTAYYSFSAQTGFLAVNYFDRFLLFSFNQSLNHKPWMNQLVAVTCLSLAAKVEETDVPLLLDLQVEESGFLFESKTIQRMEMLILSTLKWKMNPVTPFSFLDFITRRLGLKHCLSLEFLRRCEKVLLYTITDDRFIGYLPSAMASATMLHVLDRLKPCIGEKYQDQLLGILGIVKEKVEGCYRLIQEVACNIDFGSNKRKFGTLPGSPTGVMDMSFSSDYSNDSWSVATSVTSSPEPLSKKIRESNE

SEQ ID NO: 24379 - DNA, 1459 bp, Solanum lycopersicum
  CDS (26)..(1120)
acagagatattagaaggggaaaaaaatggcaatagagaataatgatcaatctttttttttagatgtgctttactgtgaagaagaagaagaaaaatggggtgatttgttagaggatgaagaaggggttattattaacccattgttgttatcttccgaaggaacaacaaaaactaattctttattattattacctctgcttctgttggaacaagatttgttttgggaagatgaagagcttctttcacttttcgttaaagaaaaagaaactcgttgttgttttgaaagttttgggagtgacccttttctctgttcagctcgtgttgatgttgttgaatggattcttaaagtgaatgctcattatgatttctcagcattgactgccattttagccattaattatcttgacaggtttctttctagccttcaatttcagaaagataagccatggatgactcaacttgctgctgtcacttgtctttctttagcggctaaagttgaagaaactcaagttccccttcttcttgacttccaagtggaggatgcaaaatatgtgtttgaggcaaagactatacaaagaatggagcttctggtactgtcatcactgaaatggaggatgaatccagtgaccccactttcatttcttgatcatattataagaaggcttgggctaaagaacaatgttcattgggaatttctcagaagatgtgaaagtcttcttctatctgtcatgattgattgtagatttgtacgttatatgccttctgtattggctactgcaattatgcttcatgttattcatcaaattgagccttgtaatgctattgactatcaaaatcaacttcttggggttctcaaaattagcaaggagaatgtgaataattgctatgaactcatatccgaagtgtcatcaaagcctattacatcacacaaacgcaaatatgatgaaaatcccagtagtccaagtggtgtaatagatccaatttacacttcagaaagttcaaatgattcatgggatttagatttgccttcgttcaagaaaagcaaagttcaagaacagcaaatgaaaatgtcatcatcattgagcagagtttttgtggaagctgttggtagtcctcattaaaatgtctcttttaaatattttaattacatattcaagaagtattttgctgttatgtgttagctgtggttgttggcagagaagagaagatgagtggctttattttttgcaggagtgtagtctactactactactgtgaagccagagagagaaagagaaaagacagaatatgtgcaatctttgtttttctctctatttatttcaattttctctctcaagtcactttcatgcatgcatacttttgatggactactctatttatattgcctttacttattagtacttaatatatatatatatatatatatatatatataaatcatataaaaaaaaaaaaaaaaa

SEQ ID NO: 24380 - protein, 364 aa, Solanum lycopersicum
MAIENNDQSFFLDVLYCEEEEEKWGDLLEDEEGVIINPLLLSSEGTTKTNSLLLLPLLLLEQDLFWEDEELLSLFVKEKETRCCFESFGSDPFLCSARVDVVEWILKVNAHYDFSALTAILAINYLDRFLSSLQFQKDKPWMTQLAAVTCLSLAAKVEETQVPLLLDFQVEDAKYVFEAKTIQRMELLVLSSLKWRMNPVTPLSFLDHIIRRLGLKNNVHWEFLRRCESLLLSVMIDCRFVRYMPSVLATAIMLHVIHQIEPCNAIDYQNQLLGVLKISKENVNNCYELISEVSSKPITSHKRKYDENPSSPSGVIDPIYTSESSNDSWDLDLPSFKKSKVQEQQMKMSSSLSRVFVEAVGSPH

SEQ ID NO: 24381 - DNA, 1451 bp, Antirrhinum majus
  CDS (118)..(1203)
taaaaaaaagcgtaaaattaaacagaaaaaaatatgatattaagcccaagattcaatcttttgagcttttcttaaagataatgagcagagccccctgtatcttcttctccgaagaagatgttgttttcacattctcaacaaacccatctccaaaatccaatctttgatgctcttctctgtaacgaggagcatttcgatgaagatttggatcttgggtccgggttaaaagacccgggttttataaatcagattcatcataatcaaaaaaaagaagaaccatttactacttttctgtttgagcacgaccttttgtgggaagatgacgagcttgttaatctcttgtctaaggagaaagaacaagaacaacaagcccatttggggtacgatgatgtaatggactctgatgggtttttgaaaagggtgagaaatgaagggattaagtggatgttgaaggtgattggacactatgggttcaatgcgatgactgctgttttagctgtgaattattatgatagatttattacaaacgttgggtttcaaaaggataagccttggatgagtcaattggctgctgttgcttgtctttctgtaaaagtggaggagactcaagtgcctctgttgctggattttcaagtagaggaatcaaagtatgtgtttgaggcaaagactatacagaggatggagcttttggtgctcactactttgaaatggaagatgaaccctgtgacgcctatctcgttctttgaccacattgtgaggaggtttgagttgatgaacaatgtgcaatgcgagtttatgaagaggtgtgagagtgtcattctctccatcatcaccgattatcgatttgtgcgctatcttccttctgttgttgctgctgcaaccatgatatatgtaatcaaagagctttatccttgtgatgcattggaataccagaatgagtttgtgactgtgctgagaactagcaaggaaaagactgatgattgccatatgctaatcactgaagtaatcaacaatcaaagctacatcctttgtcacaagcgcaagtacggttccataccaagcagtccaaatggtgtgatcgatgcctatttcagctctgatggctctaacgattcgtggtcagcagtgtcatccgtttcatcatcaccagagcccgtgtttaagagaatcagagccattgggggggctaatcctcctcattgaactcatttcttattttatctgatatttagcaacggtacttcataatcgctcttttgctatggttttttccgtcataagacgatgcagttatgttacatttctgttatatcttgctgtgatggatcagacatgttttaacagacaattgactcttatcacctctttgattgagggatggagagccaaagggattatgtgagtttttgttcctggagtaaaatcgatgaacttttagtattaatgaaaaa

SEQ ID NO: 24382 - protein, 361 aa, Antirrhinum majus
MLFSHSQQTHLQNPIFDALLCNEEHFDEDLDLGSGLKDPGFINQIHHNQKKEEPFTTFLFEHDLLWEDDELVNLLSKEKEQEQQAHLGYDDVMDSDGFLKRVRNEGIKWMLKVIGHYGFNAMTAVLAVNYYDRFITNVGFQKDKPWMSQLAAVACLSVKVEETQVPLLLDFQVEESKYVFEAKTIQRMELLVLTTLKWKMNPVTPISFFDHIVRRFELMNNVQCEFMKRCESVILSIITDYRFVRYLPSVVAAATMIYVIKELYPCDALEYQNEFVTVLRTSKEKTDDCHMLITEVINNQSYILCHKRKYGSIPSSPNGVIDAYFSSDGSNDSWSAVSSVSSSPEPVFKRIRAIGGANPPH

SEQ ID NO: 24383 - DNA, 1487 bp, Nicotiana tabacum
  CDS (136)..(1242)
gcacgagcttccttcacacaaccagatagagacaagaacagagagattcatggaaatgcccaagaagaatcactcttttggtttcttgttttatataatgagaaagcaacacattttcttcttttctcaaagaagatgggaatacaacacaatgagcataatcaagaccaaacccaatctttccttttagatgctctttactgtgaagaagaaagatgggaagaaacaattgaagatgagattttagaaaaagaagcaacactaccacttcctctgcctttactagaacaagacttgttttgggaagatgaagagctactctctcttttcacaaaagaaaaagaaacaatttccaactttgaaactattaaaacagaccctttactttgtttatctcgtaaagaagctgtgaaatggattcttaaagtaaatgctcattatggattctcaacattcactgctattcttgctattaattactttgataggtttctttcaagtcttcattttcagaaagataagccttggatgattcaacttgtagctgttacttgtctttctttggctgctaaagttgaagaaactcaagttcctcttcttttggacttccaagtggaggatgcaaaatatgtgtttgaggccaaaactattcaaagaatggagcttttggtattgtcctctttaaagtggaggatgaatcctgtaaccccactttcatttgttgatcatataataagaagacttgggctaaagagccatatacactgggaatttctcaagcagtgtgagagaattcttcttttggtcatagctgattgtagattcttaagttatatgccttctgtattggctactgctactatgcttcacgttattcatcaagttgagccttgtaatgctgctgactaccaaaatcaacttcttgaggttctcaacattagcaaggagaaggtgaatgattgctatgaacttataacagaggtgtcttacaactctatttcacacaagcgcaagtatgagagtccaataaatagcccaagtgctgttattgatacattttacagctctgaaaactcaaatgaatcatgggatttgcaaacttcttcctctattccatccacttattcacctcgtgatcaatttttgcctttgtttaagaaaagcagagttcaagaacagcaaatgagattgacatctttaagcagagtttttgtggattatgctgttggcagccctcgctaatattattgacaatgacaatgtattactccttattatgtcctttttgcaaattctactttggaaagatggaaaatgaaaagaggggatagttggtggtagtggctgcagagggttggtgtttgcagcacaatgggggggttaagagaaagaaggataggtaaatattcaatgttctactgggagtaatcgttaattcaaggaacatttagttaattttggtttaagatctctttggttggtccccc

SEQ ID NO: 24384 - protein, 368 aa, Nicotiana tabacum
MGIQHNEHNQDQTQSFLLDALYCEEERWEETIEDEILEKEATLPLPLPLLEQDLFWEDEELLSLFTKEKETISNFETIKTDPLLCLSRKEAVKWILKVNAHYGFSTFTAILAINYFDRFLSSLHFQKDKPWMIQLVAVTCLSLAAKVEETQVPLLLDFQVEDAKYVFEAKTIQRMELLVLSSLKWRMNPVTPLSFVDHIIRRLGLKSHIHWEFLKQCERILLLVIADCRFLSYMPSVLATATMLHVIHQVEPCNAADYQNQLLEVLNISKEKVNDCYELITEVSYNSISHKRKYESPINSPSAVIDTFYSSENSNESWDLQTSSSIPSTYSPRDQFLPLFKKSRVQEQQMRLTSLSRVFVDYAVGSPR

SEQ ID NO: 24385 - DNA, 1137 bp, Medicago sativa
  CDS (1)..(1137)
atggctatccatcatcatcaccaacaacacacttgttctctttttgatgctctttactgtgatgaagaaaaatgggaagatgatgaaggagaagttgtagatgaaggagaacaaagtgatgtcacaacaacaaactatgatatattggactctacttcccttttacctctgcttttgttagaacagaacttgttcaacgaagatgaagaactcaacactcttttctccaaagaaaagattcaacaagaaacttattacgaggatctgaaaaatgtgatcaactttgactcactctctcaacctcgtcgtgaagctgttgaatggatgcttaaagtcaatgctcattatggtttctctgctctcactgcaacacttgctgttaactatcttgataggtttcttctaagcttccattttcaaaaggaaaagccatggatgattcagcttgttgctgttacttgcatctctttggctgctaaagttgaagaaactcaagttcctcttctcttagaccttcaagtgcaagatactaaatatgtgtttgaggcaaagaccattcagagaatggagcttttgattctgtcaacactgaaatggaagatgcatccagtgacaacacactcttttctagatcacattataagaaggcttggattgaaaactaatcttcattgggagtttcttaggcgctgtgagaatcttcttctatctgtacttttagattcaagatttgttggttgtgttccttctgtgttggccactgctacaatgttgcatgttatagaccagattgaacagagtgatgatcatggtgtggattacaaaaatcagcttcttaatgttctcaaaaccagcaaggagaaagttgatgaatgttataatgcgattcttcatcttacaaatgcaaataattatggtcataaacgaaaatatgaagaaatccctggtagtccaagtggcgtaattgatgctgtttttagttctgatggttctaacgattcgtggacagtgggagcatcatcatattcaacctcagagcctgtgtttaagaagaccaagaatcaaggacaaaatatgaatttgtcaccgattaacagggtcattgtcggaattcttgccactgcaacctctccttaa

SEQ ID NO: 24386 - protein, 378 aa, Medicago sativa
MAIHHHHQQHTCSLFDALYCDEEKWEDDEGEVVDEGEQSDVTTTNYDILDSTSLLPLLLLEQNLFNEDEELNTLFSKEKIQQETYYEDLKNVINFDSLSQPRREAVEWMLKVNAHYGFSALTATLAVNYLDRFLLSFHFQKEKPWMIQLVAVTCISLAAKVEETQVPLLLDLQVQDTKYVFEAKTIQRMELLILSTLKWKMHPVTTHSFLDHIIRRLGLKTNLHWEFLRRCENLLLSVLLDSRFVGCVPSVLATATMLHVIDQIEQSDDHGVDYKNQLLNVLKTSKEKVDECYNAILHLTNANNYGHKRKYEEIPGSPSGVIDAVFSSDGSNDSWTVGASSYSTSEPVFKKTKNQGQNMNLSPINRVIVGILATATSP

SEQ ID NO: 24387 - DNA, 1430 bp, Nicotiana tabacum
  CDS (198)..(1301)
cacctttactctcttctcctttttggctcttcccattctctccttctctttctttattttctgtcctgtagagagagagagaaagtataagcaaagcagcagatatgttactgggtccaagattgagttttggcttaccttgaagataatgagtagagcctccattgtcttcttccgtcaagaagaagaagaagaagatggttttccctttagatactcagctcctaaatccaatctttgatgtcctttactgtgaggaagatcgattcttggacgatgatgatttaggagaatggtctagtactttagaacaagtaggaaataatgtgaaaaagactctacctttattagaatgtgacatgttttgggaagatgaccagcttgtcactcttttaactaaggaaaaagagtctcatttgggttttgattgtttaatctcagatggagatgggtttttagtggaggttagaaaagaggcattggattggatgttgagagtcattgctcactatggtttcactgctatgactgctgttttagctgtgaattattttgataggtttgtatctggactctgctttcagaaagataagccttggatgagtcaacttgctgctgtggcttgtctttctattgctgctaaagtggaagagacccaagtcccccttctcttagacctccaagtggctgattcaagatttgtgtttgaggcaaagactattcagagaatggaactcttggtgctctccactcttaagtggaaaatgaatccagtgacaccactatctttcattgatcatatcatgaggagatttggattcatgaccaatctacatttggattttcttaggagatgtgaacgcctcattcttggtattatcactgattctaggctcttgcattatcctccatctgttattgcaactgcagtagtgtatttcgtgatcaatgagattgagccttgcaatgcaatggaataccagaatcagctcatgactgttcttaaagtcaaacaggatagttttgaagaatgccatgatcttattctagagctaatgggcacttctggctacaatatctgccaaagcctcaagcgcaaacatcaatctgtacctggcagtccaagtggagttatcgatgcatattttagttgcgacagctctaatgattcgtggtcggtagcatcttcaatttcatcgtcaccagaacctcagtataagaggatcaaaactcaggatcagacaatgacactggctccactgagttctgtttctgtcgttgtgggcagtagtcctcgttgatcagtatctcattctctagattatctagtattacggctatggttactatatgatctctcttttttggtatgttctcttaaactgcagttgcacaatgctctgatgttccattaaaaaaaaaaaaaaaaa

SEQ ID NO: 24388 - protein, 367 aa, Nicotiana tabacum
MVFPLDTQLLNPIFDVLYCEEDRFLDDDDLGEWSSTLEQVGNNVKKTLPLLECDMFWEDDQLVTLLTKEKESHLGFDCLISDGDGFLVEVRKEALDWMLRVIAHYGFTAMTAVLAVNYFDRFVSGLCFQKDKPWMSQLAAVACLSIAAKVEETQVPLLLDLQVADSRFVFEAKTIQRMELLVLSTLKWKMNPVTPLSFIDHIMRRFGFMTNLHLDFLRRCERLILGIITDSRLLHYPPSVIATAVVYFVINEIEPCNAMEYQNQLMTVLKVKQDSFEECHDLILELMGTSGYNICQSLKRKHQSVPGSPSGVIDAYFSCDSSNDSWSVASSISSSPEPQYKRIKTQDQTMTLAPLSSVSVVVGSSPR

SEQ ID NO: 24389 - DNA, 1679 bp, Nicotiana tabacum
  CDS (181)..(1302)
aaacgagtctctgtgtactcctcctcctatagcttttctctcttcttctcttcacacctcccacaacacacaatcagacaaaatagagaggaaaatgagtatggtgaaaaagctttgttttgtataatgagaaaaagagatttatatacatctcttcttctacttccttcttactagaagatggcaatagaacacaatgagcaacaagaactatctcaatcttttcttttagatgctctttactgtgaagaagaagaagaaaaatggggagatttagtagatgatgagactattattacaccactctcttcagaagtaacaacaacaacaacaacaacaacaaagcctaattctttattacctttgcttttgttggaacaagatttattttgggaagatgaagagcttctttcacttttctctaaagaaaaagaaacccattgttggtttaacagttttcaagatgactctttactctgttctgcccgtgttgattctgtggaatggattttaaaagtgaatggttattatggtttctctgctttgactgccgttttagccataaattactttgacaggtttctgactagtcttcattatcagaaagataaaccttggatgattcaacttgctgctgttacttgtctttctttagctgctaaagttgaagaaactcaagttcctcttcttttagattttcaagtggaggatgctaaatatgtgtttgaggcaaaaactattcaaagaatggagcttttagtgttgtcttcactaaaatggaggatgaatccagtgaccccactttcatttcttgatcatattataaggaggcttgggctaagaaataatattcactgggaatttcttagaagatgtgaaaatctcctcctctctattatggctgattgtagattcgtacgttatatgccgtctgtattggccactgcaattatgcttcacgttattcatcaagttgagccttgtaattctgttgactaccaaaatcaacttcttggggttctcaaaattaacaaggagaaagtgaataattgctttgaactcatatcagaagtgtgttctaagcccatttcacacaaacgcaaatatgagaatcctagtcatagcccaagtggtgtaattgatccaatttacagttcagaaagttcaaatgattcatgggatttggagtcaacatcttcatattttcctgttttcaagaaaagcagagtacaagaacagcaaatgaaattggcatcttcaattagcagagtttttgtggaagctgttggtagtcctcattaaaatcaatcacctgatttatctcttttctttcttattaccaactatggtggtaataatatttattgatattcagaagtatttacctttaatgtcattttcaaaaattacatgaaaatggaaaaaaagaaaagaagagcttagctggtggttgcagttggcagagaagaggactggcttttttttgcaggagtgtagtctactactactggaaagcagagatagagagaggagaaaagacagaaaatctgcactatttgttttttctctattcatatcaattctctcttaggtccttttcatgcatgcatacttttgatggacatattttatatatttactataatcataaattcttgaataaaaaaaaaaaaaaaaaa

SEQ ID NO: 24390 - protein, 373 aa, Nicotiana tabacum
MAIEHNEQQELSQSFLLDALYCEEEEEKWGDLVDDETIITPLSSEVTTTTTTTTKPNSLLPLLLLEQDLFWEDEELLSLFSKEKETHCWFNSFQDDSLLCSARVDSVEWILKVNGYYGFSALTAVLAINYFDRFLTSLHYQKDKPWMIQLAAVTCLSLAAKVEETQVPLLLDFQVEDAKYVFEAKTIQRMELLVLSSLKWRMNPVTPLSFLDHIIRRLGLRNNIHWEFLRRCENLLLSIMADCRFVRYMPSVLATAIMLHVIHQVEPCNSVDYQNQLLGVLKINKEKVNNCFELISEVCSKPISHKRKYENPSHSPSGVIDPIYSSESSNDSWDLESTSSYFPVFKKSRVQEQQMKLASSISRVFVEAVGSPH

SEQ ID NO: 24391 - DNA, 1065 bp, Nicotiana tabacum
  CDS (1)..(1065)
atggcagctgataacatttatgattttgtagcctcaaatcttttatgtacagaaacaaaaagtctttgttttgatgatgttgattctttgactataagtcaacagaacattgaaactaagagtaaagacttgagctttaacaatggtattagatcagagccattgattgatttgccaagtttaagtgaagaatgcttgagttttatggtgcaaagggaaatggagtttttgcctaaagatgattatgtcgagagattgagaagtggagatttggatttgagtgtgagaaaagaggctcttgattggattttgaaggctcatatgcactatggatttggagagctgagtttttgtttgtcgataaattacttggatcgatttctatctctgtatgaattgccaagaagtaaaacttggacagtgcaattgttagctgtggcctgtctatcacttgcagccaaaatggaagaaattaatgttcctttgactgttgatttacaggtaggggatcccaaatttgtatttgaaggcaaaactatacaaagaatggaacttttggtattaagcacattgaagtggagaatgcaagcttatacaccttacacattcatagattattttatgagaaagatgaatggtgatcaaatcccatctcggccgttgatttctggatcaatgcaactgatattaagcataataagaagtattgatttcttggaattcaggtcttctgaaattgcagcatcagtggcaatgtctgtttcaggggaaatacaagcaaaagacattgataaggcaatgccttgcttcttcatacacttagacaagggtagagtgcagaagtgtgttgaactgattcaagatttgacaactgctactattactactgctgctgctgcctcattagtacctcaaagtcctattggagtgttggaagcagcagcatgcttgagctacaaaagtggtgatgagagaacagttggatcatgtacaacttcttcacatactaaaaggagaaaacttgacacatcatctttagagcatgggacttcagaaaagttgtga

SEQ ID NO: 24392 - protein, 354 aa, Nicotiana tabacum
MAADNIYDFVASNLLCTETKSLCFDDVDSLTISQQNIETKSKDLSFNNGIRSEPLIDLPSLSEECLSFMVQREMEFLPKDDYVERLRSGDLDLSVRKEALDWILKAHMHYGFGELSFCLSINYLDRFLSLYELPRSKTWTVQLLAVACLSLAAKMEEINVPLTVDLQVGDPKFVFEGKTIQRMELLVLSTLKWRMQAYTPYTFIDYFMRKMNGDQIPSRPLISGSMQLILSIIRSIDFLEFRSSEIAASVAMSVSGEIQAKDIDKAMPCFFIHLDKGRVQKCVELIQDLTTATITTAAAASLVPQSPIGVLEAAACLSYKSGDERTVGSCTTSSHTKRRKLDTSSLEHGTSEKL

SEQ ID NO: 24393 - DNA, 1020 bp, Arabidopsis thaliana
  CDS (1)..(1020)
atgaggagttaccgttttagtgattatctacacatgtctgtttcattctctaacgatatggatttgttttgtggagaagactccggtgtgttttccggtgagtcaacggttgatttctcgtcttccgaggttgattcatggcctggtgattctatcgcttgttttatcgaagacgagcgtcacttcgttcctggacatgattatctctctagatttcaaactcgatctctcgatgcttccgctagagaagattccgtcgcatggattctcaaggtacaagcgtattataactttcagcctttaacggcgtacctcgccgttaactatatggatcggtttctttacgctcgtcgattaccggaaacgagtggttggccaatgcaacttttagcagtggcatgcttgtctttagctgcaaagatggaggaaattctcgttccttctctttttgattttcaggttgcaggagtgaagtatttatttgaagcaaaaactataaaaagaatggaacttcttgttctaagtgtgttagattggagactaagatcggttacaccgtttgatttcattagcttctttgcttacaagatcgatccttcgggtacctttctcgggttctttatctcccatgctacagagattatactctccaacataaaagaagcgagctttcttgagtactggccatcgagtatagctgcagccgcgattctctgtgtagcgaacgagttaccttctctatcctctgttgtcaatccccacgagagccctgagacttggtgtgacggattgagcaaagagaagatagtgagatgctatagactgatgaaagcgatggccatcgagaataaccggttaaatacaccaaaagtgatagcaaagcttcgagtgagtgtaagggcatcatcgacgttaacaaggccaagtgatgaatcctctttctcatcctcttctccttgtaaaaggagaaaattaagtggctattcatgggtaggtgatgaaacatctacctctaattaa

SEQ ID NO: 24394 - protein, 339 aa, Arabidopsis thaliana
MRSYRFSDYLHMSVSFSNDMDLFCGEDSGVFSGESTVDFSSSEVDSWPGDSIACFIEDERHFVPGHDYLSRFQTRSLDASAREDSVAWILKVQAYYNFQPLTAYLAVNYMDRFLYARRLPETSGWPMQLLAVACLSLAAKMEEILVPSLFDFQVAGVKYLFEAKTIKRMELLVLSVLDWRLRSVTPFDFISFFAYKIDPSGTFLGFFISHATEIILSNIKEASFLEYWPSSIAAAAILCVANELPSLSSVVNPHESPETWCDGLSKEKIVRCYRLMKAMAIENNRLNTPKVIAKLRVSVRASSTLTRPSDESSFSSSSPCKRRKLSGYSWVGDETSTSN

SEQ ID NO: 24395 - DNA, 1071 bp, Oryza sativa subsp
  CDS (1)..(1071)
atgggtgttctttgcttcggcgcttccaacatcctcctctgcgcggaggacagcagcagcgtgcttggcctgggcggctttggcggcggcggcggcgaggtggcggcggagctggggtgcggcggcggtggcggctttgatttctttggcttcggtggtggtgctgtgttccccatcgactccgatgagttcgtggcgttgttggtggagaaggagatggatcatcagcctcagcgggggtatctggagaagctggagctcggtggattggagtgttcttggaggaaagatgccattgattggatttgcaaggtccattcctactacaactttggaccactcagcctttacctcgcagtgaactacctggataggttcctctcctcgtttaatctccctcatgacgaatcttggatgcaacagttgctgtcagttagttgtctatctcttgctacgaagatggaggagaccgtggtccctcttcccatggaccttcaggtttttgatgcggaatatgtgtttgaagcaaggcatattaagaggatggagcttattgtgatgaaaaccctgaaatggaggctgcaagctgtgaccccattctctttcatcggctacttcctggacaagttcaatgaagggaagccgccgagctacacgctggcatcatggtgctctgatctcacagtgggcactctgaaagactctaggttcttgtcattcagaccttctgagattgcggccgcagtggtgttagctgtgcttgctgagaatcagtttcttgtcttcaacagtgcccttggagaatctgaaatccctgtaaataaggagatggttatgagatgctatgagctgatggtagagaaggcattggtgaagaagataaggaacagcaatgcaagctcttcagttccacacagcccgatcaccgtgttggacgcggcgtgcttcagttttaggagtgatgacacaacactaggatcatcacagtcaaacagcaacaacaaagattacaacagccaggactctgctcctgcttccaagaggaggagattaaacacaacaccaatctga

SEQ ID NO: 24396 - protein, 356 aa, Oryza sativa subsp
MGVLCFGASNILLCAEDSSSVLGLGGFGGGGGEVAAELGCGGGGGFDFFGFGGGAVFPIDSDEFVALLVEKEMDHQPQRGYLEKLELGGLECSWRKDAIDWICKVHSYYNFGPLSLYLAVNYLDRFLSSFNLPHDESWMQQLLSVSCLSLATKMEETVVPLPMDLQVFDAEYVFEARHIKRMELIVMKTLKWRLQAVTPFSFIGYFLDKFNEGKPPSYTLASWCSDLTVGTLKDSRFLSFRPSEIAAAVVLAVLAENQFLVFNSALGESEIPVNKEMVMRCYELMVEKALVKKIRNSNASSSVPHSPITVLDAACFSFRSDDTTLGSSQSNSNNKDYNSQDSAPASKRRRLNTTPI

SEQ ID NO: 24397 - DNA, 1202 bp, Arabidopsis thaliana
  CDS (1)..(1104)
atggctttggagaaagaggaagaagcgtcacaaaacggtgcgttttgtgtccttgatgggctctattgcgaggaagaaaccgggtttgtggaggacgatcttgatgacgatggagatttagattttctcgagaaatctgatgagagtgttgtaaagtttcagtttttacctcttttggatatgttcttatgggatgacgatgagattctgagtttgatttcaaaggaaaacgaaacgaatccatgttttggggaacaaatcttagatggctttttggtttcttgtaggaaagaggctttagattgggttcttagggttaaatctcattatgggtttacttcattgacggctatacttgctgtgaactacttcgataggtttatgacaagtataaagcttcagactgataagccatggatgtctcagcttgttgctgtggcttctttgtctttagctgctaaagttgaagagattcaagttccattgctcttagacctccaagtggaagaagcaagatatctctttgaagctaagacgattcaaagaatggagcttttgattctttctactcttcaatggagaatgcaccctgtgactccaatctctttctttgatcacattatccggcgatttggctctaaatggcaccagcaattagacttctgtaggaagtgtgagcgtcttctgatctctgttattgctgatacgaggtttatgaggtacttcccttctgtcttagctactgcaataatgatccttgtcttcgaggaattgaagccatgtgatgaagttgaataccaatctcaaataacgactctactcaaagtcaatcaggagaaagtaaatgaatgctatgaactgttgttggagcacaatccaagcaagaagaggatgatgaatttggttgatcaggacagtccaagtggtgtattagactttgatgacagctcaaatagctcctggaatgtctccactactgcttcagtgtcctcatcatcttcgtctccagagcctctgctcaagagaagaagagttcaggagcagcaaatgagattgccctcaataaaccgtatgtttctcgatgtgcttagtagtcctcgctagtacctttctttgatcaaatgtgtcaaaacataaattcaatctctcttttgcttattattatcggccatcggctacaatttgaaggcagaacattttgt

SEQ ID NO: 24398 - protein, 367 aa, Arabidopsis thaliana
MALEKEEEASQNGAFCVLDGLYCEEETGFVEDDLDDDGDLDFLEKSDESVVKFQFLPLLDMFLWDDDEILSLISKENETNPCFGEQILDGFLVSCRKEALDWVLRVKSHYGFTSLTAILAVNYFDRFMTSIKLQTDKPWMSQLVAVASLSLAAKVEEIQVPLLLDLQVEEARYLFEAKTIQRMELLILSTLQWRMHPVTPISFFDHIIRRFGSKWHQQLDFCRKCERLLISVIADTRFMRYFPSVLATAIMILVFEELKPCDEVEYQSQITTLLKVNQEKVNECYELLLEHNPSKKRMMNLVDQDSPSGVLDFDDSSNSSWNVSTTASVSSSSSSPEPLLKRRRVQEQQMRLPSINRMFLDVLSSPR

SEQ ID NO: 24399 - DNA, 1086 bp, Arabidopsis thaliana
  CDS (1)..(1086)
atggctttagaagaggaggaagagagtcaaaacgcaccgttttgtgttcttgatggtcttttctgtgaggaagagagtgagtttcacgaacaagtagatttgtgcgacgagagtgttgaaaagtttccttttttaaatctgggtttgtctgatcatgatatgttgtgggatgatgatgagttatcaactttgatttcgaaacaagaaccgtgtctttatgacgaaatcttagatgatgagtttctggttttgtgtcgtgaaaaggctcttgattggatttttaaagtgaaatctcattatgggtttaattcattgacggctcttttagctgttaattacttcgataggtttattacaagcaggaagtttcagacagataagccatggatgtctcagcttactgctttggcttgtctgtctttagctgctaaggttgaagagatccgtgttccttttctcttagattttcaagtggaagaagcaagatatgtctttgaagctaagactatacagagaatggagcttcttgttctgtctactcttgactggaggatgcatcctgtgactccaatctcgtttttcgatcacattattcgacgatacagctttaaatctcatcatcaattggagttcttgagtagatgtgaatctttattactctccattattcctgattcgagatttctgagttttagtccttctgtgttagccactgcaataatggtctctgttattagagatttgaagatgtgtgacgaagctgtataccaatctcagctcatgactctactcaaagttgattcggagaaggtaaataaatgctatgagttagtgttagaccacagtccaagcaagaaaaggatgatgaattggatgcaacaacccgctagtccgatcggtgtgtttgatgcgtcattcagttctgatagctcgaatgagtcgtgggttgtgtctgcttctgcttcagtgtcgtcttcaccatcttcagagcctttgctcaagaggagaagagtgcaagagcagcagatgaggctatcttcaataaaccgaatgtttttcgatgtgcttagtagtagtcctcgctaa

SEQ ID NO: 24400 - protein, 361 aa, Arabidopsis thaliana
MALEEEEESQNAPFCVLDGLFCEEESEFHEQVDLCDESVEKFPFLNLGLSDHDMLWDDDELSTLISKQEPCLYDEILDDEFLVLCREKALDWIFKVKSHYGFNSLTALLAVNYFDRFITSRKFQTDKPWMSQLTALACLSLAAKVEEIRVPFLLDFQVEEARYVFEAKTIQRMELLVLSTLDWRMHPVTPISFFDHIIRRYSFKSHHQLEFLSRCESLLLSIIPDSRFLSFSPSVLATAIMVSVIRDLKMCDEAVYQSQLMTLLKVDSEKVNKCYELVLDHSPSKKRMMNWMQQPASPIGVFDASFSSDSSNESWVVSASASVSSSPSSEPLLKRRRVQEQQMRLSSINRMFFDVLSSSPR

SEQ ID NO: 24401 - DNA, 927 bp, Arabidopsis thaliana
  CDS (1)..(927)
atggcagaggagaatctagaactgagtcttttatgtacagagagcaacgttgatgatgagggcatgattgttgacgaaactccgattgaaatttcgattcctcagatgggtttttctcaatcggagagtgaggagattatcatggagatggtggagaaggagaagcagcatttgccaagtgatgattacatcaagagacttagaagtggagatttggatttgaatgttggaagaagagatgccctcaattggatttggaaggcttgtgaagtacaccagtttggaccattgtgtttttgcttagcaatgaactacttggatcgattcttatcggttcatgatttgcctagtggcaaaggttggatattgcagttgttggctgtggcttgtttatcattggcagccaaaattgaagaaactgaagttccaatgttgatagatcttcaggttggagatcctcagtttgtgtttgaggctaaatcagtccaaagaatggagcttttggtgttgaacaaattgaaatggagattgagagcaataactccatgctcatacataagatatttcctgagaaagatgagtaaatgtgatcaagaaccatccaacacattgatatctagatcattacaagtgatagccagcacaaccaaaggtattgactttttggagtttagaccttctgaagttgctgctgctgtggcactttctgtttctggagaattgcagagagtacactttgacaactcttccttctctcctcttttctcactacttcaaaaggagagagtgaagaagataggggaaatgatagagagtgatggctcagacttatgttcacaaacacccaatggggttttagaagtatcggcttgttgtttcagctttaagacccatgattcttcttcttcttatacacatctttcttaa

SEQ ID NO: 24402 - protein, 308 aa, Arabidopsis thaliana
MAEENLELSLLCTESNVDDEGMIVDETPIEISIPQMGFSQSESEEIIMEMVEKEKQHLPSDDYIKRLRSGDLDLNVGRRDALNWIWKACEVHQFGPLCFCLAMNYLDRFLSVHDLPSGKGWILQLLAVACLSLAAKIEETEVPMLIDLQVGDPQFVFEAKSVQRMELLVLNKLKWRLRAITPCSYIRYFLRKMSKCDQEPSNTLISRSLQVIASTTKGIDFLEFRPSEVAAAVALSVSGELQRVHFDNSSFSPLFSLLQKERVKKIGEMIESDGSDLCSQTPNGVLEVSACCFSFKTHDSSSSYTHLS

SEQ ID NO: 24403 - DNA, 1071 bp, Oryza sativa subsp
  CDS (1)..(1071)
atggcagctctgacgagctacgagatggcggcctccatcttgctctgcgccgaggacagcagcagcgtcctcggcttcggcggcgaggaagaggaagaggaggaggacgtcgtggctgggaagagggccaggtgcgctggtccgccgccgccgccgtgcgtggacgtcgctggcgtggatttcgccgtgccgtcggaggaatgcgtcgcccgcctggtggagacggaggcggaccacatgccgagggaggactacgccgagaggctgcgcgccggcggcggcgacggcgacctggatcttcgcgtcaggatggatgccatcgattggatttggaaggttcactcctactacagcttcgctcctcttactgcctgcttggccgtcaactacttggaccgcttcctctcactctaccagcttccggatggcaaggattggatgacgcagctgctagcagtagcgtgcttgtcgcttgctgccaagatggaggaaaccgatgtgcctcaatcgctggacctgcaggtcggggaagaacggtacgtgttcgaggcgaagacgatccagaggatggagctgctggtcctgagcaccctcaaatggaggatgcaggccgtcactcccttctcctacgtcgactacttcctccgcgagctcaacggcggcgatccgccgtcgggacgctcggcgctgctgtcttcagagctcatcttgtgcatagctagaggaacagaatgcttgggattcaggccgtcggagatcgccgccgcggtcgccgccgccgtggtcggagaagaacacgccgctttctcccatgtaaataaggagaggatgtcgcattgccaggaagtgattcaggccatggagttgatacatccaaaaccttcaagccccagcagagtcttcgtctcctcctccattccacggagccctactggcgtgttggatgcagcaggctgcctcagctacaggagtgacgattcagctgttgcctcacactacgcagcaagcagctggggatatgaacatgatagctccccggttagcagcaagaggaggaagattagcagatga

SEQ ID NO: 24404 - protein, 356 aa, Oryza sativa subsp
MAALTSYEMAASILLCAEDSSSVLGFGGEEEEEEEDVVAGKRARCAGPPPPPCVDVAGVDFAVPSEECVARLVETEADHMPREDYAERLRAGGGDGDLDLRVRMDAIDWIWKVHSYYSFAPLTACLAVNYLDRFLSLYQLPDGKDWMTQLLAVACLSLAAKMEETDVPQSLDLQVGEERYVFEAKTIQRMELLVLSTLKWRMQAVTPFSYVDYFLRELNGGDPPSGRSALLSSELILCIARGTECLGFRPSEIAAAVAAAVVGEEHAAFSHVNKERMSHCQEVIQAMELIHPKPSSPSRVFVSSSIPRSPTGVLDAAGCLSYRSDDSAVASHYAASSWGYEHDSSPVSSKRRKISR

SEQ ID NO: 24405 - DNA, 972 bp, Arabidopsis thaliana
  CDS (1)..(972)
atgggtgagcctaaagacagtctcgctctcttcctctgccacgaatcggagtcttctctaaacgaagacgacgacgagacgattgagagatctgataagcaagaacctcactttactactacgatcgatgatgaagattatgtggcagaccttgttcttaaagagaatctccgattcgaaaccctaccctctaaaacgacgtcgtcttccgatagattgattgccatcgattggattctcactacaagaacaagatttgggttccaacatcaaacagcttacattgcaatctcatacttcgatctgtttctccacaaaagattcatcggtttgcagaaagatgaaacatgggcgatgcgattgttatcagtagcttgtttatcattagctgctaaaatggaggaacgtattgttcctggtttatcacaataccctcaagatcatgacttcgttttcaaacccgatgtcattcgtaaaactgaactgttgattctatccacattggactggaagatgaacttgatcactccttttcattacttcaactacttccttgctaaaatctctcaggacaaccattctgtttctaaagacttggtgttgttaagatcctctgattctcttcttgctttaactaaagagataagttttacggagtatcgacagtttgttgttgctgctgttactacattgctagcttcttcttctacctcatcggatattagattgactagagaagagatagctaacaagtttggttcgatctcttggtggacttctaatgagaatgaaaatgtatatttgtgttatcagagaacgctagagattgaggagaggaaacatatgacacctccaccggaaatagcggtttctcgcgaaccgccggcttcaggaagtggcgctaaacgccgattgtcttttgatgattctgatcaaagttctccaccagccaagagaatgcgtaggctatga

SEQ ID NO: 24406 - protein, 323 aa, Arabidopsis thaliana
MGEPKDSLALFLCHESESSLNEDDDETIERSDKQEPHFTTTIDDEDYVADLVLKENLRFETLPSKTTSSSDRLIAIDWILTTRTRFGFQHQTAYIAISYFDLFLHKRFIGLQKDETWAMRLLSVACLSLAAKMEERIVPGLSQYPQDHDFVFKPDVIRKTELLILSTLDWKMNLITPFHYFNYFLAKISQDNHSVSKDLVLLRSSDSLLALTKEISFTEYRQFVVAAVTTLLASSSTSSDIRLTREEIANKFGSISWWTSNENENVYLCYQRTLEIEERKHMTPPPEIAVSREPPASGSGAKRRLSFDDSDQSSPPAKRMRRL

SEQ ID NO: 24407 - DNA, 1029 bp, Oryza sativa
  CDS (1)..(1029)
atggcaccgagctttgattttgcggcatcaatcctcctttgcgcggaggacaacaccgccattcttgatcttggcgaagagagcgaggagatttcttgggttgttggggttgatgcttctctaggggacttgtcgatggatttccccttgcaatccgatgattgcatcgaggccctcctggggagggaggagcagcagcacatccccatggagggctacctccagcggcttctgctgcagcctgatgggctcgatttggtagccgtcaggagcgacgccattgactggatttggaaggtacatgagctttataagtttgggcctttgactgcagtcctgtcggtgaactacctggaccggttcctctccgtgttcgatcttcctcaagaggaggcttgtatgacacaactcttagcagtagcttccttgtctttggctgcaaaaatggaggaaaccgttgttccacaccccttggacttgcaggtgtgtgatgcaaaatatgtgtttgagactaggaccataaaaaggatggagcttgcagtgcttaatgccctaaagtggaggatgcaagctgtgactgcttgctcatttatcgattattaccttcacaagttcaatgatgatgatactccgtccacatccgcactctcacgctcagttgacctcatcttgagtacatgtaaagttgctgaattcttggttttcagaccatcagagatcgcggccagtgtagctctagtagcattggaggaacatgaaactttcatgtttgagagggtggcaacttgttacaaaaatttaaagaaggagagggtattacggtgctatgaaatgattcaagataagattattatgagaaacattatgcgccaatcagccggctccgttttctccattccaaaaagccccataggtgtattggatgcagctgcatgtataagccaacaaagtgaggacacttttgttggatcacctgcaacaaattatgagagctcggcgtcaagcaaaaggaggagaatttgcagatga

SEQ ID NO: 24408 - protein, 342 aa, Oryza sativa
MAPSFDFAASILLCAEDNTAILDLGEESEEISWVVGVDASLGDLSMDFPLQSDDCIEALLGREEQQHIPMEGYLQRLLLQPDGLDLVAVRSDAIDWIWKVHELYKFGPLTAVLSVNYLDRFLSVFDLPQEEACMTQLLAVASLSLAAKMEETVVPHPLDLQVCDAKYVFETRTIKRMELAVLNALKWRMQAVTACSFIDYYLHKFNDDDTPSTSALSRSVDLILSTCKVAEFLVFRPSEIAASVALVALEEHETFMFERVATCYKNLKKERVLRCYEMIQDKIIMRNIMRQSAGSVFSIPKSPIGVLDAAACISQQSEDTFVGSPATNYESSASSKRRRICR

SEQ ID NO: 24409 - DNA, 1068 bp, Brassica napus
  CDS (1)..(1068)
atggctttagaagaagaggaagagattcaaaacgcaccgttttgtatgcttttctgtgaggaagacagttctgggttcgatgaggaagacgaagattcctgcgacgacaaatctgacgaaaagtttccatttttccatctgggttttctcgatcggtgtatgtcctgggaggaagacgagttatcgagtctgatctccaaggaaaacgagttcagaccgtctcttaccgaagagggtgtcttagacgacgagtatctggctttgtgtcgtgaaaaggctgttgattggattctcagggtgaaatctcattacgggtttagttccttgacggctcttctcgctgttaactacttcgataggttcatcacaagcaggaagtttcagacagagtttccgtggatgtctcagcttacggctttggcttgtttgtctttagctgcaaaagttgaagaggtccgagttcctctgctcgtagatctccaagtggaagaggcaagctatgtctttgaggctaaaaccatacagcgaatggagcttttgattctctctactcttcattggagggtgcatcccgtgactccaatctcgtatcttgatcatattatccgtcgattcagctttaaatctcaccagcaattggagtttttgagtagatgtgaatctctgttgctctccattgttcctgattcgaggtttctaagttatagctcgtctgagttagcagctgcaataatggtctctgtctttagaggtttcaagacgtgtgacgaatctgaatacgaatctcagctcatgacactactcagagttgattcggagaaagtacataaatgctatgagttggtgtttgaccacattccaagcacgaagaggatgcaacaaccccctagtccaaccggtgtattcgatgcatcattcagctttgatagctctaacgagtcatgggttgtgtctgcatcaccgtctccagagcctctattcaagaggagaagagtgcaagagcagcagatgaagttgtcttcagtaaacagagtctttctcgatgtgttctctagtagtcctcgctaa

SEQ ID NO: 24410 - protein, 355 aa, Brassica napus
MALEEEEEIQNAPFCMLFCEEDSSGFDEEDEDSCDDKSDEKFPFFHLGFLDRCMSWEEDELSSLISKENEFRPSLTEEGVLDDEYLALCREKAVDWILRVKSHYGFSSLTALLAVNYFDRFITSRKFQTEFPWMSQLTALACLSLAAKVEEVRVPLLVDLQVEEASYVFEAKTIQRMELLILSTLHWRVHPVTPISYLDHIIRRFSFKSHQQLEFLSRCESLLLSIVPDSRFLSYSSSELAAAIMVSVFRGFKTCDESEYESQLMTLLRVDSEKVHKCYELVFDHIPSTKRMQQPPSPTGVFDASFSFDSSNESWVVSASPSPEPLFKRRRVQEQQMKLSSVNRVFLDVFSSSPR

SEQ ID NO: 24411 - DNA, 990 bp, Brassica napus
  CDS (1)..(990)
atggctttagaagaagaggaagagacccaaaacgcaccgttttgtatgcttttctgcgaggaagagagtattagtgtgttcgaggaagacgagagcgtcgtaaagtctccatcttttcatctgggttttcccgatcacgacatgttatgggacgacgacgagttactaggtctgatctcgaaacaggacgagttaaaaccgtgtctttccgacaaagccttagacgagttcaagtctctgtgtcgtgaaaacgctctcggttggattttcagagtgaaaggctattatgggtttagttccttgacggctcttctcgctgtaaactacttcgataggtttattacaagcaggaagtttcagacagataagccatggatgtctcagctgacagctgtcgcttgtttgtctctagctgctaaagttgaagagatccgtgttcctttgctcttagatctccaagtgggagaggcgagatatgtctttgaagctaagactatacagagaatggagcttttgattctctctactcttcaatggaggatgcatcctgtgactcctatctcgtttttcgatcatattatccgtcgatacagctttaactctcacgagttctttagtagatgtgaatctctgttgctctccattgttcatgattcgaggtttctaagttacaccccttctgtgttagccactgcgataatggtctctgttgctagagatttcaaggaagctgaatacgaatctcagctcatgactctgctcaaagtcgatccggagaaagtaaataaatgctatgagttagtgttagatcacaatccaagcaagaagaggatgatgcatgcgtcattaagctctgatgggtcgaacgagtcatgggttgtgtcttcagagcctctatacaagaggagaagagtgcatgagcagcagatgaagttgtcttcaataaacagaatgtttctcgatgtgttcactagtagtagtcctcgctaa

SEQ ID NO: 24412 - protein, 329 aa, Brassica napus
MALEEEEETQNAPFCMLFCEEESISVFEEDESVVKSPSFHLGFPDHDMLWDDDELLGLISKQDELKPCLSDKALDEFKSLCRENALGWIFRVKGYYGFSSLTALLAVNYFDRFITSRKFQTDKPWMSQLTAVACLSLAAKVEEIRVPLLLDLQVGEARYVFEAKTIQRMELLILSTLQWRMHPVTPISFFDHIIRRYSFNSHEFFSRCESLLLSIVHDSRFLSYTPSVLATAIMVSVARDFKEAEYESQLMTLLKVDPEKVNKCYELVLDHNPSKKRMMHASLSSDGSNESWVVSSEPLYKRRRVHEQQMKLSSINRMFLDVFTSSSPR

SEQ ID NO: 24413 - DNA, 1104 bp, Brassica napus
  CDS (1)..(1104)
atggcgattcgtaaggaggacgaaagtagagaagaacagagcacttcgtttcttcttgatgctctctactgcgaagaagagaaatgggaagacgaagaagaagcacaagaagttgaagaaaactcttccttttcctcctcgtctcctacttcaccactggttcttctgcagcaagatttgtactgggaagacgaagatctggtcactctcttctccaaagaagaagaacaaagactcagccgtctcgatgatgtttatctcgccacggatcgaaaagaagctgtgggttggattctgagagtcaacgctcgttatgggttctctactttgactgctgttttagccataacctacctagacaagttcatctgtagctacagcttacagagagacaaaccatggatgcttcagctcgtttctgttgcgtgtctctctctagctgctaaagtcgaagaagtccatgtccctcttcttctagactttcaagtggagactaagtatgtgttcgaagcaaaaaccatacagagaatggagctgctgcttctctctacactccaatggaagatgcatctcgttactccactttcgtttctagaccacatcatcaggagattgggtcttaaaaacaactctcactgggatttcctcaacagatgtcaccgtctcatcctctctgtaatctccgattcaagatttgtcggctacctcccatcagttgttgccgcagctaccatgatgcgaattatagatcaagttgagacctttgaccctctctcacaccaaaccaacctcctcggtgtccttaacataaccaaggaaaaggttgaagcttgctacaatctcatcctccagttaccattggatcacatgggtttacagatcgaaacccaatcttgccgcaaacgcaagagtcgcgactcatcatcgtcgttgagcagcccaagctgcgtgatcgattcaaacccgttcaatagcgacgagagttcaaacgattcgtggtcagcgagttcgtgcaatccaccatcttcttcgccgcaacaagaacaacaagaacctccgttgaagaagacgaagatggagaaaccgattgtgcatctgtcgtag

SEQ ID NO: 24414 - protein, 367 aa, Brassica napus
MAIRKEDESREEQSTSFLLDALYCEEEKWEDEEEAQEVEENSSFSSSSPTSPLVLLQQDLYWEDEDLVTLFSKEEEQRLSRLDDVYLATDRKEAVGWILRVNARYGFSTLTAVLAITYLDKFICSYSLQRDKPWMLQLVSVACLSLAAKVEEVHVPLLLDFQVETKYVFEAKTIQRMELLLLSTLQWKMHLVTPLSFLDHIIRRLGLKNNSHWDFLNRCHRLILSVISDSRFVGYLPSVVAAATMMRIIDQVETFDPLSHQTNLLGVLNITKEKVEACYNLILQLPLDHMGLQIETQSCRKRKSRDSSSSLSSPSCVIDSNPFNSDESSNDSWSASSCNPPSSSPQQEQQEPPLKKTKMEKPIVHLS

SEQ ID NO: 24415 - DNA, 1050 bp, Glycine max
  CDS (1)..(1050)
atggcttaccaccatcaaaaatcccttttggacaccctatactgctccgaagagcattggataggggaaggtgaatttgaccaagcagaggaggagtacggtaacagtaatagcaatagtagcagcaccttagtaaacaactcccctgagtcctcccctcatttgttgctcgaaagcgacatgttttgggacgaacaagagttggcatcgctgttggagaaagaacaacacaacccactaagcacttgctgtctccaaagcaaccctgccttggagggtgctcgcatagaagccgtggagtggattctcaaagtaaacgcccactactccttctctgccctcaccgctgttcttgctgtcaactactttgaccgttttctcttcagcttccgctttcagaatgacattaagccatggatgactcggctcgctgccgtcgcttgcctctccctcgctgccaaagtggacgagacacacgttccctttcttattgaccttcaacaagtggaggagagtagatacttgttcgaagccaagacgattaaaaagatggagattttgatcctttccactcttggatggaagatgaaccctccaacctctctctcttttcttgattacttcacaagaagacttggattgaaggatcatctcttctgggagttcctcactaagtctgaaggcgttcttctctccctcattggagattcgaggttcatgagttatctaccttctgtgttggcaactgctacgatgatgcaagttctgaaaagcgtagagcctagtctagaagctgaatacaagagccagctatttggtattctcagaatcgacaaggagaaggtgaattcgtgttgcaagctgatgctggaattgtggtcagagttcgaggggaagcaatgcatgaaacgcaagtttggaatagggtggattcctggaagcccaaacggcgtgatggatgtgtcgtttagctgtgatagtagctccaatgactcttgggtctcttcctcaccggaaccattgtcaaagaagagtaggagtgaaaaatag

SEQ ID NO: 24416 - protein, 349 aa, Glycine max
MAYHHQKSLLDTLYCSEEHWIGEGEFDQAEEEYGNSNSNSSSTLVNNSPESSPHLLLESDMFWDEQELASLLEKEQHNPLSTCCLQSNPALEGARIEAVEWILKVNAHYSFSALTAVLAVNYFDRFLFSFRFQNDIKPWMTRLAAVACLSLAAKVDETHVPFLIDLQQVEESRYLFEAKTIKKMEILILSTLGWKMNPPTSLSFLDYFTRRLGLKDHLFWEFLTKSEGVLLSLIGDSRFMSYLPSVLATATMMQVLKSVEPSLEAEYKSQLFGILRIDKEKVNSCCKLMLELWSEFEGKQCMKRKFGIGWIPGSPNGVMDVSFSCDSSSNDSWVSSSPEPLSKKSRSEK

SEQ ID NO: 24417 - DNA, 1059 bp, Brassica napus
  CDS (1)..(1059)
atggctttacaagaagaggaagagacccaaaacgcaccgttttgtatgcttttctgcgaggaagagagtattagtgtgttcgaggaagacgagagcgtcgtaaagtctccatcttttcatctgggttttcccgatcacgacatgttatgggacgacgacaagttactaggtctgatctcgaaacaggacgagttaaaaccgtgtctttccgacaaagccttacacgagttcaagtctctgtgtcgtgaaaacgctctcggttggattttcagagtgaaaggctattatgggtttagttccttgacggctcttctcgctgtaaactacttcgataggtttattacaagcaggaagtttcagacagataagccatggatgtctcagctgacagctgtcgcttgtttgtctttagctgctaaagttgaagagatccgtgttccgttgctcttagatctccaagtggaagaggcaagatatgtctttgaagctaaaactatacaaagaatggagctttggattctctctactcttcaatgcaggatgcatcccgtgactccaatctcatatttcgatcacattatccggcgatgcagctctaaatctcaccacgacttggagttcttgagtcgatgtgaatctctgttactctccattgttcctgattcgaggtttctaagctacagcccttcggtgttggccactgcaataatggtctctgtcgttggagattccacgacgtgtgacgaagctgaatatgaatctcagctcatgactctgctcaaagtcgatccggagaaagtaaataaatgctatgagttagtgttagatcacattccaagcaagaaaaggatgcaacccgctagtccaactggtgtatttgatgcatcattcaactctgatagctcgaacgagtcatgggttgcttctgcttctgcttcaatgtctgcatcacagtctcaagagcctctattcaagaggagaagagtgcaagagcagcaaatgaagctgtcttcaataaacagaatctttctcgatgtgttcacaagtagtcctcgctaa

SEQ ID NO: 24418 - protein, 352 aa, Brassica napus
MALQEEEETQNAPFCMLFCEEESISVFEEDESVVKSPSFHLGFPDHDMLWDDDKLLGLISKQDELKPCLSDKALHEFKSLCRENALGWIFRVKGYYGFSSLTALLAVNYFDRFITSRKFQTDKPWMSQLTAVACLSLAAKVEEIRVPLLLDLQVEEARYVFEAKTIQRMELWILSTLQCRMHPVTPISYFDHIIRRCSSKSHHDLEFLSRCESLLLSIVPDSRFLSYSPSVLATAIMVSVVGDSTTCDEAEYESQLMTLLKVDPEKVNKCYELVLDHIPSKKRMQPASPTGVFDASFNSDSSNESWVASASASMSASQSQEPLFKRRRVQEQQMKLSSINRIFLDVFTSSPR

SEQ ID NO: 24419 - DNA, 1002 bp, Brassica napus
  CDS (1)..(1002)
atgagtagccgccgtctcagcgactgctgcaaggatatggacttgttatgcggagaggattcgtccgacgtgttttccggcgaatcaacggctgagttctcgtcggaggaggttgaatcatggcctgatgattcaatcgcgagctgtatagaggacgagaggcactttgttccaggacttgactatctctctaggttccactctcaatctctcgacgcttccgctagagaagagtctgtcacgtggatactcaaggtacaagcgtattacagctttcagcctttgacggcgtacctcgccgttaactatatggatcggtttctctacgctcgccgattaccggaaacgagtggttggccaatgcaacttttagcagtggcatgcttgtctctagctgccaagatggaggaagttctcgttccttctcttttcgatttccaggttgaaggagtgaagtatatatttgaagcaaagacgatacaaagaatggaacttcttgttctggatgtgttggattggagactaagatctgttacacccttcagcttcctcagcttcttcgcttacaagatcgatcccttaggaacctctctcgggttctttcgctcccatgccaccgagattatactctccaacattaaagaagcgagctttcttgagtataagccatcgagcatagctgcagctgcgattctatgtgtagccaacgagctcccttctctatcctctgctgcaaatccccacgatagccctgagacttggtgtgacggattaagcaaagaaaagatcgtgagatgctacaagctgatgaaagcaatggcgatagagaataaccggagaaattcaccaagagtgatagcaaagcttagagtgagcgtaagagcagcatccactctgatgaggccaagtgatgaatcctcctcctcatcatcttctccatctaaaagaaggaaactaagtgactactcatgggtaggtgatgacaactccagctctgaataa

SEQ ID NO: 24420 - protein, 333 aa, Brassica napus
MSSRRLSDCCKDMDLLCGEDSSDVFSGESTAEFSSEEVESWPDDSIASCIEDERHFVPGLDYLSRFHSQSLDASAREESVTWILKVQAYYSFQPLTAYLAVNYMDRFLYARRLPETSGWPMQLLAVACLSLAAKMEEVLVPSLFDFQVEGVKYIFEAKTIQRMELLVLDVLDWRLRSVTPFSFLSFFAYKIDPLGTSLGFFRSHATEIILSNIKEASFLEYKPSSIAAAAILCVANELPSLSSAANPHDSPETWCDGLSKEKIVRCYKLMKAMAIENNRRNSPRVIAKLRVSVRAASTLMRPSDESSSSSSSPSKRRKLSDYSWVGDDNSSSE

SEQ ID NO: 24421 - DNA, 1152 bp, Glycine max
  CDS (1)..(1152)
atgccactacaccatcacctcttcttagaagaaactaaaatggcacatcgttacccaaaaccccttctagacaccctctactgcttagaagatcacattcattgggaggaagaagaacaagtagactataatgagtacagtaacacaacaaccacaaacactaattcctccaatgtggtcttgttagaacacgacctcttctgggaccacgaggagctaccttctcttctcgccaaagaacaccaaaaccaactctcgaatactcttctccaaaacaacctcgttttagcctcatctcgagaagaagcagtggagtggattctgaaagtaaatgctcgttattccttttctaccctcactgcggttctcgctgttaactacctcgataggttcctcttcagcttcagattccaaaacgacaacaacgacaacaacaacaacaacaatccttggctcacacaactatccgcagtggcttgcctctctctcgctgccaaatttgaagagacccacgtgcccctttttatagacctccaagtggaggagagtaagtacttgtttgaagcgaaaaccgttaagagaatggaaatcttggttctttccacacttgggtggaagatgaaccctgtaacacctctttcatttcttgattacatcacaaggaaactggggttaaagggctatctctgttgggagtttctcagaaggtgtgaaaccgttcttctctctgtctttgcagattctagatttatgggttatctaccttctgtgttggctactgccacagtgatgcgcgtggtcaatacagtggagcctcgtctaggagtggaataccaagatcagctcttgggtattcttggaatcgacaaggagaaggtggaagaatgctacaatctgatgatggaggttgtgtcagggtacgatgaggaaggaaaacgatccaagttgaagaaacgcaagttagagtcgattattccttgtagtagccaaaacggcgtaatggaagggtcgtttagctgtgatagtagttcgaatgagtcttgggagttaggtgcatcttctgtttcatcctccagcaagaagactagcactcaagatcagcttctattgaaccattcaaactcatcagattttataagcattcctcgctag

SEQ ID NO: 24422 - protein, 383 aa, Glycine max
MPLHHHLFLEETKMAHRYPKPLLDTLYCLEDHIHWEEEEQVDYNEYSNTTTTNTNSSNVVLLEHDLFWDHEELPSLLAKEHQNQLSNTLLQNNLVLASSREEAVEWILKVNARYSFSTLTAVLAVNYLDRFLFSFRFQNDNNDNNNNNNPWLTQLSAVACLSLAAKFEETHVPLFIDLQVEESKYLFEAKTVKRMEILVLSTLGWKMNPVTPLSFLDYITRKLGLKGYLCWEFLRRCETVLLSVFADSRFMGYLPSVLATATVMRVVNTVEPRLGVEYQDQLLGILGIDKEKVEECYNLMMEVVSGYDEEGKRSKLKKRKLESIIPCSSQNGVMEGSFSCDSSSNESWELGASSVSSSSKKTSTQDQLLLNHSNSSDFISIPR

SEQ ID NO: 24423 - DNA, 1152 bp, Glycine max
  CDS (1)..(1152)
atgaagaaacgttttttttttcttctccgaagaagaaaaatggctctcggcgacgatgcgcagcaccactctcactctccctcgttcctcgattcccttctctgcgaagagcgagaaacgttcgaggaagactttgacgcgaacggtgacgagtgcgagaccgaaaacaacgacccctctgtgataaagtcgcaacctttgcccttggttttgtacgacaatgacctgttctgggaagacgacgagctcgtgtcgttaatcgcgaaagagggagagacccatttgcgttctttttctgatggggccctggaagggcctcgtgttgaagctgtgaactgggtttcgaaagtttctgggcactatgggttctctgctttgaccactgttcttgctgttaactacttcgataggttcatcacaagtttgaagtttcagagggacaagccgtggatgacacagctcgctgctgttgcttgtttgtcccttgctgcgaaaacagaagagacccatgtgccactcctcttggaccttcaagtggaggagtcaaggtttgtgtttgaggcaaagactattcagagaatggagctgctggtgctgtcaactcttaagtggaggatgcttccggtgaccccaatttccttctttgaacacattgtgagaaggcttggtttgaaaagtcgcttgcattgggagtttctgtggcgttgtgagcgggttcttctcaatatcattgcggattcaagggttatgagttatcttccttctacattggctgctgcgacaatgatccatgttattaaagaaattgaatcatttaatgcgactgagtacattgatcagcttctgggtttactaaagattagcgaggaacaagtgaacaagtgctacagaatcatacagaaactattaggttgccatgaaggcatttacggccttccccagaaatgcaagcgactatctgaattgggtagcccgagtgctgttactgatgcatctttcagttgtgatagctcaaatgattcatgggccgtgtcatcatcagtctcactttcactggagccgcagttgaagaggagaagatctcaggaccagcaaatgcgattgccttctgttagtcgtgtgtcaattgatgttcttaatagccctcattaa

SEQ ID NO: 24424 - protein, 383 aa, Glycine max
MKKRFFFLLRRRKMALGDDAQHHSHSPSFLDSLLCEERETFEEDFDANGDECETENNDPSVIKSQPLPLVLYDNDLFWEDDELVSLIAKEGETHLRSFSDGALEGPRVEAVNWVSKVSGHYGFSALTTVLAVNYFDRFITSLKFQRDKPWMTQLAAVACLSLAAKTEETHVPLLLDLQVEESRFVFEAKTIQRMELLVLSTLKWRMLPVTPISFFEHIVRRLGLKSRLHWEFLWRCERVLLNIIADSRVMSYLPSTLAAATMIHVIKEIESFNATEYIDQLLGLLKISEEQVNKCYRIIQKLLGCHEGIYGLPQKCKRLSELGSPSAVTDASFSCDSSNDSWAVSSSVSLSLEPQLKRRRSQDQQMRLPSVSRVSIDVLNSPH

SEQ ID NO: 24425 - DNA, 1116 bp, Glycine max
  CDS (1)..(1116)
atggctctcggcgacgatgcgcagcaccactctccctcgttcctcgatgcccttctctgcgaagagcgagaaaccttcgaggaagactttgatgagaacggttatgagcgtgagaccgaaaacaacgaaccctctgtgataaagtcgcaatctttgcccttggttttgcacgataatgacctgttctgggaagacgaagagctcgtgtcgttaatcgcgaaagagggagagacccatttgtgttttcatggtgtcgttgctaatggggccttggaagggcctcgtgttgaggctgtgaactggatttcgaaagtttgtgggcactatgggttctccgctttgacaactgttctcgctgttaactactttgataggttcatcacaagtttgaagtttcagaacgataagccgtggatgacacagctcactgctgttgcttgtttgtcccttgctgtgaaaacggaagagacccatgtgccactcctcttggaccttcaagtggaggagtcaaggtttgtgtttgaggcaaagactattcagagaatggagctgctggtgctgtcaactcttaagtggaggatgcatccggtgaccccaatttccttctttgaacacattgtgagaaggcttggtttgaagagtcgcttgcattgggagtttctatggcgttgtgagcgtgttcttctcaatgtcattgccgattcaagggttatgagttatcttccttctacattggctgctgcgacaatgatccgtgttattaaagagattgaatcatttaatgcgaccgagtacattgatcagcttctgggtttactaaagattagtgaggaacaagtgaaccagtgctacaaaatcatacagaaactattaggttgctatgaaggcatttacagccttcaccagaaacgcaagcgactatctgaaccgggtagcccaggtgctgtcactgatgcatctttcagttgtgatagctcaaatgattcatggaccgtgtcatcatcagtctcactttcactggagccgctgttgaagaggagaaaatctcaggaccagcaaatgcgactgccttctgtcaattgtgtgtcaattgatgttcttaatagccctcgctaa

SEQ ID NO: 24426 - protein, 371 aa, Glycine max
MALGDDAQHHSPSFLDALLCEERETFEEDFDENGYERETENNEPSVIKSQSLPLVLHDNDLFWEDEELVSLIAKEGETHLCFHGVVANGALEGPRVEAVNWISKVCGHYGFSALTTVLAVNYFDRFITSLKFQNDKPWMTQLTAVACLSLAVKTEETHVPLLLDLQVEESRFVFEAKTIQRMELLVLSTLKWRMHPVTPISFFEHIVRRLGLKSRLHWEFLWRCERVLLNVIADSRVMSYLPSTLAAATMIRVIKEIESFNATEYIDQLLGLLKISEEQVNQCYKIIQKLLGCYEGIYSLHQKRKRLSEPGSPGAVTDASFSCDSSNDSWTVSSSVSLSLEPLLKRRKSQDQQMRLPSVNCVSIDVLNSPR

SEQ ID NO: 24427 - DNA, 1200 bp, Glycine max
  CDS (1)..(1200)
atggcaattcagcaccacaatgaccaactagagcataatgaaaatgtctcatctgtccttgatgccctttactgtgacgaaggaaagtgggaagaggaagaggaggagaaagaagaagaagaagatgaaggtgaaaatgaaagtgaagtgacaacaaacactgcaacttgtcttttccctctgctcttgttggagcaagacttgttctgggaagatgaggaactaaactctatcttttccaaagagaaggttcaacatgaagaagcctatggctataacaatctgaacagtgatgatgataataacaacaacaacaatactagtaataataatgtgcatttggactcttgtctctctcagcctcgtcgtgaggcagtggaatggatgctgaaagtcaatgctcactatggattctctgctctcactgcaacactggccgttacttatctggataggttccttctaagcttccattttcaaagggagaagccatggatgatccagcttgtggctgtcacttgcatctctttggctgcaaaagttgaagaaactcaagtgcctcttctcttggaccttcaagtgcaagacacaaagtatgtgtttgaggcaaagactattcagagaatggagctcctggtgctgtccaccctcaaatggaagatgcaccccgtgacccctctctcctttctagatcacattataagaaggcttggattgaaaacacatcttcactgggagtttctcaggcgctgtgagcatcttcttttgtctgtgcttttagattcaagatttgttggttgtcttccttctgtgttggccactgcaacaatgctgcatgttatagaccagattaaacacaatggtgggatggaatacaaaaatcagcttctgagtgttctcaaaattagcaaggagaaagtagatgagtgttataatgccattctccaactctcaaatgtcaataattatggtcataacaacaacactagcaagcgcaagtatgagcaaatcccaagcagcccaagtggcgttattgatgctgcattttgctctgatggttccaacgattcgtgggcagtggggtcatcattatattcaccaccagagcctctcttcaagaagagcagaacccaaggacaacaaatgaaattgtcaccacttaaccgggtcattgtcggaattgttggcacctctccttaa

SEQ ID NO: 24428 - protein, 399 aa, Glycine max
MAIQHHNDQLEHNENVSSVLDALYCDEGKWEEEEEEKEEEEDEGENESEVTTNTATCLFPLLLLEQDLFWEDEELNSIFSKEKVQHEEAYGYNNLNSDDDNNNNNNTSNNNVHLDSCLSQPRREAVEWMLKVNAHYGFSALTATLAVTYLDRFLLSFHFQREKPWMIQLVAVTCISLAAKVEETQVPLLLDLQVQDTKYVFEAKTIQRMELLVLSTLKWKMHPVTPLSFLDHIIRRLGLKTHLHWEFLRRCEHLLLSVLLDSRFVGCLPSVLATATMLHVIDQIKHNGGMEYKNQLLSVLKISKEKVDECYNAILQLSNVNNYGHNNNTSKRKYEQIPSSPSGVIDAAFCSDGSNDSWAVGSSLYSPPEPLFKKSRTQGQQMKLSPLNRVIVGIVGTSP

SEQ ID NO: 24429 - DNA, 1083 bp, Zea mays
  CDS (1)..(1083)
atggtgccgggctatgactgcgccgcctccgtgctgctgtgcgcggaggacaacgctgctattctcggcctggacgacgatggggaggagtcctcctgggcggccgccgctacgccgccacgtgacaccgtcgccgccgccgccgccgccgccaccggggtcgccgtcgatgggattttgacggagttccccttgctctcggatgactgcgttgcgacgctcgtggagaaggaggtggagcacatgcccgcggaggggtacctccagaagctgcagcgacggcatggggacctggatttggccgccgtcaggaaggacgccatcgattggatttggaaggtcattgagcattacaatttcgcaccgttgactgccgttttgtctgtgaactacctcgatagattcctctccacgtatgagttccctgaaggcagagcttggatgactcagctcttggcagtggcttgcttgtctttggcttcgaaaatcgaagagacttttgtgccactccccttggatttgcaggtagcggaggcaaagtttgtttttgagggaaggaccataaaaaggatggagcttctggtgctaagcaccttaaagtggaggatgcatgctgttactgcttgctcatttgttgaatactttcttcataaattgagtgatcatggtgcaccctccttgcttgcacgctctcgctcttcggaccttgtcttgagcaccgctaaaggtgctgaattcgtggtattcagaccctccgagattgctgccagtgttgcacttgctgctatcggcgaatgcaggagttctgtaattgagagagctgctagtagctgcaaatatttggacaaggagagggttttaagatgccatgaaatgattcaagagaagattactgcgggaagcattgtcctaaagtctgctggatcatcaatctcctctgtgccacaaagcccaataggtgtcctggacgctgcagcctgtctgagtcaacaaagcgatgacgctactgtcgggtctcctgcagtatgttaccatagttcttccacaagcaagaggagaaggatcactagacgtctactctaa

SEQ ID NO: 24430 - protein, 360 aa, Zea mays
MVPGYDCAASVLLCAEDNAAILGLDDDGEESSWAAAATPPRDTVAAAAAAATGVAVDGILTEFPLLSDDCVATLVEKEVEHMPAEGYLQKLQRRHGDLDLAAVRKDAIDWIWKVIEHYNFAPLTAVLSVNYLDRFLSTYEFPEGRAWMTQLLAVACLSLASKIEETFVPLPLDLQVAEAKFVFEGRTIKRMELLVLSTLKWRMHAVTACSFVEYFLHKLSDHGAPSLLARSRSSDLVLSTAKGAEFVVFRPSEIAASVALAAIGECRSSVIERAASSCKYLDKERVLRCHEMIQEKITAGSIVLKSAGSSISSVPQSPIGVLDAAACLSQQSDDATVGSPAVCYHSSSTSKRRRITRRLL

SEQ ID NO: 24431 - DNA, 1167 bp, Zea mays
  CDS (1)..(1167)
atggcgccgagctgctacgacgcggcagcgtccatgctcctctgcgccgaggagcacagcagcatcctgtggtacgacgaggaggaggaggagctggaggcggtcgggagaaggagaggccggtcgccgggctacggggacgacttcggcgcggacttgttcccgccgcagtcggaggaatgcgtggccggtctggtggagcgggaacgggaccacatgccggggccgtgctacggcgacaggctgcgcggcggcggcggctgtctctgcgtccgccgggaggccgtcgactggatttggaaggcttacacgcaccacaggttccgccctctcactgcctacttggcagtgaactacctcgatcgcttcctctcgctgtctgaggtgccggactgcaaggactggatgacgcagctcctcgcggtggcgtgcgtttctctggccgccaagatggaggaaaccgccgtcccgcagtgcctggaccttcaggaggtcggagacgcgcggtacgtgttcgaggcgaagacggtccagaggatggagctcctggttctaacaaccctcaactggaggatgcatgccgtgacgccgttctcctacgtggattacttcctgaacaagctcaacaacggcggcagcacggcgccgaggagctgctggctcttgcagtccgcggagcttatcttgcgtgcggccagaggaaccggctgcgtcgggttcaggccgtccgagatcgccgccgcggttgcagccgccgtggccggagacgtggacgacgcggacggcgtcgagaacgcctgctgcgctcacgtagataaggagcgggtgttgcggtgccaggaagcgatcgggtccatggcgtcctcggcggccattgacgacgctaccgtgccaccgaaatctgcgagacgcaggagctcccccgtgcccgtgccgcagagccctgtgggggtgctggacgcggctccctgcctcagctacaggagcgaagaggcagcgactgcgactgcgactgcgacttctgctgcctcacatggggcccctggctcttcaagctcgtcctcgacctccccggtgaccagcaaaaggaggaaactcgccagccgatgtgatggatcgtgcagtgaccggtcaaagcgcgcgcccgcccaatggaccaaagagtga

SEQ ID NO: 24432 - protein, 388 aa, Zea mays
MAPSCYDAAASMLLCAEEHSSILWYDEEEEELEAVGRRRGRSPGYGDDFGADLFPPQSEECVAGLVERERDHMPGPCYGDRLRGGGGCLCVRREAVDWIWKAYTHHRFRPLTAYLAVNYLDRFLSLSEVPDCKDWMTQLLAVACVSLAAKMEETAVPQCLDLQEVGDARYVFEAKTVQRMELLVLTTLNWRMHAVTPFSYVDYFLNKLNNGGSTAPRSCWLLQSAELILRAARGTGCVGFRPSEIAAAVAAAVAGDVDDADGVENACCAHVDKERVLRCQEAIGSMASSAAIDDATVPPKSARRRSSPVPVPQSPVGVLDAAPCLSYRSEEAATATATATSAASHGAPGSSSSSSTSPVTSKRRKLASRCDGSCSDRSKRAPAQWTKE

SEQ ID NO: 24433 - DNA, 22 bp, Artificial sequence
  primer
atggcgattcggaaggaggaag

SEQ ID NO: 24434 - DNA, 20 bp, Artificial sequence
  primer
ttatggagtggctacgattg

SEQ ID NO: 24435 - protein, 388 aa, Artificial sequence
  consensus sequence
  Variant (2)..(2): Xaa in position 2 is any amino acid
  Variant (4)..(4): Xaa in position 4 is any amino acid
  Variant (6)..(33): Xaa in position 6 to 33 is any amino acid
  Variant (34)..(75): Xaa in position 34 to 75 is any or no amino acid
  Variant (77)..(78): Xaa in position 77 to 78 is any amino acid
  Variant (80)..(96): Xaa in position 80 to 96 is any amino acid
  Variant (97)..(119): Xaa in position 97 to 119 is any or no amino acid
  Variant (121)..(122): Xaa in position 121 to 122 is any amino acid
  Variant (124)..(125): Xaa in position 124 to 125 is any amino acid
  Variant (127)..(129): Xaa in position 127 to 129 is any amino acid
  Variant (131)..(133): Xaa in position 131 to 133 is any amino acid
  Variant (135)..(135): Xaa in position 135 is any amino acid
  Variant (137)..(138): Xaa in position 137 to 138 is any amino acid
  Variant (141)..(142): Xaa in position 141 to 142 is any amino acid
  Variant (145)..(145): Xaa in position 145 is any amino acid
  Variant (148)..(148): Xaa in position 148 is any amino acid
  Variant (152)..(161): Xaa in position 152 to 161 is any amino acid
  Variant (162)..(170): Xaa in position 162 to 170 is any or no amino acid
  Variant (173)..(173): Xaa in position 173 is any amino acid
  Variant (176)..(176): Xaa in position 176 is any amino acid
  Variant (179)..(179): Xaa in position 179 is any amino acid
  Variant (187)..(187): Xaa in position 187 is any amino acid
  Variant (190)..(191): Xaa in position 190 to 191 is any amino acid
  Variant (194)..(195): Xaa in position 194 to 195 is any amino acid
  Variant (198)..(198): Xaa in position 198 is any amino acid
  Variant (200)..(200): Xaa in position 200 is any amino acid
  Variant (201)..(206): Xaa in position 201 to 206 is any or no amino acid
  Variant (208)..(212): Xaa in position 208 to 212 is any amino acid
  Variant (213)..(213): Xaa in position 213 is any or no amino acid
  Variant (220)..(220): Xaa in position 220 is any amino acid
  Variant (226)..(226): Xaa in position 226 is any amino acid
  Variant (231)..(231): Xaa in position 231 is any amino acid
  Variant (233)..(233): Xaa in position 233 is any amino acid
  Variant (235)..(236): Xaa in position 235 to 236 is any amino acid
  Variant (240)..(240): Xaa in position 240 is any amino acid
  Variant (242)..(262): Xaa in position 242 to 262 is any amino acid
  Variant (263)..(270): Xaa in position 263 to 270 is any or no amino acid
  Variant (272)..(283): Xaa in position 272 to 283 is any amino acid
  Variant (286)..(287): Xaa in position 286 to 287 is any amino acid
  Variant (288)..(296): Xaa in position 288 to 296 is any or no amino acid
  Variant (298)..(298): Xaa in position 298 is any amino acid
  Variant (300)..(303): Xaa in position 300 to 303 is any amino acid
  Variant (305)..(328): Xaa in position 305 to 328 is any amino acid
  Variant (329)..(335): Xaa in position 329 to 335 is any or no amino acid
  Variant (337)..(350): Xaa in position 337 to 350 is any amino acid
  Variant (351)..(380): Xaa in position 351 to 380 is any or no amino acid
  Variant (383)..(384): Xaa in position 383 to 384 is any amino acid
  Variant (385)..(385): Xaa in position 385 is any or no amino acid
  Variant (387)..(387): Xaa in position 387 is any amino acid
LXCXEXXXXXXXXXXXXXXXXXXXXXXXXXXXXXXXXXXXXXXXXXXXXXXXXXXXXXXXXXXXXXXXXXXXXXXLXXKXXXXXXXXXXXXXXXXXXXXXXXXXXXXXXXXXXXXXXXXRXXAXXWXXXVXXXYXFXXLTXXLAXNYXDRFXXXXXXXXXXXXXXXXXXXWMXQLXAVXCLSLAAKXEEXXVPXXLDXQXXXXXXXVXXXXXXFEAKTIXRMELLXLSTLXWXMXXVTPXSXXXXXXXXXXXXXXXXXXXXXXXXXXXXXLXXXXXXXXXXXXPSXXXXXXXXXXXAXAXXXXVXXXXXXXXXXXXXXXXXXXXXXXXXXXXXXXCXXXXXXXXXXXXXXXXXXXXXXXXXXXXXXXXXXXXXXXXXXXXSPXXXVXD

SEQ ID NO: 24436 - protein, 39 aa, Artificial sequence
  protein pattern
  Variant (2)..(2): Xaa in position 2 is Ile or Val
  Variant (3)..(3): Xaa in position 3 is any amino acid
  Variant (4)..(4): Xaa in position 4 is Asp, Glu, Gly or Gln
  Variant (5)..(6): Xaa in position 5 to 6 is any amino acid
  Variant (7)..(7): Xaa in position 7 is Phe, His or Tyr
  Variant (8)..(8): Xaa in position 8 is Ile, Leu or Val
  Variant (11)..(11): Xaa in position 11 is Ala, Gly, Ser or Thr
  Variant (12)..(12): Xaa in position 12 is His, Lys or Arg
  Variant (13)..(13): Xaa in position 13 is Ala, Ser or Thr
  Variant (14)..(14): Xaa in position 14 is Ile or Val
  Variant (15)..(15): Xaa in position 15 is any amino acid
  Variant (19)..(19): Xaa in position 19 is any or no amino acid
  Variant (21)..(21): Xaa in position 21 is any amino acid
  Variant (22)..(22): Xaa in position 22 is any or no amino acid
  Variant (24)..(25): Xaa in position 24 to 25 is any amino acid
  Variant (27)..(27): Xaa in position 27 is any amino acid
  Variant (29)..(29): Xaa in position 29 is Lys or Arg
  Variant (30)..(30): Xaa in position 30 is Leu, Met or Val
  Variant (31)..(33): Xaa in position 31 to 33 is any amino acid
  Variant (34)..(34): Xaa in position 34 is Ala or Thr
  Variant (35)..(35): Xaa in position 35 is Ala, Pro, Ser or Thr
  Variant (36)..(36): Xaa in position 36 is any amino acid
  Variant (37)..(37): Xaa in position 37 is Cys, Asp, Ser or Thr
  Variant (38)..(38): Xaa in position 38 is Phe or Tyr
  Variant (39)..(39): Xaa in position 39 is Phe, Ile, Leu or Val
QXXXXXXXFEXXXXXRMEXLXXLXXLXWXXXXXXXXXXX

SEQ ID NO: 24437 - protein, 14 aa, Artificial sequence
  protein pattern
  Variant (2)..(2): Xaa in position 2 is Ile, Leu or Val
  Variant (6)..(6): Xaa in position 6 is Ala, Ser, Thr or Val
  Variant (8)..(8): Xaa in position 8 is any amino acid
  Variant (11)..(12): Xaa in position 11 to 12 is any amino acid
CXSLAXKXEEXXVP

SEQ ID NO: 24438 - DNA, 1239 bp, Arabidopsis thaliana
  CDS (1)..(1239)
atgagcccaaaaaaagatgctgtttctaaaccaactccaatttcagtacccgtttcgagacgatccgatatacccgggtctctctacgtcgacactgacatgggtttctctgggtcaccacttcccatgccactagacatcttacaagggaatccaattccaccttttttatccaagacttttgatttggttgatgacccgactcttgacccggtcatctcttggggactgaccggagctagcttcgtagtttgggatcctctagagtttgccagaatcatacttccaaggaatttcaaacacaacaatttctccagcttcgtcagacagcttaacacttatggatttcgaaagattgatactgacaagtgggaattcgctaacgaggctttccttagaggcaagaagcatcttctgaagaacattcatcgtcgtcgatcaccacaatccaaccaaacttgctgcagtagcactagccaaagccaagggtcacctactgaggttggaggagagattgagaagctgaggaaagagcggcgtgcattgatggaggaaatggttgagcttcagcagcaaagcagaggcacagctcgacatgtggacactgtaaaccagaggctgaaagctgcagagcaacgtcagaagcaattgctctctttcttggctaagttgtttcagaaccggggtttcttggaacgcctgaagaacttcaaaggaaaagaaaaaggaggagctcttggattggaaaaggcgagaaagaagttcatcaagcaccaccagcagcctcaagattctccaacaggaggggaggtggtgaagtatgaagctgatgattgggagagattgctaatgtatgacgaagagactgagaacaccaagggtttaggagggatgacttcaagcgatccaaaaggcaagaacttgatgtatccatcagaagaagagatgagcaaaccagattacttgatgtccttcccatctcctgaaggacttattaaacaagaagagacgacatggagcatgggtttcgatactacaataccgagtttcagcaacaccgatgcatggggaaacacaatggactataatgatgtctcagagtttggttttgctgcagaaacaacaagtgatggtttgcctgatgtctgctgggaacaatttgctgcaggaatcacagagactggattcaactggccaactggtgatgatgatgataatacgccaatgaatgatccttag

SEQ ID NO: 24439 - protein, 412 aa, Arabidopsis thaliana
MSPKKDAVSKPTPISVPVSRRSDIPGSLYVDTDMGFSGSPLPMPLDILQGNPIPPFLSKTFDLVDDPTLDPVISWGLTGASFVVWDPLEFARIILPRNFKHNNFSSFVRQLNTYGFRKIDTDKWEFANEAFLRGKKHLLKNIHRRRSPQSNQTCCSSTSQSQGSPTEVGGEIEKLRKERRALMEEMVELQQQSRGTARHVDTVNQRLKAAEQRQKQLLSFLAKLFQNRGFLERLKNFKGKEKGGALGLEKARKKFIKHHQQPQDSPTGGEVVKYEADDWERLLMYDEETENTKGLGGMTSSDPKGKNLMYPSEEEMSKPDYLMSFPSPEGLIKQEETTWSMGFDTTIPSFSNTDAWGNTMDYNDVSEFGFAAETTSDGLPDVCWEQFAAGITETGFNWPTGDDDDNTPMNDP

SEQ ID NO: 24440 - DNA, 1747 bp, Glycine max
  CDS (141)..(1505)
ctttctcttccaccgccatcatctctccaccctccaccgccctcacacccttttaatatcctcactccccccaccacctcccactcttttcttttcacacccctcctcattcttcttcttcacactaattcagaatcaacatgaacccaaatgatgctaactctcctaagccgttggagattctgcagatgaaccctgttcctccgtttttgtccaagaccttcgacctcgtcgacgacccgactctcgaccccattatctcatggggctccaccggttttagcttcgtcgtgtgggaccctctcgagttcgcgagaatcgtccttcctcggcatttcaagcacaacaacttctccagtttcgttcgtcagctcaatacttatggattccgcaagattgacacggacaagtgggagtttttcaacgaagctttccagcgagggaagaagcacttgctgaagaacatccaaaggcgcaggtcatctcaatcccagcaggttggtagctatattggaatcgaatgttctactgaggcaggaaggtctgatgttgagattgagatagaaaggcttaggaaagaaaggactatgttgatggaagaggttgttgatttgaaacaagagcagcgaagaatggctcaccgcgcaggagaagtgaatcaaaggctccaatccacagaacaaaggcagaaacaaatggtttctttcctggtcaagttaatccagaaccccgcctttttagcccgccttaggcatgaggagcaaaaagaaatagattctccaagagtggtaaggaagtttgtcaagcagcaccaacatgaaactggaacagcagaaactctccaagaagggcagatagtgaggtaccaacatgattggagaaatataggcatgtcttccgaaactccaaaactaagtccagtttccattgaacagtctcctcactacctttcacagggtttggcaggagaagtgagtgtaggcgcagaagatcttactgctcaaatagagaatattgtatcaaatgacttggctgcagtgcacgggatcacagtgtctcaggaaattatgattggagaaggattatctagctttggagctgaagacccccttttcaaagggaaaagtgtcatgagtccaattctagaagttcctccagagtattttgcttccttcccagagggtttgaccaaggggaaagactttcaagatttttctgctcttggaactgaaggcatgataaagctagaagatatatgggactctggccttaatgttagtggtgctgcttcaggtagtgggaatgagctgtggagcaatcatgtcaactatgaagagtttccagaatttggagtcacaagtggtatgtctgactcagacatctgggatattggcttaggaagtttgggaattgataagtggccaactgatgaaccttctcttggtgaaacaaatggtcaagctggtcaaccaaaagaagataggcctaagaattttggtccatagggtttcatttgctcctgcacttgttgccctttggttacttgctatatttatagttcctaggaggcatattattgaatcatttgatttataaatagtattcattcacctgcttttattcatcatttactttcaatttttttattcttttagatgaattctttaactgtccatgtttttcttcgtaaattctaattgtgtaattattgataacttccactcaagtaaatcatacttttcctttc

SEQ ID NO: 24441 - protein, 454 aa, Glycine max
MNPNDANSPKPLEILQMNPVPPFLSKTFDLVDDPTLDPIISWGSTGFSFVVWDPLEFARIVLPRHFKHNNFSSFVRQLNTYGFRKIDTDKWEFFNEAFQRGKKHLLKNIQRRRSSQSQQVGSYIGIECSTEAGRSDVEIEIERLRKERTMLMEEVVDLKQEQRRMAHRAGEVNQRLQSTEQRQKQMVSFLVKLIQNPAFLARLRHEEQKEIDSPRVVRKFVKQHQHETGTAETLQEGQIVRYQHDWRNIGMSSETPKLSPVSIEQSPHYLSQGLAGEVSVGAEDLTAQIENIVSNDLAAVHGITVSQEIMIGEGLSSFGAEDPLFKGKSVMSPILEVPPEYFASFPEGLTKGKDFQDFSALGTEGMIKLEDIWDSGLNVSGAASGSGNELWSNHVNYEEFPEFGVTSGMSDSDIWDIGLGSLGIDKWPTDEPSLGETNGQAGQPKEDRPKNFGP

SEQ ID NO: 24442 - DNA, 1497 bp, Oryza sativa (japonica cultivar-group)
  CDS (1)..(1497)
atggaccacaacaccgaccctcctccgaccaccatggtggacgccgcggcggcgctgctgctggagcccaagctggaggggtacgacgacgacggcggcggcgagccgctgcagccggccccgttcgtctctccgctggaccagctgatgcagccgccgcggccgctggaggcgctgctgcaggggccgcagctgccgccgttcctgtccaagacgtacgacctggtgtgcgagccggagctggacggggtcatctcctggggccacgccggcaacagcttcgtcgtctgggacccctccgccttcgcgcgcgacgtgctcccccaccacttcaagcacaacaacttctccagcttcgtccggcagctcaacacctatggttttcgcaaggttcatgctgatagatgggagtttgctcatgaggatttcctacgacatagcaaacatttgttgaagaagattgtccggcgcaggtcctcaccaacacaacaaagtggtcttcagcctggctcttctggtgaatccggtttagaccctgaactcaacacactgagaagggagaagagtgcattgcttcaggaggtgaccaggctgaagcaagagcaccttcagacaattgaacaaatgagcacgctgaatcagaggctagaatcagcggaagatcggcagaaacagatggtctctttcttggccaagctcctccagaacccaactttcctgaggcaacttaagatgcacagacagcaaaaggaaatcgactccaccagagtgaaaaggaaattcctcaagcatgtaccacatggcaacattgactcaggtgagtccagctcacaacacactggagagagcaatttagatttctcccctacgtccctggaccttccagccacgcacagtgacatcttagaccttcagaattttcttttggaagatggggacctcaatcttgccatgctgccagagaacataggacttgatggaatcgaagcaccagacgacatcggggcgttggttcagggatttgacacacaggaggaacttgagcttggtagcggagttgagctactggaaatacctccagcttctggtcctcgtggccaagatcccacgattggcagatccaagggaaagaatgtattgtctccaggattggatgctacctcttctgaagctgattgcctcggatcattttctgacaatatggggatgctttctgactccatgttacaaacagcgggtaaattgatggatgcagatgatgacgagcgaatttggggcgtcgatgcttcgtcggctttacaaagttcttgcagtggcactagtcagcaagcatatggtagtcttgttagtgatccctatctgatggagatggctaataagcctgaaaaattctgggagctcgattttcaggcactggatgatggagatctgcagctggacaagtgtgttatcgatgaccctgctcttcagcaacagagaggaaatatgaattcgtag

SEQ ID NO: 24443 - protein, 498 aa, Oryza sativa (japonica cultivar-group)
MDHNTDPPPTTMVDAAAALLLEPKLEGYDDDGGGEPLQPAPFVSPLDQLMQPPRPLEALLQGPQLPPFLSKTYDLVCEPELDGVISWGHAGNSFVVWDPSAFARDVLPHHFKHNNFSSFVRQLNTYGFRKVHADRWEFAHEDFLRHSKHLLKKIVRRRSSPTQQSGLQPGSSGESGLDPELNTLRREKSALLQEVTRLKQEHLQTIEQMSTLNQRLESAEDRQKQMVSFLAKLLQNPTFLRQLKMHRQQKEIDSTRVKRKFLKHVPHGNIDSGESSSQHTGESNLDFSPTSLDLPATHSDILDLQNFLLEDGDLNLAMLPENIGLDGIEAPDDIGALVQGFDTQEELELGSGVELLEIPPASGPRGQDPTIGRSKGKNVLSPGLDATSSEADCLGSFSDNMGMLSDSMLQTAGKLMDADDDERIWGVDASSALQSSCSGTSQQAYGSLVSDPYLMEMANKPEKFWELDFQALDDGDLQLDKCVIDDPALQQQRGNMNS

SEQ ID NO: 24444 - DNA, 1509 bp, Medicago sativa; identical to SEQ ID NO: 24246
  CDS (1)..(1509)

SEQ ID NO: 24445 - protein, 502 aa, Medicago sativa; identical to SEQ ID NO: 24247

SEQ ID NO: 24446 - DNA, 1509 bp, Medicago sativa; identical to SEQ ID NO: 24248
  CDS (1)..(1509)

SEQ ID NO: 24447 - protein, 502 aa, Medicago sativa; identical to SEQ ID NO: 24249

SEQ ID NO: 24448 - DNA, 1686 bp, Medicago sativa; identical to SEQ ID NO: 24250
  CDS (1)..(1686)

SEQ ID NO: 24449 - protein, 561 aa, Medicago sativa; identical to SEQ ID NO: 24251

SEQ ID NO: 24450 - DNA, 1509 bp, Medicago sativa; identical to SEQ ID NO: 24252
  CDS (1)..(1509)

SEQ ID NO: 24451 - protein, 502 aa, Medicago sativa; identical to SEQ ID NO: 24253

SEQ ID NO: 24452 - DNA, 1509 bp, Medicago sativa; identical to SEQ ID NO: 24254
  CDS (1)..(1509)

SEQ ID NO: 24453 - protein, 502 aa, Medicago sativa; identical to SEQ ID NO: 24255

SEQ ID NO: 24454 - DNA, 1299 bp, Brassica oleracea
  CDS (1)..(1299)
atggatggtgttaccggcggagactcaaaaagcggcgaggctacgacggcgccgccgctccgaaatccgcatccggcgacgttgcttggcacgaacgctttacctcctccgttcctcagcaagacgtacgacatggtggaagatccggcgagcgacgcgatcgtctcgtggagcccggcgaacaatagcttcgtcgtgtgggatccgccggagttttctcgctcccttctccccagatacttcaaacacaacaatttctccagcttcgttcgtcagttgaacacctatggtttcaggaaagtggatccagatcggtgggagtttgcgaacgaaggtttcttgagaggtcaaaagcatctcttgaagacgataagccggagaaaatctactcagggacatggtagtagtagtagtagtaatccacaatctcatcagggtcacatggcttcgttatcttcatgcgttgaggttgggaagtttggtctcgaggaagaggttgaacagcttaaaagagacaagaacgtgctgatgcaggagctagtgaagttacgccagcagcaacaatcaacggacagcaagcttcagtctatggtcaagagtctccagacgatggagcagaggcagcagcagatcatgtctttccttgctaaagctgttcagaatccaactttcctctctcagtttatacagaagcagacggatagtggtaatatgcatgtgaccgaggctagtaagaagcggagactcactgaggatgctgctgctgcttctgatggacagatagttaagtatcagcctattagaagtgattcaacaatgtctatgatgtggaacatgatgaacactgatgagaagttcccgttttcgccaaaccgggactctggagtcacttttcaagaggtattactgcccacaacttcaggacaatcacaagcatatgcacccatatcctctgcttcaacttccttaatgccaatgattcctcccatgccacaagagagcatcagtgactcacctacagaaaactacatgaatgcagagaaggatgtttcagaggcattcatctctcctagccctttccttgacggtggttcagtaccgaatcagcttgagggattacctcaagaccttgatattgatgaactgatgagtaactgtgatatctttgaagagtatctggcacaaagcccagtttttggagatgagacaacactagagagcagcgacgcaaatggtgggcatgtggataagcttatagaggagttgggtcatctcacttcagagacaaagcaactgtga

SEQ ID NO: 24455 - protein, 432 aa, Brassica oleracea
MDGVTGGDSKSGEATTAPPLRNPHPATLLGTNALPPPFLSKTYDMVEDPASDAIVSWSPANNSFVVWDPPEFSRSLLPRYFKHNNFSSFVRQLNTYGFRKVDPDRWEFANEGFLRGQKHLLKTISRRKSTQGHGSSSSSNPQSHQGHMASLSSCVEVGKFGLEEEVEQLKRDKNVLMQELVKLRQQQQSTDSKLQSMVKSLQTMEQRQQQIMSFLAKAVQNPTFLSQFIQKQTDSGNMHVTEASKKRRLTEDAAAASDGQIVKYQPIRSDSTMSMMWNMMNTDEKFPFSPNRDSGVTFQEVLLPTTSGQSQAYAPISSASTSLMPMIPPMPQESISDSPTENYMNAEKDVSEAFISPSPFLDGGSVPNQLEGLPQDLDIDELMSNCDIFEEYLAQSPVFGDETTLESSDANGGHVDKLIEELGHLTSETKQL

SEQ ID NO: 24456 - DNA, 1509 bp, Medicago sativa; identical to SEQ ID NO: 24258
  CDS (1)..(1509)

SEQ ID NO: 24457 - protein, 502 aa, Medicago sativa; identical to SEQ ID NO: 24259

SEQ ID NO: 24458 - DNA, 1533 bp, Glycine max; identical to SEQ ID NO: 24260
  CDS (1)..(1533)

SEQ ID NO: 24459 - protein, 510 aa, Glycine max; identical to SEQ ID NO: 24261

SEQ ID NO: 24460 - DNA, 1914 bp, Solanum peruvianum
  CDS (250)..(1776)
caagaatccaaaaaaaaaaaaaaattaaaaaaaatggagcttcaggagaaaaactccaccgactttacagagttgtttacaggagatatttcttggtttgtatgtcggcgttacctatataaacttcccttcaaccccttttaccgactttttatctatcacccttatcgaaattttcaatcttttgatcacaaaaactattaaagtttcgatctttgatacataaaaccacaaatctctttatatgatatgaacccatttgataaaaaacaagaacctgatactgattcaaaaaccccatttttgactgaaatggactctgaatttgctgcgttttcaccaatttcactcccttttgctgacccatcttctccttttatcaattttggatcttttgccactcctttgagccaacatccagttggagaaggggaaagggaaggagaaggagaaggaggagaaattgaacagccagctgagggaggattgggtgtgccgcagcctatggagtgtttacatgggatacaaattccgccatttttgtcaaagacttttgatttggttgaggaccctttattggatacgattatttcttggggtacaaatggagaaagctttgtagtttgggatccagtggagttttcaagattggttcttcctaggaatttcaagcacagcaatttctccagctttgttcgacagcttaatacatatggatttcgcaaaatcgatgctgacaggtgggagtttgcgaatgaagggttctcgagagggaagaggcatttgttgaagaacatacagaggcgaaggtcacagcagggtgggagttcttctggatcatctgctgaagcaggaaaaggtactatggatgagatagagaaactcaggaatgagaagagtttgatgatgcaggaagttgttgagttgcagcagcagcagcatggaacagttcaactaatggaatccgttaatgaaaagcttcaggctgcagaacaaagacagaagcagatggtttcattcttggccaaggtgcttcaaaatcccacattcttggctcgtgttcggcagatgaaggagcaaggagaaattactagtccaagaacaatgaggaaatttgttaaacatcagtcacatggtccggatggagtgggatcgtcttcaatggaagggcagatagtcaagttcaggtctgactttcaagaccttgcaggatgctttgacagcccagatttcaatccagttgtggatcaacaactcccagaaactggtttaggagcggaagccatgccatttgaaggtggtcctgttgctgatggactgacagtggcacatgaacttcttaattgttcagatcgggaaatacgaggagcttcattctttaactccggaggctctcaattcaaagggaagaatgtagctagtcctcaaatagaagttatgcctgagtactttgcctcttttccagaggagatggggaaggagaagaacatttcaggattttctgcaccagctattggaagtatggtgaaagatgaggaactttggggtatgggttttgaagccagtgctggcatgccaagcactggccccgagttatgggatagtcttagcagctacgttccagacttcggtgttagctctggtttgtcagatttatgggatatagatcccttgcaggtagctggaagttctggggtcgataagtggccagctgacgggtctccttttggtcagtctgaaagccatgcgaaccagcccaagaatgatagtttctaggaaagagtacccttgggccttcagtgtgccattgggatactgccatcatttagttgatgcgacataatattgaatgagtgattataaatattttagttgataattacttttgactggttgaaaaaaaaaaaaaaaaaa

SEQ ID NO: 24461 - protein, 508 aa, Solanum peruvianum
MNPFDKKQEPDTDSKTPFLTEMDSEFAAFSPISLPFADPSSPFINFGSFATPLSQHPVGEGEREGEGEGGEIEQPAEGGLGVPQPMECLHGIQIPPFLSKTFDLVEDPLLDTIISWGTNGESFVVWDPVEFSRLVLPRNFKHSNFSSFVRQLNTYGFRKIDADRWEFANEGFSRGKRHLLKNIQRRRSQQGGSSSGSSAEAGKGTMDEIEKLRNEKSLMMQEVVELQQQQHGTVQLMESVNEKLQAAEQRQKQMVSFLAKVLQNPTFLARVRQMKEQGEITSPRTMRKFVKHQSHGPDGVGSSSMEGQIVKFRSDFQDLAGCFDSPDFNPVVDQQLPETGLGAEAMPFEGGPVADGLTVAHELLNCSDREIRGASFFNSGGSQFKGKNVASPQIEVMPEYFASFPEEMGKEKNISGFSAPAIGSMVKDEELWGMGFEASAGMPSTGPELWDSLSSYVPDFGVSSGLSDLWDIDPLQVAGSSGVDKWPADGSPFGQSESHANQPKNDSF

SEQ ID NO: 24462 - DNA, 1488 bp, Arabidopsis thaliana; identical to SEQ ID NO: 24270
  CDS (1)..(1488)

SEQ ID NO: 24463 - protein, 495 aa, Arabidopsis thaliana; identical to SEQ ID NO: 24271

SEQ ID NO: 24464 - DNA, 1879 bp, Arabidopsis thaliana; identical to SEQ ID NO: 24274
  CDS (143)..(1600)

SEQ ID NO: 24465 - protein, 485 aa, Arabidopsis thaliana; identical to SEQ ID NO: 24275

SEQ ID NO: 24466 - DNA, 1056 bp, Solanum peruvianum
  CDS (1)..(1056)
atggaggatgtaatgaaagtgaaggtcgaagaagatggcattccgacggctgtgctgcctatggaagggctgcacgacgttggtccgccgccatttctgagcaaaacttatgaaatggtggaagattcctcaactgatcaagtcatatcatggagcacaacaaggaatagctttattgtttgggattctcataagttttccaccacattgttgcctaggtttttcaagcacagcaatttttccagtttcattcggcagcttaacacatatggatttagaaaggtggatcctgacagatgggaatttgcgaatgaaggttttctgggagggcaaaagcatcttttgaagacgataaagaggaggaggaatgttggtcagagtatgaatcaacaaggatctggtgcttgcattgaaattggttattatgggatggaggaggagctagaaagattaaagcgggataaaaacgtgttgatgactgaaatagttaaacttaggcagcaacagcagagtacgaggaatcagatcattgccatgggagaaaaaatcgaaacacaggagaggaaacaagtgcagatgatgagtttcttagcaaagattttcagcaatccaacttttctccagcagtacttggacaaacaggtgcacagaaaagataaacaacgtatcgaagttggacaaaagaggagactaacgatgacccccagtgttacaggaagtgatcaacctatgaattactcctcatcactccaagagagtgaagctgagcttgcaagtattgaaatgttattctctgctgcaatggacaatgaatcaagcagcaatgtcaggccggattctgttgtgacagcaaatggaactgatatggaaccagtggctgatgatatttgggaagagttgctcagtgaagatcttatatctggggatcgagcagcagaggaagtagtggttgttgaacaacctgaattcgacgtggaagttgaagatcttgttgtgaaaacacctgaatggggtgaggaattacaagaccttgtagatcaacttggtttcctttag

SEQ ID NO: 24467 - protein, 351 aa, Solanum peruvianum
MEDVMKVKVEEDGIPTAVLPMEGLHDVGPPPFLSKTYEMVEDSSTDQVISWSTTRNSFIVWDSHKFSTTLLPRFFKHSNFSSFIRQLNTYGFRKVDPDRWEFANEGFLGGQKHLLKTIKRRRNVGQSMNQQGSGACIEIGYYGMEEELERLKRDKNVLMTEIVKLRQQQQSTRNQIIAMGEKIETQERKQVQMMSFLAKIFSNPTFLQQYLDKQVHRKDKQRIEVGQKRRLTMTPSVTGSDQPMNYSSSLQESEAELASIEMLFSAAMDNESSSNVRPDSVVTANGTDMEPVADDIWEELLSEDLISGDRAAEEVVVVEQPEFDVEVEDLVVKTPEWGEELQDLVDQLGFL

SEQ ID NO: 24468 - DNA, 1584 bp, Solanum lycopersicum; identical to SEQ ID NO: 24280
  CDS (1)..(1584)

SEQ ID NO: 24469 - protein, 527 aa, Solanum lycopersicum; identical to SEQ ID NO: 24281

SEQ ID NO: 24470 - DNA, 1584 bp, Solanum peruvianum; identical to SEQ ID NO: 24282
  CDS (1)..(1584)

SEQ ID NO: 24471 - protein, 527 aa, Solanum peruvianum; identical to SEQ ID NO: 24283

SEQ ID NO: 24472 - DNA, 1038 bp, Arabidopsis thaliana
  CDS (1)..(1038)
atggaagaactgaaagtggaaatggaggaagaaacggtgacgtttactggttctgtagcggcttcttcatctgtaggatcctcttcctctcctagaccaatggaagggcttaacgaaacagggccaccaccgtttctgactaagacttacgaaatggtggaagatccggcgacggacacggtggtttcttggagtaatggtcgtaacagctttgtggtgtgggattctcataagttctcaacaactctccttccacgttacttcaagcatagcaatttctcaagttttattcgtcagctcaatacttatggattcagaaagattgatccagatagatgggaatttgcaaatgaagggtttttagcaggacaaaagcatctcttgaagaacatcaaaagaaggaggaacatgggtttgcagaatgtgaatcagcaaggatctgggatgtcatgtgttgaggttgggcaatacggtttcgacggggaggttgagaggttgaagagggatcatggtgtgcttgtagctgaggtagttaggttgaggcaacagcaacacagctccaagagtcaagttgcagctatggagcaacggttgcttgttactgagaagagacagcagcagatgatgacgttccttgccaaggcgttgaacaatccgaactttgttcagcagtttgcggttatgagtaaagagaagaagagtttgtttggtttggatgtggggaggaaacggaggcttacttctactccaagcttggggactatggaggagaatttgttacatgatcaagagtttgatagaatgaaggatgatatggaaatgttgttcgctgcagcaatcgatgatgaggcgaataattcgatgcctactaaggaggaacaatgtttggaggctatgaatgtgatgatgagagatggtaatttggaagcagcgttggatgtgaaagtggaagatttggttggttcgcctttggattgggacagccaagatctacatgacatggttgatcaaatgggttttcttggttcggaaccttaa

SEQ ID NO: 24473 - protein, 345 aa, Arabidopsis thaliana
MEELKVEMEEETVTFTGSVAASSSVGSSSSPRPMEGLNETGPPPFLTKTYEMVEDPATDTVVSWSNGRNSFVVWDSHKFSTTLLPRYFKHSNFSSFIRQLNTYGFRKIDPDRWEFANEGFLAGQKHLLKNIKRRRNMGLQNVNQQGSGMSCVEVGQYGFDGEVERLKRDHGVLVAEVVRLRQQQHSSKSQVAAMEQRLLVTEKRQQQMMTFLAKALNNPNFVQQFAVMSKEKKSLFGLDVGRKRRLTSTPSLGTMEENLLHDQEFDRMKDDMEMLFAAAIDDEANNSMPTKEEQCLEAMNVMMRDGNLEAALDVKVEDLVGSPLDWDSQDLHDMVDQMGFLGSEP

SEQ ID NO: 24474 - DNA, 1353 bp, Oryza sativa
  CDS (1)..(1353)
atggaccacaacaccgaccctcctccgaccaccatggtggacgccgcggcggcgctgctgctggagcccaagctggaggggtacgacgacgacggcggcggcgagccgctgcagccggccccgttcgtctctccgctggaccagctgatgcagccgccgcggccgctggaggcgctgctgcaggggccgcagctgccgccgttcctgtccaagacgtacgacctggtgtgcgagccggagctggacggggtcatctcctggggccacgccggcaacagcttcgtcgtctgggacccctccgccttcgcgcgcgacgtgctcccccaccacttcaagcacaacaacttctccagcttcgtccggcagctcaacacctatggttttcgcaaggttcatgctgatagatgggagtttgctcatgaggatttcctacgacatagcaaacatttgttgaagaagattgtccggcgcaggtcctcaccaacacaacaaagtggtcttcagcctggctcttctggtgaatccggtttagaccctgaactcaacacactgagaagggagaagagtgcattgcttcaggaggtgaccaggctgaagcaagagcaccttcagacaattgaacaaatgagcacgctgaatcagaggctagaatcagcggaagatcggcagaaacagatggtctctttcttggccaagctcctccagaacccaactttcctgaggcaacttaagatgcacagacagcaaaaggaaatcgactccaccagagtgaaaaggaaattcctcaagcatgtaccacatggcaacattgactcagagaacataggacttgatggaatcgaagcaccagacgacatcggggcgttggttcagggatttgacacacaggaggaacttgagcttggtagcggagttgagctactggaaatacctccagcttctggtcctcgtggccaagatcccacgattggcagatccaagggaaagaatgtattgtctccaggattggatgctacctcttctgaagctgattgcctcggatcattttctgacaatatggggatgctttctgactccatgttacaaacagcgggtaaattgatggatgcagatgatgacgagcgaatttggggcgtcgatgcttcgtcggctttacaaagttcttgcagtggcactagtcagcaagcatatggtagtcttgttagtgatccctatctgatggagatggctaataagcctgaaaaattctgggagctcgattttcaggcactggatgatggagatctgcagctggacaagtgtgttatcgatgaccctgctcttcagcaacagagaggaaatatgaattcgtag

SEQ ID NO: 24475 - protein, 450 aa, Oryza sativa
MDHNTDPPPTTMVDAAAALLLEPKLEGYDDDGGGEPLQPAPFVSPLDQLMQPPRPLEALLQGPQLPPFLSKTYDLVCEPELDGVISWGHAGNSFVVWDPSAFARDVLPHHFKHNNFSSFVRQLNTYGFRKVHADRWEFAHEDFLRHSKHLLKKIVRRRSSPTQQSGLQPGSSGESGLDPELNTLRREKSALLQEVTRLKQEHLQTIEQMSTLNQRLESAEDRQKQMVSFLAKLLQNPTFLRQLKMHRQQKEIDSTRVKRKFLKHVPHGNIDSENIGLDGIEAPDDIGALVQGFDTQEELELGSGVELLEIPPASGPRGQDPTIGRSKGKNVLSPGLDATSSEADCLGSFSDNMGMLSDSMLQTAGKLMDADDDERIWGVDASSALQSSCSGTSQQAYGSLVSDPYLMEMANKPEKFWELDFQALDDGDLQLDKCVIDDPALQQQRGNMNS

SEQ ID NO: 24476 - DNA, 1074 bp, Oryza sativa
  CDS (1)..(1074)
atgaactaccgagtggtgaacccggtgaaggtggagagcgggccgtcgacgggcgtggcgaatggccagccgccgaggccgatggacgggctcgccgacggcggcccaccgccgttcctcaccaagacgtacgacatggtggatgacccgaccacggacgccgtcgtgtcgtggagcgccaccaacaacagcttcgtggtgtgggatcctcacctctttgggaacgtgctgctgccgaggtacttcaagcacaacaacttctccagcttcgtccggcagctcaatacctatggcttcaggaaggtggatcctgacaagtgggaatttgcaaatgagggttttctgagaggacagaagcatctccttaaaagcataaagcgtcggaaacctccgaattcatctccaagtcagcaatctcttggctcattccttgaggtagggcacttcggatatgagggagagattgatcagttgaagagggacaaacatctgttgatggctgaagtggtgaagctgaggcaggagcagcaaaacacaaagtcagacctgcaagctatggaacagaagctacaaggtactgagcaaaagcaacagcacatgatggcattcttgtcacgagttatgcataatcctgagttcatacgccagctgttctcccagagtgagatgaggaaggagcttgaagagttcgtctcaaagaaaagaaggcgccgcattgaccagggacctgaacttgatagcatgggtaccggttctagccccgagcaagtgtcacaggtaatgtttgaaccacatgatccagtggattcacttttcaatggtgttccatcagatcttgaaagttcatctgttgaggccaatggaggcaaggcgcaacaagatgttgcttccagtagctctgaacacgggaaaatcaagccatctaacggagagttaaatgaggatttctgggaggacctgctgcacgagggtgggctcgatgaggataccaggaaccccgctatagatgatatgaacttgctgtctcaaaagatgggctacctcaactcaagcagcaccaaatcgccacagtag

SEQ ID NO: 24477 - protein, 357 aa, Oryza sativa
MNYRVVNPVKVESGPSTGVANGQPPRPMDGLADGGPPPFLTKTYDMVDDPTTDAVVSWSATNNSFVVWDPHLFGNVLLPRYFKHNNFSSFVRQLNTYGFRKVDPDKWEFANEGFLRGQKHLLKSIKRRKPPNSSPSQQSLGSFLEVGHFGYEGEIDQLKRDKHLLMAEVVKLRQEQQNTKSDLQAMEQKLQGTEQKQQHMMAFLSRVMHNPEFIRQLFSQSEMRKELEEFVSKKRRRRIDQGPELDSMGTGSSPEQVSQVMFEPHDPVDSLFNGVPSDLESSSVEANGGKAQQDVASSSSEHGKIKPSNGELNEDFWEDLLHEGGLDEDTRNPAIDDMNLLSQKMGYLNSSSTKSPQ

SEQ ID NO: 24478 - DNA, 1065 bp, Brassica napus
  CDS (1)..(1065)
atggaacaactgaaagtggaattggaggaagagacggtgacctacggtggctcagcggcagcttcttcgtctgttggttcgtcatcgtcaccgagaccaatggaagggcttaacgagacagggccaccgccgtttctgacaaagacttacgacatggtggaggatccggcaacggacacggtggtgtcttggagcagtggtcgtaacagtttcatcgtttgggattctcacaaattctccaccactctccttcctcgctacttcaagcatagcaatttctccagcttcattcgtcagctcaacacttatggattcagaaagatcgatccggacagatgggagttcgcgaacgaagggtttttggcggggcagaagcatctcctgaagagcataaaacgaaggagaaacatgggtttgcagactgtgaatcagcaaggatcaggatcaggatcaggatcaggatcaggtatgtcttgtgtggaagtcgggcaatacggcttcgaaggggaggtagagagactgaaaagggaccatagcgtgctcgtagctgaggtagttaggctgagacagcagcaacataaatccaagagccaagccgcagaaatggagcaacgtttgctagttacagagaaaagacagcagcaaatgatgacgttcctcgccaaggccttgaacaatccaaactttgttcaacagttcgcgctaatgagcaaagagaagaagggtttgttcggctccgatgttggtaggaagcggaggcttacttctagtccaagcttggggactatcgaggagagagtgttgcatgatcaggagttcgatagaatgaaggatgatatggagacgttacttgctgcagccatagatgatgaggcgagtaatttggtggccgctagtaaggatgaacaatgtttggaagctatgaatgtgatgatggaagatggttctttagagccagagatagatgtcaaagtggaagattttgtagcttcaccgttggattggggcagtgaggacctacacgacattgtcgatcaaatgggttttcttggatcagaaccttga

SEQ ID NO: 24479 - protein, 354 aa, Brassica napus
MEQLKVELEEETVTYGGSAAASSSVGSSSSPRPMEGLNETGPPPFLTKTYDMVEDPATDTVVSWSSGRNSFIVWDSHKFSTTLLPRYFKHSNFSSFIRQLNTYGFRKIDPDRWEFANEGFLAGQKHLLKSIKRRRNMGLQTVNQQGSGSGSGSGSGMSCVEVGQYGFEGEVERLKRDHSVLVAEVVRLRQQQHKSKSQAAEMEQRLLVTEKRQQQMMTFLAKALNNPNFVQQFALMSKEKKGLFGSDVGRKRRLTSSPSLGTIEERVLHDQEFDRMKDDMETLLAAAIDDEASNLVAASKDEQCLEAMNVMMEDGSLEPEIDVKVEDFVASPLDWGSEDLHDIVDQMGFLGSEP

SEQ ID NO: 24480 - DNA, 1065 bp, Brassica napus
  CDS (1)..(1065)
atggaacaactgaaagtggaattggaggaagagacggtgacctacggtggctcagcggcagcttcttcgtctgttggttcgtcatcgtcaccgagaccaatggaagggcttaacgagacagggccaccgccgtttctgacaaagacttacgacatggtggaggatccggcaacggacacggtggtgtcttggagcagtggtcgtaacagtttcatcgtttgggattctcacaaattctccaccactctccttcctcgctacttcaagcatagcaatttctccagcttcattcgtcagctcaacacttatggattcagaaagatcgatccggacagatgggagttcgcgaacgaagggtttttggcggggcagaagcatctcctgaagagcataaaacgaaggagaaacatgggtttgcagactgtgaatcagcaaggatcaggatcaggatcaggatcaggatcaggtatgtcttgtgtggaagtcgggcaatacggcttcgaaggggaggtagagagactgaaaagggaccatagcgtgctcgtagctgaggtagttaggctgagacagcagcaacataactccaagagccaagtcgcagaaatggagcaacgtttgctagttactgagaaaagacagcagcaaatgatggcgttcctcgccaaggccttgaacaatccaaactttgttcaacagttcgcgctaatgagcaaagagaagaagggtttgttcggttccgatgttggtaggaagcggaggcttacttctagtccaagcttggggactatcgaggagagagtgttgcatgatcaggagttcgatagaatgaaggatgatatggagacgttacttgctgcagccatagatgatgaggcgagtaatttggtggccgctagtaaggatgaacaatgtttggaagctatgaatgtgatgatggaagatggttctttagagccagagatagatgtcaaagtggaagattttgtagcttcaccgttggattggggcagtgaggacctacacgacattgtcgatcaaatgggttttcttggatcagaaccttga

SEQ ID NO: 24481 - protein, 354 aa, Brassica napus
MEQLKVELEEETVTYGGSAAASSSVGSSSSPRPMEGLNETGPPPFLTKTYDMVEDPATDTVVSWSSGRNSFIVWDSHKFSTTLLPRYFKHSNFSSFIRQLNTYGFRKIDPDRWEFANEGFLAGQKHLLKSIKRRRNMGLQTVNQQGSGSGSGSGSGMSCVEVGQYGFEGEVERLKRDHSVLVAEVVRLRQQQHNSKSQVAEMEQRLLVTEKRQQQMMAFLAKALNNPNFVQQFALMSKEKKGLFGSDVGRKRRLTSSPSLGTIEERVLHDQEFDRMKDDMETLLAAAIDDEASNLVAASKDEQCLEAMNVMMEDGSLEPEIDVKVEDFVASPLDWGSEDLHDIVDQMGFLGSEP

SEQ ID NO: 24482 - DNA, 1272 bp, Glycine max
  CDS (1)..(1272)
atgaactcgtctccgtcttcttcccagttaccttcatcaagcgctgattttgacaagtttaatagtttgccgcgcttccgcccacttgaatgcttgcaagggaacccggttccggcgttcctgtccaagactttcgaactcgtcgacgatccctcgctggatccgatcatatcctggggctccaccggtgttagcttcgtggtgtgggatcctaccctgtttgcaagacacgtcttgccgaggaatttcaagcataacaatttctccagttttgttcgccagttaaatacctatggattccgcaagattgacactgaaaaatgggagtttttcaatgaagctttccagcgaggaaagagacatcttctgaagaacatccggaggcgcgggccacctcagtcccatcaggttggtggcaatattgtgccttattccgatgcagataaggccgggcttgaatttgagctagaaagtctaaggaaagaaaggagtgtgctaatgcaagaggtggttgagttgcaacaacagcagagaacgacacttcaacgtgcgagacaggtgaatcagaggcttcaatctgcagaactgatacagaaacaaatggtttctttcttggcaaggttatttgaaaagccagcatttttaaccagtctccagcatgcgaaggaacaaagagatttagggtgtcctaaagttagaaggagatttatcaagcagcaccaaggccaaacagaaatatcagattttttaaatgaagggcagattgtaagataccaacctgattggagaaatgtaaccacctcttctgaaatacaagaaatgtatccagtttcacttgaagagtctccaaattacctttctcaggctttggcaaaagaatttagtgaaggcacagagaatctgatatcagatgaagtcatgtcaattgctgacaccatggggtttaagtcatcaagctttggacttgatggtaaccttttcaaagggaaaaatgtcatgagctcaaacgaaggtcttcttgcagaggagtttgtgtctttcccagaggatttgaccaaggagacaggatttccagagttttcacctcttggaactgaaggcatcatcaagcgagaagataaacggaacaccaactttgatgttagtggtgctgattcaagctctgggaatgaacagtggggaaatcctatcaattatgaagtgccagaatttgtagtcacaagtggtatgacagacatgtgggatattaactatttaactcacagcaagtga

SEQ ID NO: 24483 - protein, 423 aa, Glycine max
MNSSPSSSQLPSSSADFDKFNSLPRFRPLECLQGNPVPAFLSKTFELVDDPSLDPIISWGSTGVSFVVWDPTLFARHVLPRNFKHNNFSSFVRQLNTYGFRKIDTEKWEFFNEAFQRGKRHLLKNIRRRGPPQSHQVGGNIVPYSDADKAGLEFELESLRKERSVLMQEVVELQQQQRTTLQRARQVNQRLQSAELIQKQMVSFLARLFEKPAFLTSLQHAKEQRDLGCPKVRRRFIKQHQGQTEISDFLNEGQIVRYQPDWRNVTTSSEIQEMYPVSLEESPNYLSQALAKEFSEGTENLISDEVMSIADTMGFKSSSFGLDGNLFKGKNVMSSNEGLLAEEFVSFPEDLTKETGFPEFSPLGTEGIIKREDKRNTNFDVSGADSSSGNEQWGNPINYEVPEFVVTSGMTDMWDINYLTHSK

SEQ ID NO: 24484 - DNA, 1254 bp, Zea mays
  CDS (1)..(1254)
atgggcttcacgaagcggtcgccccagcatcccgcctccccagccggcggcgaggtcggcgcccagacggcagggaaggtcacaccagtgccggcggcgccggagtcggcgcccgtggcggtggtgccgaggcctccagacgtggcgcccttcctgaccaaggtctacgacatggtctccgacccggccaccgacgcggtcatctcctggagcgccgccggcggcagtttcgtgatctgggactcgcacgctttcgagcgcgacctgctgccgcggcacttcaagcacaatcacttcaccagcttcatacgccagctcaacacctacggatttcataaagttgatccagatagatgggaatgggccaatgaaggctttgttaagggccaaaaacatcttttgaagaccatcaagagaaagaagaaatcctctcaggatgtacctagtgatctgcagtcggtgcctgtcaaaactgcacctggcactgagaatatcgagataggaaaatatggaggccttgaaaaggaggttgagacacttaagagggacaaggcccttctaatgcagcagcttgtagatctacggcagtaccagcaatcatctagcgctgaagtgcagaatttaattcaacgcctccgtgtgatggagcagaaccagcagcagatgatggcacttttggcaattgttgtccagaatccagacttcctgaaccagctcgtgcagcagcagcgcaggagtaactggtggaatgatgatggtaacaggaaaagaaggttccaagctctggaacatggtcctgtagatgaccaagagacttctggtggaggcgcacaaattattcaatatcgtcctcctgttcctgaaacttccaatcagccaataccagcaaatgaagctttctattcaacccctgcacaaccagcttcaagccctgcacttgagatgcccatggatgtagagatgacttcaaacaatgttaatacctttgattcaactggcaatgattttactgacacctctgctctatgtgaatgggatgacatggatatatttggtgatgaacttgagcacattcttcaacagccagagcaggactttcaagtggaccctcctttaacagttgaggattatggttatgatcatccacggttagagcaggactgtcagatggaagcacaacagaattgcaaaaatcctcaatatgttgcctgtgtcttgaagcaaagggaaagccatgcatctgatgtccattag

SEQ ID NO: 24485 - protein, 417 aa, Zea mays
MGFTKRSPQHPASPAGGEVGAQTAGKVTPVPAAPESAPVAVVPRPPDVAPFLTKVYDMVSDPATDAVISWSAAGGSFVIWDSHAFERDLLPRHFKHNHFTSFIRQLNTYGFHKVDPDRWEWANEGFVKGQKHLLKTIKRKKKSSQDVPSDLQSVPVKTAPGTENIEIGKYGGLEKEVETLKRDKALLMQQLVDLRQYQQSSSAEVQNLIQRLRVMEQNQQQMMALLAIVVQNPDFLNQLVQQQRRSNWWNDDGNRKRRFQALEHGPVDDQETSGGGAQIIQYRPPVPETSNQPIPANEAFYSTPAQPASSPALEMPMDVEMTSNNVNTFDSTGNDFTDTSALCEWDDMDIFGDELEHILQQPEQDFQVDPPLTVEDYGYDHPRLEQDCQMEAQQNCKNPQYVACVLKQRESHASDVH

SEQ ID NO: 24486 - DNA, 20 bp, Artificial sequence
  primer
atgagcccaaaaaaagatgc

SEQ ID NO: 24487 - DNA, 27 bp, Artificial sequence
  primer
ctaaggatcattcattggcgtattatc

SEQ ID NO: 24488 - protein, 587 aa, Artificial sequence
  consensus sequence
  Variant (2)..(8): Xaa in position 2 to 8 is any amino acid
  Variant (9)..(56): Xaa in position 9 to 56 is any or no amino acid
  Variant (61)..(61): Xaa in position 61 is any amino acid
  Variant (66)..(66): Xaa in position 66 is any amino acid
  Variant (68)..(68): Xaa in position 68 is any amino acid
  Variant (71)..(72): Xaa in position 71 to 72 is any amino acid
  Variant (74)..(76): Xaa in position 74 to 76 is any amino acid
  Variant (79)..(83): Xaa in position 79 to 83 is any amino acid
  Variant (86)..(86): Xaa in position 86 is any amino acid
  Variant (90)..(92): Xaa in position 90 to 92 is any amino acid
  Variant (94)..(97): Xaa in position 94 to 97 is any amino acid
  Variant (100)..(101): Xaa in position 100 to 101 is any amino acid
  Variant (105)..(105): Xaa in position 105 is any amino acid
  Variant (111)..(111): Xaa in position 111 is any amino acid
  Variant (122)..(122): Xaa in position 122 is any amino acid
  Variant (124)..(124): Xaa in position 124 is any amino acid
  Variant (133)..(133): Xaa in position 133 is any amino acid
  Variant (136)..(136): Xaa in position 136 is any amino acid
  Variant (138)..(138): Xaa in position 138 is any amino acid
  Variant (140)..(140): Xaa in position 140 is any amino acid
  Variant (144)..(144): Xaa in position 144 is any amino acid
  Variant (146)..(146): Xaa in position 146 is any amino acid
  Variant (149)..(169): Xaa in position 149 to 169 is any amino acid
  Variant (170)..(191): Xaa in position 170 to 191 is any or no amino acid
  Variant (193)..(193): Xaa in position 193 is any amino acid
  Variant (195)..(195): Xaa in position 195 is any amino acid
  Variant (197)..(197): Xaa in position 197 is any amino acid
  Variant (199)..(202): Xaa in position 199 to 202 is any amino acid
  Variant (204)..(205): Xaa in position 204 to 205 is any amino acid
  Variant (207)..(207): Xaa in position 207 is any amino acid
  Variant (209)..(209): Xaa in position 209 is any amino acid
  Variant (211)..(211): Xaa in position 211 is any amino acid
  Variant (213)..(213): Xaa in position 213 is any amino acid
  Variant (215)..(225): Xaa in position 215 to 225 is any amino acid
  Variant (227)..(227): Xaa in position 227 is any amino acid
  Variant (229)..(231): Xaa in position 229 to 231 is any amino acid
  Variant (233)..(233): Xaa in position 233 is any amino acid
  Variant (236)..(236): Xaa in position 236 is any amino acid
  Variant (239)..(240): Xaa in position 239 to 240 is any amino acid
  Variant (245)..(248): Xaa in position 245 to 248 is any amino acid
  Variant (250)..(250): Xaa in position 250 is any amino acid
  Variant (252)..(253): Xaa in position 252 to 253 is any amino acid
  Variant (255)..(368): Xaa in position 255 to 368 is any amino acid
  Variant (369)..(586): Xaa in position 369 to 586 is any or no amino acid
PXXXXXXXXXXXXXXXXXXXXXXXXXXXXXXXXXXXXXXXXXXXXXXXXXXXXXXXPPFLXKTYDXVXDPXXDXXXSWXXXXXSFXVWDXXXFXXXXLPXXFKHXNFSSFXRQLNTYGFRKXDXDRWEFANEXFLXGXKXLLKXIXRRXXXXXXXXXXXXXXXXXXXXXXXXXXXXXXXXXXXXXXXXXXXEXEXLXRXXXXLXXEXVXLXQXQXXXXXXXXXXXQXLXXXEXRQXQMXXFLAKXXXXPXFXXQXXXXXXXXXXXXXXXXXXXXXXXXXXXXXXXXXXXXXXXXXXXXXXXXXXXXXXXXXXXXXXXXXXXXXXXXXXXXXXXXXXXXXXXXXXXXXXXXXXXXXXXXXXXXXXXXXXXXXXXXXXXXXXXXXXXXXXXXXXXXXXXXXXXXXXXXXXXXXXXXXXXXXXXXXXXXXXXXXXXXXXXXXXXXXXXXXXXXXXXXXXXXXXXXXXXXXXXXXXXXXXXXXXXXXXXXXXXXXXXXXXXXXXXXXXXXXXXXXXXXXXXXXXXXXXXXXXXXXXXXXXXXXXXXXXXXXXXXXXXXXXXXXXXXXXXXXXXXXXXXXXXXXXXXXXXXG

SEQ ID NO: 24489 - protein, 59 aa, Artificial sequence
  protein pattern
  Variant (2)..(2): Xaa in position 2 is any or no amino acid
  Variant (4)..(4): Xaa in position 4 is any or no amino acid
  Variant (6)..(6): Xaa in position 6 is any amino acid
  Variant (7)..(7): Xaa in position 7 is Pro or Ser
  Variant (8)..(9): Xaa in position 8 to 9 is any amino acid
  Variant (11)..(11): Xaa in position 11 is Ala, Gly or Ser
  Variant (12)..(13): Xaa in position 12 to 13 is any amino acid
  Variant (14)..(14): Xaa in position 14 is Ile, Leu or Val
  Variant (17)..(17): Xaa in position 17 is Lys or Arg
  Variant (18)..(18): Xaa in position 18 is any amino acid
  Variant (22)..(22): Xaa in position 22 is Asn or Ser
  Variant (28)..(28): Xaa in position 28 is Ile or Val
  Variant (39)..(39): Xaa in position 39 is Ile or Val
  Variant (41)..(41): Xaa in position 41 is Ala, Pro or Thr
  Variant (43)..(43): Xaa in position 43 is Lys or Arg
  Variant (47)..(47): Xaa in position 47 is any amino acid
  Variant (50)..(50): Xaa in position 50 is Ala or Gly
  Variant (52)..(53): Xaa in position 52 to 53 is any amino acid
  Variant (55)..(55): Xaa in position 55 is any amino acid
  Variant (56)..(56): Xaa in position 56 is Lys or Arg
  Variant (57)..(57): Xaa in position 57 is any amino acid
FXVXWXXXXFXXXXLPXXFKHXNFSSFXRQLNTYGFRKXDXDXWEFXNEXFXXGXXXLL

SEQ ID NO: 24490 - protein, 58 aa, Artificial sequence
  protein pattern
  Variant (2)..(2): Xaa in position 2 is any or no amino acid
  Variant (4)..(7): Xaa in position 4 to 7 is any amino acid
  Variant (8)..(8): Xaa in position 8 is any or no amino acid
  Variant (10)..(10): Xaa in position 10 is Met or Val
  Variant (11)..(11): Xaa in position 11 is any amino acid
  Variant (12)..(12): Xaa in position 12 is Glu or Gln
  Variant (13)..(13): Xaa in position 13 is any amino acid
  Variant (15)..(15): Xaa in position 15 is any amino acid
  Variant (16)..(16): Xaa in position 16 is any or no amino acid
  Variant (18)..(18): Xaa in position 18 is Gln or Arg
  Variant (20)..(20): Xaa in position 20 is any amino acid
  Variant (21)..(21): Xaa in position 21 is Gln or Ser
  Variant (22)..(23): Xaa in position 22 to 23 is any amino acid
  Variant (24)..(24): Xaa in position 24 is Ser or Thr
  Variant (25)..(30): Xaa in position 25 to 30 is any amino acid
  Variant (31)..(31): Xaa in position 31 is Leu, Met or Val
  Variant (32)..(34): Xaa in position 32 to 34 is any amino acid
  Variant (35)..(35): Xaa in position 35 is Ile or Leu
  Variant (36)..(36): Xaa in position 36 is any amino acid
  Variant (37)..(37): Xaa in position 37 is Ala, Gly, Thr or Val
  Variant (38)..(38): Xaa in position 38 is any amino acid
  Variant (40)..(41): Xaa in position 40 to 41 is any amino acid
  Variant (43)..(44): Xaa in position 43 to 44 is any amino acid
  Variant (45)..(45): Xaa in position 45 is Ile, Leu or Met
  Variant (46)..(46): Xaa in position 46 is Leu, Met or Val
  Variant (47)..(47): Xaa in position 47 is Ala, Ser or Thr
  Variant (48)..(48): Xaa in position 48 is Phe or Leu
  Variant (50)..(50): Xaa in position 50 is Ala or Ser
  Variant (51)..(51): Xaa in position 51 is any amino acid
  Variant (52)..(52): Xaa in position 52 is Ala, Ile, Leu or Val
  Variant (53)..(53): Xaa in position 53 is Phe, Leu, Met or Val
  Variant (54)..(54): Xaa in position 54 is any amino acid
  Variant (55)..(55): Xaa in position 55 is Asn, Arg or Ser
  Variant (56)..(57): Xaa in position 56 to 57 is any amino acid
KXRXXXXXLXXXXVXXLXQXXXXXXXXXXXXXXXXXXXEXXQXXXXXXLXXXXXXXXF

SEQ ID NO: 24491 - protein, 30 aa, Artificial sequence
  protein pattern
  Variant (2)..(2): Xaa in position 2 is any amino acid
  Variant (3)..(3): Xaa in position 3 is any or no amino acid
  Variant (5)..(5): Xaa in position 5 is any or no amino acid
  Variant (8)..(8): Xaa in position 8 is Ser, Thr or Val
  Variant (11)..(11): Xaa in position 11 is Phe or Tyr
  Variant (12)..(12): Xaa in position 12 is Asp or Glu
  Variant (13)..(13): Xaa in position 13 is Leu or Met
  Variant (15)..(15): Xaa in position 15 is any or no amino acid
  Variant (17)..(17): Xaa in position 17 is Asp, Pro or Ser
  Variant (18)..(18): Xaa in position 18 is any amino acid
  Variant (19)..(19): Xaa in position 19 is Asn, Ser or Thr
  Variant (20)..(20): Xaa in position 20 is any amino acid
  Variant (21)..(21): Xaa in position 21 is Ala, Asp, Gln, Ser or Thr
  Variant (22)..(22): Xaa in position 22 is any amino acid
  Variant (23)..(23): Xaa in position 23 is Ile or Val
  Variant (24)..(26): Xaa in position 24 to 26 is any amino acid
  Variant (27)..(27): Xaa in position 27 is Ala, Gly, Asn, Pro, Ser or Thr
  Variant (28)..(29): Xaa in position 28 to 29 is any amino acid
  Variant (30)..(30): Xaa in position 30 is Gly or Asn
PXXPXFLXKTXXXVXDXXXXXXXXXXXXXX

SEQ ID NO: 24492 - DNA, 1143 bp, Arabidopsis thaliana
  CDS (1)..(1143)
atggcaacggaatgcattgcaacggtccctcaaatattcagtgaaaacaaaaccaaagaggattcttcgatcttcgatgcaaagctccttaatcagcactcgcaccacatacctcaacagttcgtatggcccgaccacgagaaaccttctacggatgttcaacctctccaagtcccactcatagacctagccggtttcctctccggcgactcgtgcttggcatcggaggctactagactcgtctcaaaggctgcaacgaaacatggcttcttcctaatcactaaccatggtgtcgatgagagcctcttgtctcgtgcctatctgcatatggactctttctttaaggccccggcttgtgagaagcagaaggctcagaggaagtggggtgagagctccggttacgctagtagtttcgtcgggagattctcctcaaagctcccgtggaaggagactctgtcgtttaagttctctcccgaggagaagatccattcccaaaccgttaaagactttgtttctaagaaaatgggcgatggatacgaagatttcgggaaggtttatcaagaatacgcggaggccatgaacactctctcactaaagatcatggagcttcttggaatgagtcttggggtcgagaggagatattttaaagagtttttcgaagacagcgattcaatattccggttgaattactacccgcagtgcaagcaaccggagcttgcactagggacaggaccccactgcgacccaacatctctaaccatacttcatcaagaccaagttggcggtctgcaagttttcgtggacaacaaatggcaatccattcctcctaaccctcacgctttcgtggtgaacataggcgacaccttcatggctctaacgaatggaagatacaagagttgtttgcatcgggcggtggtgaacagcgagagagaaaggaagacgtttgcattcttcctatgtccgaaaggggaaaaagtggtgaagccaccagaagaactagtaaacggagtgaagtctggtgaaagaaagtatcctgattttacgtggtctatgtttcttgagttcacacagaagcattatagggcagacatgaacactcttgacgagttctcaatttggcttaagaacagaagaagtttctaa

SEQ ID NO: 24493 - protein, 380 aa, Arabidopsis thaliana
MATECIATVPQIFSENKTKEDSSIFDAKLLNQHSHHIPQQFVWPDHEKPSTDVQPLQVPLIDLAGFLSGDSCLASEATRLVSKAATKHGFFLITNHGVDESLLSRAYLHMDSFFKAPACEKQKAQRKWGESSGYASSFVGRFSSKLPWKETLSFKFSPEEKIHSQTVKDFVSKKMGDGYEDFGKVYQEYAEAMNTLSLKIMELLGMSLGVERRYFKEFFEDSDSIFRLNYYPQCKQPELALGTGPHCDPTSLTILHQDQVGGLQVFVDNKWQSIPPNPHAFVVNIGDTFMALTNGRYKSCLHRAVVNSERERKTFAFFLCPKGEKVVKPPEELVNGVKSGERKYPDFTWSMFLEFTQKHYRADMNTLDEFSIWLKNRRSF

SEQ ID NO: 24494 - DNA, 1496 bp, Oryza sativa
  CDS (262)..(1380)
gatgccgtgatcgatcgatcgatctgttggcgcagcgtgtatataagggcgggaaggggagtgagagagagcagcagctagctagccgcggtcggtcgatccagctgctggggatgagtacttagttagctcggagctagctactaatggatgatatacttatgctagttagttaaatacagttattagttagttgtaggttgcatctatcatatctccatcggttaattaattgattgatagctagattatcaacaattaatgagcatggtggtgcagcaggagcaggaggtggtgttcgacgcggcggtgctgagcgggcagacggagttcccgtcgcagttcatatggccggcggaggagagccccgggtcggtggcggtggaggagctggaggtggcgctgatcgacgtgggggcgggggcggagaggtcgtcggtggtccggcaggtgggggaggcgtgcgagaggcacggcttcttcctggtggttaaccacggcatcgaggcggcgctgctggaggaggcgcaccggtgcatggacgccttcttcacgctgccgctgggggagaagcagcgggcgcagcggcgcgcgggggagagctgcggctacgccagcagcttcacggggcgcttcgcgtccaagctgccgtggaaggagacgctgtcgttccggtactcatcggctggagatgaagagggcgaggagggcgtgggtgagtacctggtgcggaagctcggggcggagcacgggcggcggctgggcgaggtgtactcgcgctactgccacgagatgagccgcctgtcgctggagctgatggaggtgctcggggagagcctgggcatcgtcggagaccggcgccactacttccggcgattcttccagcgcaacgactccatcatgcgcctcaactactacccggcgtgccagaggccactcgacacgctgggcaccggtccgcactgcgaccccacctcgctcaccatcctccaccaggaccacgtcggcggcctggaggtgtgggcggaggggcggtggcgcgccatccgccctcgccccggggcgctcgtcgtcaacgtcggcgacaccttcatggcgctctccaacgccaggtaccgcagctgcctgcaccgggcggtcgtcaacagcacggcgcctcgccgctcgctggccttcttcctctgcccggagatggacacggtggtgcgcccgccggaggagctggtcgacgaccaccacccgagggtgtacccggacttcacgtggcgggcgctgctggacttcacgcagcgccactacagggccgacatgcgcacgcttcaggccttctccgactggcttaatcatcatcgtcacctgcaaccaacaatatactcctagctcctagtcctagctatatactcctattatccatccatccatccatcttacactactataccattagcatcgatcgatcatccattaattaattaattaattactagttccggctt

SEQ ID NO: 24495 - protein, 372 aa, Oryza sativa
MSMVVQQEQEVVFDAAVLSGQTEFPSQFIWPAEESPGSVAVEELEVALIDVGAGAERSSVVRQVGEACERHGFFLVVNHGIEAALLEEAHRCMDAFFTLPLGEKQRAQRRAGESCGYASSFTGRFASKLPWKETLSFRYSSAGDEEGEEGVGEYLVRKLGAEHGRRLGEVYSRYCHEMSRLSLELMEVLGESLGIVGDRRHYFRRFFQRNDSIMRLNYYPACQRPLDTLGTGPHCDPTSLTILHQDHVGGLEVWAEGRWRAIRPRPGALVVNVGDTFMALSNARYRSCLHRAVVNSTAPRRSLAFFLCPEMDTVVRPPEELVDDHHPRVYPDFTWRALLDFTQRHYRADMRTLQAFSDWLNHHRHLQPTIYS

SEQ ID NO: 24496 - DNA, 1704 bp, Zea mays
  CDS (296)..(1411)
taccttgagaccggccgggagttttcatctaaagtttattcttcgtcacatgggatggccgtttgcttgtttgttgcttccgggaggcggtggtgaattgaagcagatcgacaagcatggctgcccactggtctcgatcgatcggcctgccatgccatgccactagagtccgtcctgactggccgcccgttcccccgtataaaaaggcaggcaggcaggcagagcggggacgagcaagcaagcagttgcagttgcagcggcctcctcctctgcttcctccctcctcctcctcaccatggtgctggctgcgcacgatccccctccccttgtgttcgacgctgcccgcctgagcggcctctccgacatcccgcagcagttcatctggccggcggacgagagccccaccccggactccgccgaggagctggccgtgccgctcatcgacctctccggggacgccgccgaggtggtccggcaggtccggcgcgcctgcgacctgcacggcttcttccaggtggtggggcacggcatcgacgcggcgctgacggcggaggcccaccgctgcatggacgccttcttcacgctgccgctcccggacaagcagcgcgcgcagcgccgccagggggacagctgcggctacgccagcagcttcacgggccggttcgcgtccaagctgccctggaaggagacgctgtcgttccgctacaccgacgacgacgacggcgacaagtccaaggacgtcgtggcgtcctacttcgtggacaagctgggcgaggggtaccggcaccacggggaggtgtacgggcgctactgctctgagatgagccgtctgtcgctggagctcatggaggtgctaggcgagagcctgggcgtgggccggcgccacttccggcgcttcttccaggggaacgactccatcatgcgcctcaactactacccgccgtgccagcggccctacgacacgctgggcacggggccgcattgcgaccccacgtcgctcaccatcctgcaccaggacgacgtgggcggactccaggtgttcgacgccgccacgctcgcgtggcgctccatcaggccccgcccgggcgccttcgtcgtcaacatcggcgacaccttcatggcgctctccaacgggcgctacaggagctgcctccaccgcgccgtcgtcaacagccgggtggcacgccgctcgctcgccttcttcctgtgcccggagatggacaaggtggtcaggccgcccaaggagctggtggacgacgccaacccgagggcgtacccggacttcacgtggaggacgctgctggacttcaccatgaggcactacaggtcggacatgaggacgctcgaggccttctccaactggctcagcaccagtagcaatggcggacagcacctgctggagaagaagtaggcatgctatttgggtatggaagatggtggatgtaagcaaacaaagccaaattaagcagagtaggttaattaaggttggctgatgatccatttagggaaggagctgatctccctgactccctcctccaattttctcaaccaaatttatatagtataataataataataaaatagcaagtaatagttgtatcgtattattattaattaatttattagctggtaggcaagtagtattaaaaaaaatttaaaaaaaaatgggcgtatttctattttggcgttttgctctgtgttaat

SEQ ID NO: 24497 - protein, 371 aa, Zea mays
MVLAAHDPPPLVFDAARLSGLSDIPQQFIWPADESPTPDSAEELAVPLIDLSGDAAEVVRQVRRACDLHGFFQVVGHGIDAALTAEAHRCMDAFFTLPLPDKQRAQRRQGDSCGYASSFTGRFASKLPWKETLSFRYTDDDDGDKSKDVVASYFVDKLGEGYRHHGEVYGRYCSEMSRLSLELMEVLGESLGVGRRHFRRFFQGNDSIMRLNYYPPCQRPYDTLGTGPHCDPTSLTILHQDDVGGLQVFDAATLAWRSIRPRPGAFVVNIGDTFMALSNGRYRSCLHRAVVNSRVARRSLAFFLCPEMDKVVRPPKELVDDANPRAYPDFTWRTLLDFTMRHYRSDMRTLEAFSNWLSTSSNGGQHLLEKK

SEQ ID NO: 24498 - DNA, 1431 bp, Zea mays
  CDS (57)..(1172)
  misc_feature (1309)..(1309): n is a, g, c or t
  misc_feature (1339)..(1339): n is a, g, c or t
  misc_feature (1351)..(1351): n is a, g, c or t
  misc_feature (1402)..(1402): n is a, g, c or t
  misc_feature (1429)..(1429): n is a, g, c or t
gagcagtttcagttgcagcggcctcctcctctgcttcctccctcctcctcctcaccatggtgctggctgcgcacgatccccctccccttgtgttcgacgctgcccgcctgagcggcctctccgacatcccgcagcagttcatctggccggcggacgagagccccaccccggactccgccgaggagctggccgtgccgctcatcgacctctccggggaagccgccgaggtggtccggcaggtccggcgcgcctgcgacctgcacggcttcttccaggtggtggggcacggcatcgacgcggcgctgacggcggaggcccaccgctgcatggacgccttcttcacgctgccgctcccggacaagcagcgcgcgcagcgccgtcagggggacagctgcggctacgccagcagcttcacgggccggttcgcgtccaagctgccctggaaggagacgctgtcgttccggtacaccgacgacgacgacggcgacaagtccaaggacgtcgtggcgtcctacttcgtggacaagctgggcgaggggtaccggcaccacggggaggtgtacgggcgctactgctctgagatgagccgtctgtcgctggagctcatggaggtgctaggcgagagcctgggcgtgggccggcgccacttccggcgcttcttccaggggaacgactccatcatgcgcctcaactactacccgccgtgccagcggccctacgacacgctgggcacggggccgcattgcgaccccacgtcgctcaccatcctgcaccaggacgacgtgggcggactccaggtgttcgacgccgccacgctcgcgtggcgctccatcaggccccgcccgggcgccttcgtcgtcaacatcggcgacaccttcatggcgctctccaacgggcgctacaggagctgcctccaccgcgccgtcgtcaacagccgggtggcacgccgctcgctcgccttcttcctgtgcccggagatggacaaggtggtcaggccgcccaaggagctggtggacgacgccaacccgagggcgtacccggacttcacgtggaggacgctgctggacttcaccatgaggcactacaggtcggacatgaggacgctcgaggccttctccaactggctcagcaccagtagcaatggcggacagcacctgctggagaagaagtaggatgctatttgggtatggaagatggtggatgtaagcaaacaaagccaaattaagcagagtaggttaattaagggttggctgatgatcaattaagggaaaggagctgatttccctgactccctcctccaaattttcancaaattaatatataatatatataaatacantaatagttgtanctattataataataatttactgagcagtatattaatacatttttacaaggntattcatttggttaaaaaaaaaaaaanca

SEQ ID NO: 24499 - protein, 371 aa, Zea mays
MVLAAHDPPPLVFDAARLSGLSDIPQQFIWPADESPTPDSAEELAVPLIDLSGEAAEVVRQVRRACDLHGFFQVVGHGIDAALTAEAHRCMDAFFTLPLPDKQRAQRRQGDSCGYASSFTGRFASKLPWKETLSFRYTDDDDGDKSKDVVASYFVDKLGEGYRHHGEVYGRYCSEMSRLSLELMEVLGESLGVGRRHFRRFFQGNDSIMRLNYYPPCQRPYDTLGTGPHCDPTSLTILHQDDVGGLQVFDAATLAWRSIRPRPGAFVVNIGDTFMALSNGRYRSCLHRAVVNSRVARRSLAFFLCPEMDKVVRPPKELVDDANPRAYPDFTWRTLLDFTMRHYRSDMRTLEAFSNWLSTSSNGGQHLLEKK

SEQ ID NO: 24500 - DNA, 1686 bp, Eucalyptus grandis
  CDS (105)..(1262)
gcttttcttttatcccaactctcaaatttattccccgcccactcctccctcatttcccctgcacaggaaaaaagtcggctcacatatatagcttcctgaatgcaatggcagttgattgcctcacaagtaaaacctcaccagccatgcctccgcagcacaaagatgaagccagagaggataaaaaacatctagtttttgacgcctcggtgatccggcaccaacccgacatcccgaaacagttcatttggcccgacgaggaaaagccgtgtgcgaacgccccggatctcgccgtcccgctcatcgacttggacgggttcctctccaaagacccgagtgcctccgaggaggcatcgaggctcgtgggggatgcgtgccagaagcacggcttcttccttgtcgtcaatcacggcgtggatgctggcctcatatcggacgctcacaagtacatggacaaattcttcgggttaccgctcagcgagaagcagagggctcagaggaagctcggtgagcattgtggatatgccagcagtttcactggcaggttctcttccaagctcccatggaaagaaacgctttccttcggctactccgccgagaaaagctcggccaatgtcgtggaagactacttcaagaacaccatgggcgaagagtttgagcaatccgggagggtgtaccaggactattgtgaggccatgagcagactgtctctaggaataatggagctgctaggaatgagcctaggaatcggcagagaccatttcagggagttcttcgaaagcaacgattcgatcatgaggctcaactactaccctccgtgccagaagccggacctcaccctaggaaccggtccccactgcgacccgacatccttaaccatcctacaccaggaccaagttggcgggctccaagtgttcgtcgacaacgagtggcgttccatcagcccgaacttcaacgcgttcgtcgtcaacatcggcgacactttcatggctctatcaaacgggctatacaagagctgtttgcacagagcagtggtgaacagccgaactccgaggaagtccctcgccttcttcttgtgcccgaggagcgacaaagtggtgagaccaccgagtgagctagtcgcaatgtcctgtccgagagcgtacccggacttcacatggccggtgctcctcgagttcactcagaagcattacagggccgacatgaacacgctccgagcattcaccaactggcttcaacagagaacatctgaaccagttcggtgatgaagatttgtcacaagtagagagatctatttggaggtccgaaaagttgcggctaacaaaggggtgaaagagcctctctgccaaagcaaagaagatgacattgacgacgacaaagaagagagatcaaaagggaagtggtgggttttttttaaaggacgttggagagggacaaacagagagttagaggaaaagccaaaatatcttttaccttcaagggtacgtcttctgtagccagatagtactggcacccatgatggtcacgatgatcaaagggcaagagatcaagaaacatgagaaccaataaagagctgtaatacatcagctaatttttgttttgtttttttccttctccttttgtccttggttaaggtagaaaagtttaccccacagtaacccctgccttgatgtaaattttgcattttgg

SEQ ID NO: 24501 - protein, 385 aa, Eucalyptus grandis
MAVDCLTSKTSPAMPPQHKDEAREDKKHLVFDASVIRHQPDIPKQFIWPDEEKPCANAPDLAVPLIDLDGFLSKDPSASEEASRLVGDACQKHGFFLVVNHGVDAGLISDAHKYMDKFFGLPLSEKQRAQRKLGEHCGYASSFTGRFSSKLPWKETLSFGYSAEKSSANVVEDYFKNTMGEEFEQSGRVYQDYCEAMSRLSLGIMELLGMSLGIGRDHFREFFESNDSIMRLNYYPPCQKPDLTLGTGPHCDPTSLTILHQDQVGGLQVFVDNEWRSISPNFNAFVVNIGDTFMALSNGLYKSCLHRAVVNSRTPRKSLAFFLCPRSDKVVRPPSELVAMSCPRAYPDFTWPVLLEFTQKHYRADMNTLRAFTNWLQQRTSEPVR

SEQ ID NO: 24502 - DNA, 1113 bp, Oryza sativa (japonica cultivar-group)
  CDS (1)..(1113)
atgccgacgccgtcgcacttgaagaacccgctctgcttcgacttccgggcggcgaggcgggtgccggagacgcacgcgtggccggggctggacgaccacccggtggtggacggcggcggcggcggcggcgaggacgcggtgccggtggtggacgtcggggcgggcgacgcggcggcgcgggcggcggagcagtggggcgcgttccttctggtcgggcacggcgtgccggcggcgctgctgtcgcgcgtcgaggagcgcgtcgcccgcgtgttctccctgccggcgtcggagaagatgcgcgccgtccgcggccccggcgagccctgcggctacggctcgccgcccatctcctccttcttctccaagctcatgtggtccgagggctacaccttctccccttcctccctccgctccgagctccgccgcctctggcccaagtccggcgacgactacctcctcttctgtgacgtgatggaggagtttcacaaggagatgcggcggctagccgacgagttgctgaggttgttcttgagggcgctggggctcaccggcgaggaggtcgccggagtcgaggcggagaggaggatcggcgagaggatgacggcgacggtgcacctcaactggtacccgaggtgcccggagccgcggcgagcgctggggctcatcgcgcacacggactcgggcttcttcaccttcgtgctccagagcctcgtcccggggctgcagctgttccgtcgagggcccgaccggtgggtggcggtgccggcggtggcgggggccttcgtcgtcaacgtcggcgacctcttccacatcctcaccaacggccgcttccacagcgtctaccaccgcgccgtcgtgaaccgcgaccgcgaccgggtctcgctcggctacttcctcggcccgccgccggacgccgaggtggcgccgctgccggaggccgtgccggccggccggagccccgcctaccgcgctgtcacgtggccggagtacatggccgtccgcaagaaggccttcgccaccggcggctccgccctcaagatggtctccaccgacgccgccgccgccgccgacgaacacgacgacgtcgccgccgccgccgacgtccacgcataa

SEQ ID NO: 24503 - protein, 370 aa, Oryza sativa (japonica cultivar-group)
MPTPSHLKNPLCFDFRAARRVPETHAWPGLDDHPVVDGGGGGGEDAVPVVDVGAGDAAARAAEQWGAFLLVGHGVPAALLSRVEERVARVFSLPASEKMRAVRGPGEPCGYGSPPISSFFSKLMWSEGYTFSPSSLRSELRRLWPKSGDDYLLFCDVMEEFHKEMRRLADELLRLFLRALGLTGEEVAGVEAERRIGERMTATVHLNWYPRCPEPRRALGLIAHTDSGFFTFVLQSLVPGLQLFRRGPDRWVAVPAVAGAFVVNVGDLFHILTNGRFHSVYHRAVVNRDRDRVSLGYFLGPPPDAEVAPLPEAVPAGRSPAYRAVTWPEYMAVRKKAFATGGSALKMVSTDAAAAADEHDDVAAAADVHA

SEQ ID NO: 24504 - DNA, 1059 bp, Oryza sativa (japonica cultivar-group)
  CDS (1)..(1059)
atgggcggcctctccatggaccaggcgttcgtgcaggcccccgagcaccgccccaaggcgtccgtcgccgaggccgacggcatcccggtcatcgacctctcccctctcctcgccgccggcgatggcgacgccgacggggtggacgcgctcgcggcggaggtcgggagggcgagccgggactggggcttcttcgtggtggtgcgccacggtgtgcccgcggaggcggtggcgcgcgcggcggaggcgcagaggacgttcttcgcgctgccgccggagcggagggcggccgtggcgcggagcgaggcggcgccgatggggtactacgcgtccgagcacaccaagaacgtcagggactggaaggaggtgttcgacctcgtcccgcgccagacgccgccgccgccgacgaccgccgtggccgacggcgacctggtgttcgacaacaagtggcccgacgacctgccgggattcagggaggcaatggaggagtacggcgaagcggtggaggagctggcgttcaagctgctggagctgatcgccaggagcctcggcctgagacccgaccgcctccatggcttcttcaaggacgaccagaccaccttcatccggctcaaccactaccctccctgcccgagccccgacctcgccctcggcgtcggccgccacaaggacgccggcgcgctcaccgtgctctaccaggacgatgtcggcggcctcgacgtccgccgccgatccgacggcgagtgggtgcgcgtcaggcccgtccctcactccttcatcatcaacgtcggcgacatcatccaggtgtggagcaatgacaggtacgagagcgcggagcaccgggtggcggtgaacgtggagaaggagaggttctccatccctttcttcttcaacccggcgggccacaccatggtggagccactggaggaggtcgtgagcgacgagagcccggccaggtacaacccctacaactggggcgaattcttcagcaccaggaagaacagcaacttcaagaagctggacgtggagaacgtccagatcacgcatttcaggaagaattaa

SEQ ID NO: 24505 - protein, 352 aa, Oryza sativa (japonica cultivar-group)
MGGLSMDQAFVQAPEHRPKASVAEADGIPVIDLSPLLAAGDGDADGVDALAAEVGRASRDWGFFVVVRHGVPAEAVARAAEAQRTFFALPPERRAAVARSEAAPMGYYASEHTKNVRDWKEVFDLVPRQTPPPPTTAVADGDLVFDNKWPDDLPGFREAMEEYGEAVEELAFKLLELIARSLGLRPDRLHGFFKDDQTTFIRLNHYPPCPSPDLALGVGRHKDAGALTVLYQDDVGGLDVRRRSDGEWVRVRPVPHSFIINVGDIIQVWSNDRYESAEHRVAVNVEKERFSIPFFFNPAGHTMVEPLEEVVSDESPARYNPYNWGEFFSTRKNSNFKKLDVENVQITHFRKN

SEQ ID NO: 24506 - DNA, 1023 bp, Oryza sativa (japonica cultivar-group)
  CDS (1)..(1023)
atgtctctacaggtgccaaatgtgcaggaactcgcactgacttgcaaccgacctgaccagcagatacctgacaggtacatcaggccggaggctggcaccgaagaggtcatctgcggccaaggcatcaacacggcaatcccggtcatcgatctcgccaagctgctcaacccgcagtcatcccaagaggagtgtgccaagctgcgatctgcatgtcagcactggggtttcttccagctcgtcaaccatggggtgcctgacgatgtgatcagcgacgtgaggagagacttaactgagttcttcaagctaccacttgaagccaaggaggcgtacgctaaaccaccagacaagtacgaaggctatggccagcacttcgtcgtttcagagaagcagaagctggactggggagacctgctacacctccggcttcgcccaaccgagtccagggatttgaggaattccatggagaggtactccttggagacggcaaaagtagcacgctgcctgttggagttcttggccatggacatgggcgttgatccggagtctctcctggaggtattcagaggccagccccagaacatgagggtgaactactacccgccgtgcaggcaaaccggcaaggtgctcggcctgtcgccgcactgcgacgcgaccagcctgacgctgctgctccatgtgaacgacatgcagggcctccagatcaggaaggacggcaagtggctcaccatcgaagccctcgacggcgcgttcgtcgtcaacgtcggcgacatgcttgagattctgagcaatgggaggtacaggagcgttgagcacagggccgtggtgcacccggagaaggagcgcatctcggcggcggtgttccaccaggcgtgccgggacgcgacggtcgggcctctgccggagctcgtgacgaaggacggtggcaggccggtgtacaagtcgatggcctacgaggatttcatgaagcgcttcttctcggccaaacttgacggaagggctaacgtcgagggcatgaagatttag

SEQ ID NO: 24507 - protein, 340 aa, Oryza sativa (japonica cultivar-group)
MSLQVPNVQELALTCNRPDQQIPDRYIRPEAGTEEVICGQGINTAIPVIDLAKLLNPQSSQEECAKLRSACQHWGFFQLVNHGVPDDVISDVRRDLTEFFKLPLEAKEAYAKPPDKYEGYGQHFVVSEKQKLDWGDLLHLRLRPTESRDLRNSMERYSLETAKVARCLLEFLAMDMGVDPESLLEVFRGQPQNMRVNYYPPCRQTGKVLGLSPHCDATSLTLLLHVNDMQGLQIRKDGKWLTIEALDGAFVVNVGDMLEILSNGRYRSVEHRAVVHPEKERISAAVFHQACRDATVGPLPELVTKDGGRPVYKSMAYEDFMKRFFSAKLDGRANVEGMKI

SEQ ID NO: 24508 - DNA, 1215 bp, Oryza sativa (japonica cultivar-group)
  CDS (1)..(1215)
atgctcgagcacattgaagaactcgaggtcgacgatgaggactccaactacaacttctgctctgccgctgccgacgacaccgccaataccatcaaattgctaagtaagcgctacatcaatgccacgtcagatcaagaccaagtcaaaaatagccacgcactcgcagagacctgcaacgatccagatcagcagatacctgagaggtacatcagagcagacgccaacgccgacgaggtcatcagcggcgacgactgcacggccgcaattcctaccgtcgatctcagcaagttgctcgatccattgtcgtcagacgaggagactgaaaagctggggtctgcctgtcagcaatggggattctttcagctgatcaaccatggcgtgtcagaggatgtgatccgcgacgcgaggaaagacatagccgagttcttcaggctgccaatggagaccaagaaggcgtactcgcagctgcccagtggcatcgagggatatggccaggcgttcgtggtgtcgcacgagcagaagctggactgggctgacatgttctacctcgttctccgccccggcgagtccaggaacatggccctctggcctgctcatcctccatccttcaggaattcgatagatcggtactcgtcggagacggcgagggtggcgagatgcctgttggagttcatggcgaaggacatgggcgtgaggccggggtcgctgctggagaggttccaggaccagccgcagggcatcaggatgaacgactacccgccgtgccgggaggccggcaaggtggtcggcctgtcgccgcacaccgacgccgcctgcctgacgctgctcctgcaggtgaacgacgtgccgggcctgcagatcaggagccccggcggcaggtggctcgccgtcggcgcccctccggacgacggcgcgttcatcgtcaacgtcggcgacatactcgagatcatgagcaacggcaagtaccggagcgtggagcacagggcggtggtgcggccggacagggagcgcgtgtcggcggcggtgttccaccagccgtgccaggacgcggtggtcgggcctctgccggagctggtcggggaaggcggcggcgataacgcgcggtacacgtcgatgggctacctggatttcatgaagcgttactactcggcaaagctcgacggaaggaatcacctcgacggcttgaggattaaactgtcatcttcgaagggttag

SEQ ID NO: 24509 - protein, 404 aa, Oryza sativa (japonica cultivar-group)
MLEHIEELEVDDEDSNYNFCSAAADDTANTIKLLSKRYINATSDQDQVKNSHALAETCNDPDQQIPERYIRADANADEVISGDDCTAAIPTVDLSKLLDPLSSDEETEKLGSACQQWGFFQLINHGVSEDVIRDARKDIAEFFRLPMETKKAYSQLPSGIEGYGQAFVVSHEQKLDWADMFYLVLRPGESRNMALWPAHPPSFRNSIDRYSSETARVARCLLEFMAKDMGVRPGSLLERFQDQPQGIRMNDYPPCREAGKVVGLSPHTDAACLTLLLQVNDVPGLQIRSPGGRWLAVGAPPDDGAFIVNVGDILEIMSNGKYRSVEHRAVVRPDRERVSAAVFHQPCQDAVVGPLPELVGEGGGDNARYTSMGYLDFMKRYYSAKLDGRNHLDGLRIKLSSSKG

SEQ ID NO: 24510 - DNA, 1158 bp, Arabidopsis thaliana
  CDS (1)..(1158)
atgtgcatatatgcatctagacagactgtctgcccctatttaacccccttcaaagttaaaagacccaagtcaagagaaatgaattcctccgacgtcaacttctccctactccagagccaaccaaatgttccggctgaattcttctggccggagaaagacgttgccccttcagaaggcgacctcgatctcccaatcatcgacttgagtgggttcttgaatggcaatgaggccgagacgcaacttgcagctaaggcagtgaaaaaagcgtgcatggctcacggtacttttctagtggtcaatcatggcttcaagtcgggcttggctgaaaaggcgcttgagatatcgagtttgttctttgggctatccaaggatgagaagctaagggcttataggatcccggggaatatctctggctataccgcaggtcatagccaaagattttcctccaatcttccgtggaatgagactttgactttggccttcaaaaaggggccaccccatgttgttgaagactttctaacctcaaggctaggcaaccatcgtcaagagatcggtcaagtgtttcaagaattttgtgatgcaatgaatggactggttatggatttgatggagctattgggtataagtatgggtttaaaagacaggacatactaccggagattcttcgaagatggaagtggcatcttcagatgcaactattatccgccgtgcaagcagccagagaaagcccttggtgttggcccccataatgacccaacggctataaccgttttgcttcaagacgatgttgtgggcttagaggtctttgccgcaggtagttggcagaccgttcgccctcgtcctggtgctcttgtcgtcaacgttggagacaccttcatggcattgtcaaatggaaactacaggagttgttaccacagggcagtggtaaacaaggagaaagtgagaaggtcattagtattcttctcttgtcctagagaagataaaatcatcgtacctcctcctgaacttgtggaaggtgaagaagcttctagaaagtaccctgactttacttgggctcagcttcagaaatttacccagtccggctatcgagtcgataacaccactctccataacttctcttcgtggctcgtctctaactccgacaagaaatcaacttga

SEQ ID NO: 24511 - protein, 385 aa, Arabidopsis thaliana
MCIYASRQTVCPYLTPFKVKRPKSREMNSSDVNFSLLQSQPNVPAEFFWPEKDVAPSEGDLDLPIIDLSGFLNGNEAETQLAAKAVKKACMAHGTFLVVNHGFKSGLAEKALEISSLFFGLSKDEKLRAYRIPGNISGYTAGHSQRFSSNLPWNETLTLAFKKGPPHVVEDFLTSRLGNHRQEIGQVFQEFCDAMNGLVMDLMELLGISMGLKDRTYYRRFFEDGSGIFRCNYYPPCKQPEKALGVGPHNDPTAITVLLQDDVVGLEVFAAGSWQTVRPRPGALVVNVGDTFMALSNGNYRSCYHRAVVNKEKVRRSLVFFSCPREDKIIVPPPELVEGEEASRKYPDFTWAQLQKFTQSGYRVDNTTLHNFSSWLVSNSDKKST

SEQ ID NO: 24512 - DNA, 1086 bp, Arabidopsis thaliana
  CDS (1)..(1086)
atgaatcaaacactcgctgcccaattcttaacccgagaccaagtcaccaactttgttgtacacgaaggtaacggtgttaaaggcttgtctgagaccggaatcaaagttcttcctgaccaatacattcagccattcgaagagagactgatcaacttccacgtaaaagaggattcagacgaatccatacccgtgatcgacatatcaaatttagacgagaagagtgtctccaaggccgtatgtgatgctgcagaagaatggggtttctttcaggtgatcaaccatggcgtgtcaatggaagttcttgagaatatgaaaacagctactcacagattcttcggtttaccggtagaagagaaaagaaagttctcaagagagaagtctttgtcaacgaatgtgagattcgggacgagttttagtcctcatgctgagaaagctctcgagtggaaagattatctgagcctcttctttgtctctgaagctgaagcatcacaactctggcctgactcttgcaggagtgaaacgctagaatacatgaacgagacaaaacctctagtgaagaaactcttacggtttctaggcgagaatctgaacgtgaaagagctagacaagaccaaagagtcattcttcatgggttcaacacgtatcaacctcaactattaccctatttgtcccaatccagaactcacggttggagtcggacgtcactctgatgtttcctcactcacaatcctcttacaagacgagatcggtggtctccacgttcgttctctcaccacggggagatgggttcacgtgcctccaatctccggatctttagtcattaacattggagacgctatgcaaatcatgagtaatggtcgttacaagagtgttgagcatcgtgtcttagctaacggttcttataacagaatctctgttcctattttcgtgagcccgaaaccagagtctgtgatcggtcctcttcttgaagtgatcgaaaatggagagaaaccggtttataaagatattctttataccgattacgtgaaacatttcttcagaaaagctcatgatgggaagaaaaccatcgattttgccaacatttga

SEQ ID NO: 24513 - protein, 361 aa, Arabidopsis thaliana
MNQTLAAQFLTRDQVTNFVVHEGNGVKGLSETGIKVLPDQYIQPFEERLINFHVKEDSDESIPVIDISNLDEKSVSKAVCDAAEEWGFFQVINHGVSMEVLENMKTATHRFFGLPVEEKRKFSREKSLSTNVRFGTSFSPHAEKALEWKDYLSLFFVSEAEASQLWPDSCRSETLEYMNETKPLVKKLLRFLGENLNVKELDKTKESFFMGSTRINLNYYPICPNPELTVGVGRHSDVSSLTILLQDEIGGLHVRSLTTGRWVHVPPISGSLVINIGDAMQIMSNGRYKSVEHRVLANGSYNRISVPIFVSPKPESVIGPLLEVIENGEKPVYKDILYTDYVKHFFRKAHDGKKTIDFANI

SEQ ID NO: 24514 - DNA, 1131 bp, Arabidopsis thaliana
  CDS (1)..(1131)
atggaatgcatcataaagctccctcaaagattcaacaaaaacaaatccaaaaagaaccctttgaggatcttcgattcaacggttctaaatcatcaaccagaccatatacctcaagagtttgtatggcctgaccatgagaaaccttccaaaaatgttccaatcctccaagtccctgtcatcgacctcgcaggcttcctctccaacgacccattattggtctcggaggctgaaagactcgtctctgaagcagcaaagaaacatggtttcttcctagtcaccaaccacggagttgacgagaggcttttgtctactgcccataagcttatggacacattctttaagtcaccgaattatgagaaactaaaggctcagaggaaggtgggtgaaaccacaggctacgctagtagttttgtagggagattcaaggagaatcttccgtggaaggaaacgctatcgttttcgttttccccgacggagaagagcgaaaactactcccaaaccgttaaaaattacattagtaagacaatgggagacggatacaaagatttcgggagtgtttatcaagaatacgcggagaccatgagcaatctctctctaaagatcatggaacttcttggaatgagtcttggtatcaaaagggagcattttagagaattttttgaagacaatgaatcgatatttagattaaattactatccaaaatgcaagcaaccagatcttgtactaggtacggggcctcactgcgacccaacctctctaactatacttcaacaagatcaagtcagtggtcttcaagtttttgtggacaaccagtggcaatcaatccctcctatacctcaagcattggtggtgaacattggcgacactttaatggctctaacgaatggaatatacaagagttgcttgcatcgggcggtggtgaacggcgagacgacaaggaagacacttgcattcttcctatgtccgaaagtggacaaagtggtgaagccaccaagtgaattagaaggtgagagagcgtatcccgattttacatggtctatgtttcttgagttcacaatgaagcactatagagcagatatgaacactcttgaagagtttacaaattggctcaagaacaaaggaagtttctga

SEQ ID NO: 24515 - protein, 376 aa, Arabidopsis thaliana
MECIIKLPQRFNKNKSKKNPLRIFDSTVLNHQPDHIPQEFVWPDHEKPSKNVPILQVPVIDLAGFLSNDPLLVSEAERLVSEAAKKHGFFLVTNHGVDERLLSTAHKLMDTFFKSPNYEKLKAQRKVGETTGYASSFVGRFKENLPWKETLSFSFSPTEKSENYSQTVKNYISKTMGDGYKDFGSVYQEYAETMSNLSLKIMELLGMSLGIKREHFREFFEDNESIFRLNYYPKCKQPDLVLGTGPHCDPTSLTILQQDQVSGLQVFVDNQWQSIPPIPQALVVNIGDTLMALTNGIYKSCLHRAVVNGETTRKTLAFFLCPKVDKVVKPPSELEGERAYPDFTWSMFLEFTMKHYRADMNTLEEFTNWLKNKGSF

SEQ ID NO: 24516 - DNA, 1074 bp, Arabidopsis thaliana
  CDS (1)..(1074)
atggaggaaacaaaaatgagtttgcttgatgattcttttacaagtgcaatgacacttaccaattcaggtgtgcctcaagtccctgatcgctacgttcttcctccttcgcaaaggccagctcttggttcaagcttaggcaccagcgagactacacttcctgtcattgatctctctcttttgcaccaacctttccttcgatccctcgcaatccacgagattagcatggcctgcaaggagtttggtttctttcaggttataaaccatggaataccatcatcagtggttaacgatgccttagatgcagcaacacagttcttcgacttacctgtggaagagaagatgcttctggtgtctgcaaacgttcatgagccagtcaggtatggcacaagccttaaccattcaacagacagagttcactactggagagatttcatcaagcattactctcatccactctcaaagtggatcgatatgtggccatcaaatcctccatgctacaaggataaagtgggcaagtatgcagaggcaacacatttgctacacaagcagttaatagaagctatctcagaaagcctgggactggagaaaaattacttacaagaagagatagaagaaggctcacaagtcatggcagtgaattgttatccagcatgcccggaacctgaaatggccttgggaatgccaccacactcagacttcagctcactgaccatcttacttcagagtagcaagggactccagataatggactgcaacaaaaactgggtttgtgtgccgtatatagaaggagctttgatagttcagctgggagatcaggtagaggtgatgagcaacggcatatacaagagcgtcattcatcgtgtaacagtgaacaaagaagtcaaaaggctatcttttgcaagtcttcacagtctacctctgcacaagaaaataagtccagcaccaaaactcgtcaacccaaacaatgcaccagcctatggagagtttagtttcaacgattttctgaactacatctcaagcaacgattttatacaagaaagattcattgacacaataaagaaaagcagttcctaa

SEQ ID NO: 24517 - protein, 357 aa, Arabidopsis thaliana
MEETKMSLLDDSFTSAMTLTNSGVPQVPDRYVLPPSQRPALGSSLGTSETTLPVIDLSLLHQPFLRSLAIHEISMACKEFGFFQVINHGIPSSVVNDALDAATQFFDLPVEEKMLLVSANVHEPVRYGTSLNHSTDRVHYWRDFIKHYSHPLSKWIDMWPSNPPCYKDKVGKYAEATHLLHKQLIEAISESLGLEKNYLQEEIEEGSQVMAVNCYPACPEPEMALGMPPHSDFSSLTILLQSSKGLQIMDCNKNWVCVPYIEGALIVQLGDQVEVMSNGIYKSVIHRVTVNKEVKRLSFASLHSLPLHKKISPAPKLVNPNNAPAYGEFSFNDFLNYISSNDFIQERFIDTIKKSSS

SEQ ID NO: 24518 - DNA, 1203 bp, Arabidopsis thaliana
  CDS (1)..(1203)
atgaacaacctagacgagatcaagatcgagagcaagacctgcctcaacgatcaagaacaagaagtcaaaatagacaacatgcacatgagcgaccaagacaagaacaagatcgaaatcaagaacaagagtggcctcggcgaaaagtggccagaacccatcgtccgagtccaatctctagccgagagcaacctcactagtctccctgaccgttacatcaagccgccgtctcaacgccctcaaaccaccatcatcgaccaccaaccggaagtagctgacataaatataccgatcatagacctagacagtctattctctggcaatgaagacgacaagaagaggatatccgaggcatgccgtgaatggggattcttccaggtaatcaaccatggcgtgaagccggagctgatggacgcagctagagaaacttggaagagcttctttaatttgcctgttgaagccaaagaagtttactcaaactccccaagaacctatgaaggatatggaagcagattgggtgtggaaaaaggagccattcttgattggaatgattattactatctccattttcttcctcttgccttgaaggatttcaacaaatggccttctttaccttccaacattagagaaatgaatgatgagtacggtaaggaactagtgaagctaggtgggagactaatgacgatcttatcgtcaaatttggggctaagagcagaacaacttcaagaagcatttggtggagaagacgttggtgcatgtttgagggttaattattacccaaagtgccctcaaccggagcttgccctcggcctctcccctcattctgatcccggcggcatgaccatcctcttgccggacgatcaagtcgtcggccttcaggtccgtcacggtgacacgtggatcactgtcaatcctctccgccacgcttttatcgtcaatatcggcgatcaaattcagatactaagcaattcgaaatacaagagcgtggaacatcgagtgatagtgaattcggaaaaagaaagggtttcactagcattcttctataaccctaagagtgacattccgatccaaccaatgcaacaacttgtcacctctacgatgcctcccttgtatcctcccatgacctttgatcaatatagactcttcattagaacgcaaggtccacgtggaaaatcccacgttgagtctcatatatctcctcgttaa

SEQ ID NO: 24519 - protein, 400 aa, Arabidopsis thaliana
MNNLDEIKIESKTCLNDQEQEVKIDNMHMSDQDKNKIEIKNKSGLGEKWPEPIVRVQSLAESNLTSLPDRYIKPPSQRPQTTIIDHQPEVADINIPIIDLDSLFSGNEDDKKRISEACREWGFFQVINHGVKPELMDAARETWKSFFNLPVEAKEVYSNSPRTYEGYGSRLGVEKGAILDWNDYYYLHFLPLALKDFNKWPSLPSNIREMNDEYGKELVKLGGRLMTILSSNLGLRAEQLQEAFGGEDVGACLRVNYYPKCPQPELALGLSPHSDPGGMTILLPDDQVVGLQVRHGDTWITVNPLRHAFIVNIGDQIQILSNSKYKSVEHRVIVNSEKERVSLAFFYNPKSDIPIQPMQQLVTSTMPPLYPPMTFDQYRLFIRTQGPRGKSHVESHISPR

SEQ ID NO: 24520 - DNA, 1086 bp, Arabidopsis thaliana
  CDS (1)..(1086)
atggctccaacactcttgacaacccaattctcaaatccagctgaagtaaccgactttgtagtctacaaaggaaatggtgttaagggtttatcagaaacaggaatcaaagctcttccagaacaatacattcagccacttgaagaacgactcatcaacaaattcgtcaacgaaacagatgaagccattccagttatcgatatgtcgaaccctgatgaggacagagtcgctgaagctgtttgtgatgctgctgagaaatgggggttctttcaagtgatcaatcatggagttcctttggaagttcttgatgacgtcaaggctgcgactcacaagttcttcaatctccctgttgaagagaagcgcaagttcactaaagagaattcgctgtcgacgactgttaggtttgggacgagttttagtcctcttgcagagcaagcgcttgagtggaaagattatctcagcctcttctttgtctctgaagctgaagctgaacagttctggcctgatatctgcaggaatgaaacgttagagtacattaacaagtcaaagaagatggtgaggaggcttctagagtatttgggaaagaatctcaatgttaaagagcttgacgagacgaaagaatcactctttatgggctcgattcgagtcaaccttaactactaccccatctgccctaatccggacctaacagttggtgttggtcgccactcagacgtctcttctctcaccattctcttacaagaccagatcggtggtctacacgtgcgttctctggcttcagggaactgggttcacgtgcctccggttgctggatcttttgtgatcaacatcggagatgcgatgcagatcatgagcaatggtctgtacaagagcgtggagcatcgtgtcttagccaatggttacaataatagaatctctgttcctatctttgtgaacccaaaaccagagtcagttattggtcctctacctgaggtgattgcaaacggagaggaaccgatttacagagacgtcctgtactctgattacgtcaagtatttcttcaggaaggcacacgatggaaagaaaaccgtcgattacgccaagatctga

SEQ ID NO: 24521 - protein, 361 aa, Arabidopsis thaliana
MAPTLLTTQFSNPAEVTDFVVYKGNGVKGLSETGIKALPEQYIQPLEERLINKFVNETDEAIPVIDMSNPDEDRVAEAVCDAAEKWGFFQVINHGVPLEVLDDVKAATHKFFNLPVEEKRKFTKENSLSTTVRFGTSFSPLAEQALEWKDYLSLFFVSEAEAEQFWPDICRNETLEYINKSKKMVRRLLEYLGKNLNVKELDETKESLFMGSIRVNLNYYPICPNPDLTVGVGRHSDVSSLTILLQDQIGGLHVRSLASGNWVHVPPVAGSFVINIGDAMQIMSNGLYKSVEHRVLANGYNNRISVPIFVNPKPESVIGPLPEVIANGEEPIYRDVLYSDYVKYFFRKAHDGKKTVDYAKI

SEQ ID NO: 24522 - DNA, 1092 bp, Arabidopsis thaliana
  CDS (1)..(1092)
atgaatatcttccaagactggcctgagcctatagtccgtgtccaatccttatctgaaagcaacctcggagccataccaaatcgctacgtcaagcctctatctcagcgtccaaacataacccctcacaacaaacacaaccctcagaccaccaccatccccatcattgacttaggtcgcctatacacggacgacctaactctacaagccaaaacgcttgatgaaatctcaaaggcttgtagagaattgggatttttccaagtggtgaaccacgggatgagtcctcagctcatggaccaagctaaagcaacatggagagaattctttaatctccccatggaactcaaaaatatgcatgctaattcgccgaaaacttacgagggatatggaagccgactaggcgtagaaaagggtgctattcttgattggagcgactactattatctccattaccagccttcgtctttgaaggattacaccaagtggccttccttgcctcttcattgccgagaaatattggaggattattgcaaggaaatggtgaaactatgcgagaacttgatgaaaatcttatccaaaaacttgggattacaagaagacagacttcaaaatgcatttggtggtaaagaggaatcaggtggatgtttaagggttaattattacccaaaatgccctcaaccggagctgactctcggtatctctccgcactctgatcccggcggtttgaccattctcttgccggacgaacaagtcgccagtcttcaggtccgtggatccgacgacgcttggatcacagtcgaaccagctcctcatgctttcatcgttaacatgggtgaccaaattcagatgctgagcaattcaatatacaaaagcgtagaacacagagtgatcgtgaaccctgaaaatgagaggttgtcattggcatttttctacaacccaaagggcaatgttcctatcgagccattgaaggagctagtgaccgtagattcacctgctctctactcctccaccacatacgatcgttaccgtcaattcattcgtacgcaaggcccacgtagcaaatgtcatattgacgaacttaaatcccctcgatag

SEQ ID NO: 24523 - protein, 363 aa, Arabidopsis thaliana
MNIFQDWPEPIVRVQSLSESNLGAIPNRYVKPLSQRPNITPHNKHNPQTTTIPIIDLGRLYTDDLTLQAKTLDEISKACRELGFFQVVNHGMSPQLMDQAKATWREFFNLPMELKNMHANSPKTYEGYGSRLGVEKGAILDWSDYYYLHYQPSSLKDYTKWPSLPLHCREILEDYCKEMVKLCENLMKILSKNLGLQEDRLQNAFGGKEESGGCLRVNYYPKCPQPELTLGISPHSDPGGLTILLPDEQVASLQVRGSDDAWITVEPAPHAFIVNMGDQIQMLSNSIYKSVEHRVIVNPENERLSLAFFYNPKGNVPIEPLKELVTVDSPALYSSTTYDRYRQFIRTQGPRSKCHIDELKSPR

SEQ ID NO: 24524 - DNA, 1047 bp, Arabidopsis thaliana
  CDS (1)..(1047)
atggcagcatcaaaactcctcgtatccgacatcgcctctgtcgttgatcacgtcccttcaaactacgtcagaccagtctctgaccgtccaaaaatgtccgaggttcaaacttccggcgactctattcctctaatcgatctccacgacctccatggacctaatcgagctgacattatcaatcagtttgctcatgcatgctcttcttgtggcttcttccagatcaagaaccatggagtaccagaagaaacgatcaaaaaaatgatgaatgcggcaagagagtttttccggcaatcagagagcgaaagagtgaagcattactcagcagataccaaaaagacaacgagactctccacaagtttcaacgtttccaaagagaaagtctctaactggagagacttccttcgactccattgctaccctatcgaagatttcatcaatgaatggccctcaacaccgatctctttcagagaagtcacagccgaatacgctacaagcgttagagccttggttctgacacttcttgaggcaatctcagagagcttaggtcttgcgaaagaccgtgtaagcaatacaataggcaaacatggtcaacacatggctattaactactatccccggtgtcctcaaccagagctaacttacggacttccggggcataaagatgcaaacttgatcactgttcttcttcaagatgaagtctctggtttacaggtgtttaaagatggtaaatggatcgctgttaatcctgttcccaacactttcatagtcaaccttggtgaccaaatgcaggttataagcaatgaaaaatacaagagtgttcttcacagagcggttgtgaacagcgacatggagcggatatcgataccgacattctactgtccttctgaagatgctgtgattagtccagcacaagagctgatcaatgaggaagaagactctcctgctatttacagaaactttacatatgctgaatattttgaaaagttttgggacacagcatttgatactgagagctgtattgactcgttcaaagcatccaccgcctaa

SEQ ID NO: 24525 - protein, 348 aa, Arabidopsis thaliana
MAASKLLVSDIASVVDHVPSNYVRPVSDRPKMSEVQTSGDSIPLIDLHDLHGPNRADIINQFAHACSSCGFFQIKNHGVPEETIKKMMNAAREFFRQSESERVKHYSADTKKTTRLSTSFNVSKEKVSNWRDFLRLHCYPIEDFINEWPSTPISFREVTAEYATSVRALVLTLLEAISESLGLAKDRVSNTIGKHGQHMAINYYPRCPQPELTYGLPGHKDANLITVLLQDEVSGLQVFKDGKWIAVNPVPNTFIVNLGDQMQVISNEKYKSVLHRAVVNSDMERISIPTFYCPSEDAVISPAQELINEEEDSPAIYRNFTYAEYFEKFWDTAFDTESCIDSFKASTA

SEQ ID NO: 24526 - DNA, 1050 bp, Arabidopsis thaliana
  CDS (1)..(1050)
atggcaacttctgcaatatctaagctcttagtgtctgatttcgcctcctccgttcacatcccttcaaactatgtccgaccaatctccgaccgtccgaacttgtccgaggtcgagagttctggcgattccatccctctgatcgatctccgggacctccatggacctaatcgagccgtaattgtccaacaacttgctagtgcgtgttccacttatggtttctttcagatcaagaatcatggagtaccagatacaaccgtcaataaaatgcaaaccgttgcgagagagttcttccatcaacccgagagcgaaagagtcaaacactactccgcagatccaacaaagacaacgagactctccaccagtttcaacgtcggcgcagacaaagtcttgaactggagagacttccttagactccattgctttcccatagaagatttcatcgaagaatggccatctagtcccatctctttcagagaagtcacagctgaatatgccacgagcgtaagagctttggttttgagacttcttgaggccatctcagagagtttaggccttgaaagcgaccatataagcaatatattaggcaaacacgctcaacacatggcgtttaactactatccgccgtgtccagaacccgagctaacttacggacttcccggacataaagacccaaccgttatcactgtccttcttcaagaccaagtctctggtttgcaagtctttaaggatgataaatgggtcgctgttagtccaattcccaacactttcatcgtcaatatcggcgaccaaatgcaggtcataagcaatgataaatacaagagtgtgctccatagagccgtagtaaacaccgagaacgagcggttatcgattccgactttctatttcccttcaacagatgcagtgattggtccagcacacgagctggtcaatgaacaagactctcttgccatttacagaacctacccgtttgttgagtattgggacaagttttggaacagatcacttgctactgcgagctgtctagacgccttcaaagctccaacaacctaa

SEQ ID NO: 24527 - protein, 349 aa, Arabidopsis thaliana
MATSAISKLLVSDFASSVHIPSNYVRPISDRPNLSEVESSGDSIPLIDLRDLHGPNRAVIVQQLASACSTYGFFQIKNHGVPDTTVNKMQTVAREFFHQPESERVKHYSADPTKTTRLSTSFNVGADKVLNWRDFLRLHCFPIEDFIEEWPSSPISFREVTAEYATSVRALVLRLLEAISESLGLESDHISNILGKHAQHMAFNYYPPCPEPELTYGLPGHKDPTVITVLLQDQVSGLQVFKDDKWVAVSPIPNTFIVNIGDQMQVISNDKYKSVLHRAVVNTENERLSIPTFYFPSTDAVIGPAHELVNEQDSLAIYRTYPFVEYWDKFWNRSLATASCLDAFKAPTT

SEQ ID NO: 24528 - DNA, 1116 bp, Arabidopsis thaliana
  CDS (1)..(1116)
atgaacaagaacaagattgatgttaagatcgagacgaagaaaggatcgatggatgagtggcctgagccaatcgtccgagtccagtccttagccgagagcaacctctcctctctccccgaccgttacatcaaaccagcgtctctacgccccaccacgaccgaagacgctcctaccgcgaccaacatcccaatcatagaccttgaaggactcttctcggaagaagggttgtctgatgacgtcatcatggctcggatatcggaggcttgccgtgggtgggggttcttccaggtggtgaaccacggggtcaaaccggagctgatggacgcggctagggagaattggagagagtttttccatatgccggttaatgccaaagagacttactcaaactcaccaagaacctacgaaggctatggaagtagactaggtgttgagaaaggagcaagtcttgattggagtgattattactttctccatcttcttcctcatcatttgaaagacttcaacaagtggccttcttttcctcccaccataagagaagtgatcgatgaatacggcgaagagctagtgaagctaagtgggagaattatgagggtattatcgacaaacttgggactaaaagaggataagtttcaagaagcatttggaggtgaaaacattggggcgtgtttgagggttaattattacccaaaatgccctcgaccggagctggctcttggtctctctccacactccgatcctggcggtatgaccattctcttaccggacgatcaagtcttcggtctccaggttcgtaaagatgacacgtggatcaccgtcaagcctcatccccatgctttcatcgtcaatattggtgatcaaatacagatactaagcaactcaacatacaagagtgtggagcatagagtgatagtgaactcggacaaggagagagtttcacttgccttcttctacaatcctaaaagcgatattccgatccaaccattacaagaacttgtatcaactcataatcctcctttataccctcccatgacctttgatcagtatagactctttatcagaactcaaggtccacaaggcaaatcccatgttgaatctcatatttctcctcgttga

SEQ ID NO: 24529 - protein, 371 aa, Arabidopsis thaliana
MNKNKIDVKIETKKGSMDEWPEPIVRVQSLAESNLSSLPDRYIKPASLRPTTTEDAPTATNIPIIDLEGLFSEEGLSDDVIMARISEACRGWGFFQVVNHGVKPELMDAARENWREFFHMPVNAKETYSNSPRTYEGYGSRLGVEKGASLDWSDYYFLHLLPHHLKDFNKWPSFPPTIREVIDEYGEELVKLSGRIMRVLSTNLGLKEDKFQEAFGGENIGACLRVNYYPKCPRPELALGLSPHSDPGGMTILLPDDQVFGLQVRKDDTWITVKPHPHAFIVNIGDQIQILSNSTYKSVEHRVIVNSDKERVSLAFFYNPKSDIPIQPLQELVSTHNPPLYPPMTFDQYRLFIRTQGPQGKSHVESHISPR

SEQ ID NO: 24530 - DNA, 1026 bp, Arabidopsis thaliana
  CDS (1)..(1026)
atggcggcaaagctgatatccaccggtttccgtcatactactttgccggaaaactatgtccggccaatctccgaccgtccacgtctctctgaagtctctcaactcgaagatttccctctcatcgatctctcttccactgatcgatcttttctcatccaacaaatccaccaagcttgtgcccgattcggattttttcaggtcataaatcacggagttaacaaacaaataatagatgagatggtgagtgttgcgcgtgagttctttagcatgtctatggaagaaaaaatgaagctatattcagacgatccaacgaagacaacaagattatcgacgagcttcaatgtgaagaaagaagaagtcaacaattggagagactatctaagactccattgttatcctatccacaagtatgtcaatgagtggccgtcaaaccctccttctttcaaggaaatagtaagtaaatacagtagagaagtaagagaagtgggatttaaaatagaggaattaatatcagagagcttaggtttagaaaaagattacatgaagaaagtgcttggtgaacaaggtcaacacatggcagtcaactattatcctccatgtcctgaacctgagctcacttacggtttacctgctcataccgacccaaacgccctaaccattcttcttcaagacactactgtttgcggtctccagatcttgatcgacggtcagtggttcgccgttaatccacatcctgatgcttttgtcatcaacataggtgaccagttacaggcattaagtaatggagtatacaaaagtgtttggcatcgcgctgtaacaaacacagaaaatccgagactatcggtcgcatcgtttctgtgcccagctgactgtgctgtcatgagcccggccaagcccttgtgggaagctgaggacgatgaaacgaaaccagtctacaaagatttcacttatgcagagtattacaagaagttttggagtaggaatctggaccaagaacattgcctcgagaattttctaaacaactaa

SEQ ID NO: 24531 - protein, 341 aa, Arabidopsis thaliana
MAAKLISTGFRHTTLPENYVRPISDRPRLSEVSQLEDFPLIDLSSTDRSFLIQQIHQACARFGFFQVINHGVNKQIIDEMVSVAREFFSMSMEEKMKLYSDDPTKTTRLSTSFNVKKEEVNNWRDYLRLHCYPIHKYVNEWPSNPPSFKEIVSKYSREVREVGFKIEELISESLGLEKDYMKKVLGEQGQHMAVNYYPPCPEPELTYGLPAHTDPNALTILLQDTTVCGLQILIDGQWFAVNPHPDAFVINIGDQLQALSNGVYKSVWHRAVTNTENPRLSVASFLCPADCAVMSPAKPLWEAEDDETKPVYKDFTYAEYYKKFWSRNLDQEHCLENFLNN

SEQ ID NO: 24532 - DNA, 1050 bp, Arabidopsis thaliana
  CDS (1)..(1050)
atggaggatcttgatccaacctacatccaagcaccagagcatagatcagattcgaatttcatccctaaccaaccagaagaaatacccgtgattgatctctcgcgcctcgatgaccccgaagatgtccaaaacgttatctcagagatcggtgatgcttgtgaaaaatggggattttttcaggtgcttaatcatggtgtgccttctgacgcaaggcaacgtgtggagaagactgtgaagatgtttttcgatttgcctatggaagagaagataaaggtgaagagagacgatgtgaatcctgtagggtatcatgatggagaacacaccaagaacgttaaagattggaaagaagtgtttgatatttatttcaaagatccaatggtcattccttcaaccactgatcctgaagatgaaggcttaagacttgtttacaacaagtggcctcaatctccttctgatttcagggaagcatgtgaagtatatgcgagacacgctgaaaaattagcgttcaagctcttggaactgatttcgttaagcttaggcttgccaaaagagcgttttcatgactacttcaaagaacaaatgagttttttcaggataaatcgttatccaccatgtccaagacctgacctagctttaggtgttggtcaccacaaagatgccgacgttattagtctattggctcaagatgatgttggaggattacaagttagtcgtagatcggacggtgtttggtttccgattagacccgtccctaatgctcttgtcatcaatataggcaattgtatggagatatggacgaatgacaagtattggagtgctgaacatagagtggtggtgaacacaacaagagagagatactcgataccattcttcttgttgccttcacacgatgtggaagtgaagccattagaagaacttgtgagtcctgaaaaccctccaaaatacaaaggctataaatggggtaagttctacgtcagtaggaatagaagcgattttcgaaaactggaaatcgaaaacatccaaatcgatgacttcaaagttaaaacttaa

SEQ ID NO: 24533 - protein, 349 aa, Arabidopsis thaliana
MEDLDPTYIQAPEHRSDSNFIPNQPEEIPVIDLSRLDDPEDVQNVISEIGDACEKWGFFQVLNHGVPSDARQRVEKTVKMFFDLPMEEKIKVKRDDVNPVGYHDGEHTKNVKDWKEVFDIYFKDPMVIPSTTDPEDEGLRLVYNKWPQSPSDFREACEVYARHAEKLAFKLLELISLSLGLPKERFHDYFKEQMSFFRINRYPPCPRPDLALGVGHHKDADVISLLAQDDVGGLQVSRRSDGVWFPIRPVPNALVINIGNCMEIWTNDKYWSAEHRVVVNTTRERYSIPFFLLPSHDVEVKPLEELVSPENPPKYKGYKWGKFYVSRNRSDFRKLEIENIQIDDFKVKT

SEQ ID NO: 24534 - DNA, 906 bp, Nostoc punctiforme PCC 73102
  CDS (1)..(906): transl_table=11
atgaaaaacttgcaagttgtggagaaagagttttcatccctcccgattattgatattagcgccttagtttctggaaaaggaaatctctattccgccgcatctcagattcggcaagcgtgtcgagaatcgggatttttctatattatcggacatggtgtagacgaaaatttgcagcagaggctcgaagaactcagccgccagtttttcgcccaggatttggaaactaaacttaaaattcgtatggctttggcaggtattgcatggcgaggttattttcccgttggtggcgaactgacatccggtaaacctgacttgaaagaaggtatttactttggcactgaactcccagacgaacacccactagtgcaagctggtactcctatgcatggtgcaaacctcttccccgccaacatgccccaatttggcgaaacagtacttgaatatatagaggcgatgacaaagttgggacacactctcatgactggtatagccatgagtttgggattagaagaatcctactttgctgatcgttatacttcagatcctctagtgttgtttcgcatctttaactatcctcctaatttatcaccgtcagatggtaatccgatatggggtgttggcgaacatactgattatggggttttaactattctcaaacaggacgactcaggcggattacaagttaaatccaaatcaggttgggttgctgcgcctcctgttccaggttcctttgtctgtaacatcggcgatatgctagacaaaatgacgggaggtttctatcgttctacacctcatcgcgtacaaaaccagtcccaaaatcaccgcctttcattccccttctttttcgatcccaatttcgatgtagaagtgaagccgattgaattagataattatagtagcgaatga

SEQ ID NO: 24535 - protein, 301 aa, Nostoc punctiforme PCC 73102
MKNLQVVEKEFSSLPIIDISALVSGKGNLYSAASQIRQACRESGFFYIIGHGVDENLQQRLEELSRQFFAQDLETKLKIRMALAGIAWRGYFPVGGELTSGKPDLKEGIYFGTELPDEHPLVQAGTPMHGANLFPANMPQFGETVLEYIEAMTKLGHTLMTGIAMSLGLEESYFADRYTSDPLVLFRIFNYPPNLSPSDGNPIWGVGEHTDYGVLTILKQDDSGGLQVKSKSGWVAAPPVPGSFVCNIGDMLDKMTGGFYRSTPHRVQNQSQNHRLSFPFFFDPNFDVEVKPIELDNYSSE

SEQ ID NO: 24536 - DNA, 942 bp, marine gamma proteobacterium HTCC2143
  CDS (1)..(942): transl_table=11
atgacaaacgtgcccaccattgacctcaattgtattgataatgatgcactgcaagcactggatttagcttgtcgagatcacggcttcttttttctcaaaggacatggcttagacgccctagtcgaagcggtaaaaacccaggcagagtgtttttttgccttacctcgcgacgaaaagcaaaaagtggtacgcaaagaggataaccccatgggttattatgacagggagctcaccaaacaaaaacgtgatctcaaagaagtgtttgatttctatgctcgcagcaatggccaagaaaaccgcatgccttggccacaacaacccaccgaattcaaagaaacactgcgcgcgtatttccttgccaatgccgaactatctaaccgggtgatgcacatcttgtgtaacgcacttggagttgacgaaacatcatttgaccgctttttcatgcctcgccacacgagctctgcgcggctcaactattatcccagtgaagaccccctcgcagctgacgaccagcaatcagtcacgccactcggtgatatggcgttacatcatcataccgaccaaggcgcaataacattgttgttccaagacgatatcggtggattacaggcattctctaaagatgccggctggatcgatattccaccgatggaagatgcgcttgtcgttaatattggtgacattgcacaggtttggtcaaatggtgcctatcaagccgcgctgcatcgcgtgctgcccattgcagcaggaaaatcgcgctatagtttgccattcttttaccagcccagttttgataccgttgtagcacctcaccaagatttgggcgcaccgaattatcgatcatttaactgtggagactttatccagggccggatcgacgataattatgaagatttaggcgcagacgatattcaggttgagcgttttagaatcaacgcttga

SEQ ID NO: 24537 - protein, 313 aa, marine gamma proteobacterium HTCC2143
MTNVPTIDLNCIDNDALQALDLACRDHGFFFLKGHGLDALVEAVKTQAECFFALPRDEKQKVVRKEDNPMGYYDRELTKQKRDLKEVFDFYARSNGQENRMPWPQQPTEFKETLRAYFLANAELSNRVMHILCNALGVDETSFDRFFMPRHTSSARLNYYPSEDPLAADDQQSVTPLGDMALHHHTDQGAITLLFQDDIGGLQAFSKDAGWIDIPPMEDALVVNIGDIAQVWSNGAYQAALHRVLPIAAGKSRYSLPFFYQPSFDTVVAPHQDLGAPNYRSFNCGDFIQGRIDDNYEDLGADDIQVERFRINA

SEQ ID NO: 24538 - DNA, 1068 bp, Vitis vinifera
  CDS (1)..(1068)
atggtgacttcagtggctcctagagttgagagcttgtccagcagtgggatccagtcaatccccaaagagtacatccgcccccaagaagagctcaccagcattggcaatgtctttgaggaggagaagaaggatgaagggcctcaggttccaactattgacttgaaggatattgagtctgaggacgaggtggtccgggagagatgccgggaggagttgaagaaagctgccatggagtggggtgtgatgcaccttgttaaccatggcatctctgatgaccttatcaaccgtgttaaggttgctggagagacctttttcaatctccccatggaggaaaaggagaagtatgctaatgaccaggcctccggcaagatcgctggctatggcagcaagcttgccaacaatgctagtggacagcttgagtgggaggactacttcttccatctcatcttccctgaagacaagcgcgatatgaccatctggcctaagacaccaagcgactacgttccagcaacctgtgagtactcggtgaaacttaggagcctggcaaccaagatactatcggtgctatcgcttgggttgggattggaagaagggagactagaaaaggaagttggtgggatggaagagctactactccaaaagaagatcaactactaccccaagtgtccccagcctgaattggctctcggggtggaagctcacactgacgtgagcgctctcaccttcatcctccacaacatggtacccggcctgcaacttttctatgagggcaagtgggtgacagccaagtgtgtccccaactccatcatcatgcacattggagacaccatagagattctcagcaatggtaagtacaagagtattcttcacaggggactggtcaacaaggagaaggtgaggatttcatgggcagttttctgcgagccgcctaaggagaagatcatcctgaagccactgccagagacggtgtctgagactgagccaccactcttcccacctcgcaccttttcccaacatattcagcacaagctcttcaggaagacccaggaggctctactctccaaatga

SEQ ID NO: 24539 - protein, 355 aa, Vitis vinifera
MVTSVAPRVESLSSSGIQSIPKEYIRPQEELTSIGNVFEEEKKDEGPQVPTIDLKDIESEDEVVRERCREELKKAAMEWGVMHLVNHGISDDLINRVKVAGETFFNLPMEEKEKYANDQASGKIAGYGSKLANNASGQLEWEDYFFHLIFPEDKRDMTIWPKTPSDYVPATCEYSVKLRSLATKILSVLSLGLGLEEGRLEKEVGGMEELLLQKKINYYPKCPQPELALGVEAHTDVSALTFILHNMVPGLQLFYEGKWVTAKCVPNSIIMHIGDTIEILSNGKYKSILHRGLVNKEKVRISWAVFCEPPKEKIILKPLPETVSETEPPLFPPRTFSQHIQHKLFRKTQEALLSK

SEQ ID NO: 24540 - DNA, 996 bp, Camellia sinensis
  CDS (1)..(996)
atggaggtagagagagtgcaagccctgtcccatgtaactctccatgagctccctgcaaaatttatccgaccggtccacgagcaaccggagaacagcaaggctatcgaaggtgtcaccgtccccgtgatctccctctctcaaccacacgatgtggtggtcgatgcattatcaaaggcttgtagtgaatggggatttttcctcatcacggatcacggtgtcgagccctcgttgatcggacggctaaaagaggttggggaggagttctttaacctcccacagaaggagaaagagagctatgcaaatgatccttcaagtgggagttttgaagggtatggaacgaagatgactaaaaattttgatgagaaagttgagtggattgattattattttcacgtcatgcaccctcctaagaagctcaatcttgacatgtggcctaagaacccttcttcatacaggggagtgacagaggaatacaatgtggaaataatgagaacaaccaacaagttatttgaacttctctcagagggactaggtttggatgggaaggttttgagttcttctttgggtggtgatgaaattgaatttgaaatgaaaatcaacatgtacccaccatgcccacaacctcagctcgccctcggagttgaacctcacactgacatgtctgctctcactttacttgtccccaatgacgttcccggtcttcaagtttggaaagacggtaattgggtagctgtcaattacttgccaaatgcactcttcgtccatgttggtgatcaacttgaggtactaagcaatggtaagtacaagagtgttcttcacaggagtttggtgaacaaagaaaggacaagaatgtcttgggctgtgtttgtcgtgcctcctcatgaagcagtgattggacctcttccagagctcattgatgagaaaaacccagcaaaatattcaaccaaaacatatgctgagtaccgtcatcgcaaattcaataagattccacaataa

SEQ ID NO: 24541 - protein, 331 aa, Camellia sinensis
MEVERVQALSHVTLHELPAKFIRPVHEQPENSKAIEGVTVPVISLSQPHDVVVDALSKACSEWGFFLITDHGVEPSLIGRLKEVGEEFFNLPQKEKESYANDPSSGSFEGYGTKMTKNFDEKVEWIDYYFHVMHPPKKLNLDMWPKNPSSYRGVTEEYNVEIMRTTNKLFELLSEGLGLDGKVLSSSLGGDEIEFEMKINMYPPCPQPQLALGVEPHTDMSALTLLVPNDVPGLQVWKDGNWVAVNYLPNALFVHVGDQLEVLSNGKYKSVLHRSLVNKERTRMSWAVFVVPPHEAVIGPLPELIDEKNPAKYSTKTYAEYRHRKFNKIPQ

SEQ ID NO: 24542 - DNA, 1062 bp, Glycine max
  CDS (1)..(1062)
atggaaaaggttgaccaagctttcatccaatacccacaacacaggccaaatctcactatcatccaacctgaacacattcccataatagacctctctccaataaccaaccacacagtttcacatccatctcccattgaaggcttggtgaaggagataggaaatgcatgcaaagagtggggattcttccaagttatcaaccatggggtgtccctcactctaaggcaaaacattgagaaagcctcaaaattgttctttgctcagagtttagaagagaagaggaaggttagcagagatgagagttctcccatgggttattatgacacagagcacacaaaaaacattagggactggaaagaagtgtttgattttctagccaaagaccctacttttgttcctctcacttcggatgaacatgataatcgtctcactcaatggactaatccatcccctcaataccctccacacttcagggatataattaaagagtatgttgaagagatggaaaagctgtcctttaagttgatggagcttatagctttgaatttaggccttgaggcaaagaggtttgaggaatttttcatcaaagatcagactagctttcttagactcaactactatcctccatgcccttaccctcaccttgcccttggtgttggtcgacataaggactctggtcccttaaccattcttgcacaagatgaagttggaggacttgaagtgagacctaaagcagatcaagactggataagagtgaaacctattccaaatgcttatattatcaaccttggtgatatgattcaggtttggagcaatgatgcctatgagagtgtggaacacagagtggtggtcaactctgagaaagcaaggttttccattccattcttcctcttccctgcacatgacactgtagtcaagcctttggaggagctaataaatgagcaaaacccttcaaaatttaggccatacaaatggggcaagtttcttgtccacagactggatagcaatttcaagaaacaaaatgcggagaatgttcaaacttatcattataagataagagagtag

SEQ ID NO: 24543 - protein, 353 aa, Glycine max
MEKVDQAFIQYPQHRPNLTIIQPEHIPIIDLSPITNHTVSHPSPIEGLVKEIGNACKEWGFFQVINHGVSLTLRQNIEKASKLFFAQSLEEKRKVSRDESSPMGYYDTEHTKNIRDWKEVFDFLAKDPTFVPLTSDEHDNRLTQWTNPSPQYPPHFRDIIKEYVEEMEKLSFKLMELIALNLGLEAKRFEEFFIKDQTSFLRLNYYPPCPYPHLALGVGRHKDSGPLTILAQDEVGGLEVRPKADQDWIRVKPIPNAYIINLGDMIQVWSNDAYESVEHRVVVNSEKARFSIPFFLFPAHDTVVKPLEELINEQNPSKFRPYKWGKFLVHRLDSNFKKQNAENVQTYHYKIRE

SEQ ID NO: 24544 - DNA, 1083 bp, Medicago truncatula
  CDS (1)..(1083)
atggcttcagctcctttcatttcatcatcagaacctacaaaagttgatgcatcaaatatttcaagtatcaaagcctttcctattccttcaagttaccactccctcgcagaacctgatgatattgttgatgttacagaggagcttgcagcttccatcccagtcattgatttctctctcctaacctcagatgacctcaaaatccacacaaaggctgttcatgaaatcgccaaagcatgttctgaatggggtttcttcatgctcacaaaccatggagttcctgagagtctaatgcaggagttgatgaaaaaaactcacgagttttataatttgccagaggaggaaaaggaggagtttggtgacgatggcgatcccctctcacccatcaggcatggcactagcttccatcctccagcagagagttttaattattggagagattatctcaaactcttaacatctccccaattcagtttccctcacaaaccaccaggttacagggaggttgcgtttgagtataataaaaaaatcaatggtgtggcgaggaaattacttcaaggaatatctgagagcttaggattagaatctgattccataattgattcatctgattctgactctggcttacatatcatgggagtgaacttttaccctccatgtccacaaccacaccttgctcttgggttgcctccacattccgattttggcttcttgacctttctcattcaaaatggaattggaggtcttcaagttaagcatgaggataaatggttgaacgtgaacccccttcccaattgcctagttgtcaacattggtgatcaacttgaggctgtgagtaacgggaggtatgggagtgtgttacatcgagcaatccttaacaacaaggacactaggataagtttggtagtcgtgaatggacctgcacgagataaggaaattggacctgcccctgaactattagagaaagaaaagccattgtttaaaagtatcaagtattgtgattatttgctggttcagcagaagtcacaattgtcagacggaagaaccttggaccagattcggtctggagaaaaccgccgcagctag

SEQ ID NO: 24545 - protein, 360 aa, Medicago truncatula
MASAPFISSSEPTKVDASNISSIKAFPIPSSYHSLAEPDDIVDVTEELAASIPVIDFSLLTSDDLKIHTKAVHEIAKACSEWGFFMLTNHGVPESLMQELMKKTHEFYNLPEEEKEEFGDDGDPLSPIRHGTSFHPPAESFNYWRDYLKLLTSPQFSFPHKPPGYREVAFEYNKKINGVARKLLQGISESLGLESDSIIDSSDSDSGLHIMGVNFYPPCPQPHLALGLPPHSDFGFLTFLIQNGIGGLQVKHEDKWLNVNPLPNCLVVNIGDQLEAVSNGRYGSVLHRAILNNKDTRISLVVVNGPARDKEIGPAPELLEKEKPLFKSIKYCDYLLVQQKSQLSDGRTLDQIRSGENRRS

SEQ ID NO: 24546 - DNA, 1134 bp, Medicago truncatula
  CDS (1)..(1134)
atggaatcaattaacactcctagccttccctttttccctccacctaaggaccaacaaggtgaaaacaaggtccaattttttgacttcaccttactgcaaaaagaaggaaatgtaccaaaagagttcatttggccttctgagcattgggtgaaaagcagtggagaaaatattgagctacctcttattgacataggtgtcatcaagagtgatgaggctgcaatggctaatgctgctaggattgtgagggaggcatgcataaaacatggtgcctttgaagtcactaacattggtgtggattcagatttcatcaatgctgttcttcaagaaacctacaacattttcaagcttcctttgagcaagaaaattactgctatagccaaagattctggcttttcagttgctcatgcagagaggtatactactgttttaccatggaaagagacatttactttcatgtacaaacacaacaccaaaaatgagacacaagttgttgatgttgtcaattctctcttgggtgaagactttcaacaatccgggttggtgtatcaaaagtactctgatgcaatgaatgatttaactgaggtgattatggagctattggccattagtttgggtgtggatcgcaaacattatcaaagattttttgaagatgctgagtcaatgatgagatgcaacttttatccaccttgcagtgctaacctcactggtgctcttggcaatggccctcattgtgacccaatctctatcactattctccttcaagatcaagttggaggtcttgaagtttttgctgacaacaaatggcttgctgtgcccccaaagcctgatacctttgtcatcaacataggtgacaccttcatggcactgaccaatgggttgtacaagagttgcctacatagggttttggtaagcaacgagctggagaggaagtccttgactttcttcttgaatccaagaggagacaaaacagtgagtcctccaaatgaacttttggaaaatgaagaagctagaaaatatcctgattacaaatggtcagaactatatgagtatacacaaaaaactcgtagggttgatgctagcacactcgacagtttcattgcttggcgtcactcttctgagacatccaaattttag

SEQ ID NO: 24547 - protein, 377 aa, Medicago truncatula
MESINTPSLPFFPPPKDQQGENKVQFFDFTLLQKEGNVPKEFIWPSEHWVKSSGENIELPLIDIGVIKSDEAAMANAARIVREACIKHGAFEVTNIGVDSDFINAVLQETYNIFKLPLSKKITAIAKDSGFSVAHAERYTTVLPWKETFTFMYKHNTKNETQVVDVVNSLLGEDFQQSGLVYQKYSDAMNDLTEVIMELLAISLGVDRKHYQRFFEDAESMMRCNFYPPCSANLTGALGNGPHCDPISITILLQDQVGGLEVFADNKWLAVPPKPDTFVINIGDTFMALTNGLYKSCLHRVLVSNELERKSLTFFLNPRGDKTVSPPNELLENEEARKYPDYKWSELYEYTQKTRRVDASTLDSFIAWRHSSETSKF

SEQ ID NO: 24548 - DNA, 1095 bp, Medicago truncatula
  CDS (1)..(1095)
atggcatcaaatttgaaaagtgaaaatgatttcaaaggacttattgacttcaaatccctgcacgaggaagcaaaggtgccacaagagtttatctggtcatccgaggatttggttgaaaccagcaaagaagagttgaatgtacctgtcattgatttagaagccatattcaacggtgatgatgctgctttggctgctgctgcaaagattgtgagggagacatgcatggagcatgggtttttccaagtcaccaatcatggagttgaccaaaatttgatagatgctacttatcaagaatttgtgtcccttttcaaacttcctttggataggaagctcaatgcaatgagaaatccatggggttattcaggtgctcatgcagcaaggtactctgctagtttgccatggaaagagacatttacttttcaatacaaacactatgatcaatcagagacacaaattgttgacttcttcactgctgccttaggtgatgaccaccaacatgctgggtgggtgttacaaaagtattgcgaggccatgaagaaattaacagatgttattttggagctgctggccattagcttggatgttgatcgatcatactataaaaagttttttgaagatgcagaaactatgatgaggtgcaactcttacccaccttgcagtggcatccatgcaggtgcccttggcactggtcctcattgtgacccaacctcagtcaccattctttttcaagatcaagttggaggtctagaagcttttgtggataacaaatggcttggtattcgtcctcaacctaataactttgtcattaacattggggacactttcaaggcattgactaatggagtatacaagagttgtctccatagggtattggctaatagggagaaggatagaaagactcttgctttctttttgtgtccaaaaggagacaaaattgtgagagcacctgaaaatatactgggaagacaagagccaacgaaatatcctgatttcacttggaaacaatttttcgagtttacacaaaggaagcatagggctgatcccaacactcttccagatttcgtctcgtggattaattccaactcaagcttctag

SEQ ID NO: 24549 - protein, 364 aa, Medicago truncatula
MASNLKSENDFKGLIDFKSLHEEAKVPQEFIWSSEDLVETSKEELNVPVIDLEAIFNGDDAALAAAAKIVRETCMEHGFFQVTNHGVDQNLIDATYQEFVSLFKLPLDRKLNAMRNPWGYSGAHAARYSASLPWKETFTFQYKHYDQSETQIVDFFTAALGDDHQHAGWVLQKYCEAMKKLTDVILELLAISLDVDRSYYKKFFEDAETMMRCNSYPPCSGIHAGALGTGPHCDPTSVTILFQDQVGGLEAFVDNKWLGIRPQPNNFVINIGDTFKALTNGVYKSCLHRVLANREKDRKTLAFFLCPKGDKIVRAPENILGRQEPTKYPDFTWKQFFEFTQRKHRADPNTLPDFVSWINSNSSF

SEQ ID NO: 24550 - DNA, 1083 bp, Nicotiana tabacum
  CDS (1)..(1083)
atgccttcaagaatctccgacgatgttcatcaaaaacaacttgacttgtacacaataaaagaattacccgaatcccatgcatggcgatcatcattagatcatgattaccaatgcaatgactcattagagtctattccagtgatcgatctaaacgacgagaaattcgcaatagaaaatattggccatgcatgcaaaacatggggtgcattccaaatcataaaccataatatatctcagagactactggacaatatggaggaagctggaaaacgacttttttcccttccgatgcagcaaaaattgaaggctgctcgttctgcagatggtattgctggttatggcgtggctcgcatatcgtcttttttctcaaagctcatgtggtctgaaggtttcacaattgttggttccccatttgaccacgcccgccaactttggccacatgattacaagaaattctgtgacgtaatcgaagaatacgaaaaggagatggaaaaactagccggaagactgatgtggctgatgcttgggtcacttggaataagtaaggacgatatgaaatgggcttgttgcggcccaagaggagaatgctcggccctacaactaaattcttacccggcatgtccggatccggatcgggccatgggtcttgctgcacatacggattctaccatattaaccatccttcaccaaaacaacacaagtggtttacaagtgtttaaagaaggaaatggttgggtcacggttcctccgctttcgggtgcattagttatcaacgtaggtgacttgttacacatactgtcaaacgggttatacccgagtgttctacatcgggcggtagtgaaccgaacccgacaccgtttatcggtggcctatttatatggaccaccgtcgggggtgaaaatttcaccgctttctaaattggtagatcaagggcaccctccattatataggtcagtgacgtggagtgagtatttagggactaaggcaaagcatttcgacaaagcactttcgtcttttcagctttgcgctcctcgtattggatttgccaatcccaaagatcgtaatagcgtccaagttggctaa

SEQ ID NO: 24551 - protein, 360 aa, Nicotiana tabacum
MPSRISDDVHQKQLDLYTIKELPESHAWRSSLDHDYQCNDSLESIPVIDLNDEKFAIENIGHACKTWGAFQIINHNISQRLLDNMEEAGKRLFSLPMQQKLKAARSADGIAGYGVARISSFFSKLMWSEGFTIVGSPFDHARQLWPHDYKKFCDVIEEYEKEMEKLAGRLMWLMLGSLGISKDDMKWACCGPRGECSALQLNSYPACPDPDRAMGLAAHTDSTILTILHQNNTSGLQVFKEGNGWVTVPPLSGALVINVGDLLHILSNGLYPSVLHRAVVNRTRHRLSVAYLYGPPSGVKISPLSKLVDQGHPPLYRSVTWSEYLGTKAKHFDKALSSFQLCAPRIGFANPKDRNSVQVG

SEQ ID NO: 24552 - DNA, 1101 bp, Solenostemon scutellarioides
  CDS (1)..(1101)
atggttgctacaatggctgtaagcccgcgggtagaggagctggcccgaagcgggctggacacgatcccaaaagactatattcggcccgaagaagagttgaaaagcatcggcgacattttcgcagaagaaaagagcatggacgggccggaggtgccgacgatcgatcttacagagatcgattcatcagacgaggaaaggcggaggaaatgccacggcgagctgaagaaggccgccgaggattggggggtgatgtacgtgatcaaccatggtataccggaggagctcatcagccgcgtgaaggccgccgggaaggagtttttcaagctgccggtggaggagaaggagaagcacgccaacgaccaggcggcggggaacgtgcagggctacggcagcaagctggcgaacaacgccagtgggcagctggagtgggaggactacttcttccactgtgtttttccggaggagaagagggacttgtcgatttggccgcaaaatccacctgattatataccggcaactagcgagtatgcaaagcagctgcgaggcctaacaaccaagatactatcaatcctttcactcgggctgggattggaagaaggcagactagagaaagaagttggtggcatgaaggatctaatcctccaaatgaagataaacttctacccgaaatgccctcaaccggagctcgccctcggcgtcgaagcccacaccgatgtcagtgctctcaccttcatcctccacaacatggtccccggcctccagctcttctacgagggcaaatgggtcactgcaaaatgtgtgcccaactccatcatcatgcacgtcggcgacaccatcgagattctgagcagcggcaaatacaagagcattctgcacaggggtctcgtcaacaaggagaaggtcaggatttcttgggcggttttctgtgaaccgcccaaggagaaaatcgtcctccagccactaccggagaccgtctccgaggcagagccgccgcgcttcccgccgcgcacgtttgctcagcatctcaagcacaagctatttaggaagagcgatggtgaggttgacgagaagaagaagccaaaggaggatgaatctaattaa

SEQ ID NO: 24553 - protein, 366 aa, Solenostemon scutellarioides
MVATMAVSPRVEELARSGLDTIPKDYIRPEEELKSIGDIFAEEKSMDGPEVPTIDLTEIDSSDEERRRKCHGELKKAAEDWGVMYVINHGIPEELISRVKAAGKEFFKLPVEEKEKHANDQAAGNVQGYGSKLANNASGQLEWEDYFFHCVFPEEKRDLSIWPQNPPDYIPATSEYAKQLRGLTTKILSILSLGLGLEEGRLEKEVGGMKDLILQMKINFYPKCPQPELALGVEAHTDVSALTFILHNMVPGLQLFYEGKWVTAKCVPNSIIMHVGDTIEILSSGKYKSILHRGLVNKEKVRISWAVFCEPPKEKIVLQPLPETVSEAEPPRFPPRTFAQHLKHKLFRKSDGEVDEKKKPKEDESN

SEQ ID NO: 24554 - DNA, 1101 bp, Solenostemon scutellarioides
  CDS (1)..(1101)
atggttgctacaatagctccaagcccgcgggtggaggagctggcccgaagggggctggacacaatcccaaaagactatattcggcccgaagaagagttgaaaagcatcggcgacattttcgcagaagaaaagagcatcgacgggccggaggtgccgacgatcgatcttgcagagatcgattcatcagacgaggaaaggcggaggaaatgccacgacgagctgaaaaaggccgccgaggactggggggtgatgtacgtgatcaaccatggtataccggaggagctcatcagccgcgtcaaggccgccgggaaggagtttttcgagctgccggtggaggagaaggagaagcacgccaacgaccaggcggcggggaacgtgcagggctacggcagcaagctggcgaacaacgccagtgggcagctggagtgggaggactatttcttccactgtgtttttccggaggagaagagggagttgtcgatttggccgcaaaatccacctgattatataccggcaactagcgagtatgcaaaacagctgcgaggcctaacaaccaagatactatcagtcctatcactcgggctgggattggaagaaggcagactagagaaagaagttggtggcatggaggatctaatcctccaaatgaaaataaacttctacccgaaatgccctcagccggagctcgccctcggcgtcgaagcccataccgatgttagtgctctcaccttcatcctccacaacatggtccccggcctccagctcttctacgagggcaaatgggtcactgcaaaatgcgtgcccaactccatcatcatgcacgtcggcgacaccatcgagattctgagcaacggcaaatacaagagcattctgcacaggggtctcgtcaacaaggagaaggtcaggatttcttgggcggttttctgtgagccgcccaaggagaaaatcgtcctccagccactaccggagaccgtctccgaggcagagccgctgcgcttcccgccgcgtacgtttgctcagcatctcaagcacaagctatttaggaagagtgacactgaggttgacgagaagaagaagccaaacgaggatgaatctaattaa

SEQ ID NO: 24555 - protein, 366 aa, Solenostemon scutellarioides
MVATIAPSPRVEELARRGLDTIPKDYIRPEEELKSIGDIFAEEKSIDGPEVPTIDLAEIDSSDEERRRKCHDELKKAAEDWGVMYVINHGIPEELISRVKAAGKEFFELPVEEKEKHANDQAAGNVQGYGSKLANNASGQLEWEDYFFHCVFPEEKRELSIWPQNPPDYIPATSEYAKQLRGLTTKILSVLSLGLGLEEGRLEKEVGGMEDLILQMKINFYPKCPQPELALGVEAHTDVSALTFILHNMVPGLQLFYEGKWVTAKCVPNSIIMHVGDTIEILSNGKYKSILHRGLVNKEKVRISWAVFCEPPKEKIVLQPLPETVSEAEPLRFPPRTFAQHLKHKLFRKSDTEVDEKKKPNEDESN

SEQ ID NO: 24556 - DNA, 1098 bp, Vitis vinifera
  CDS (1)..(1098)
  misc_feature (823)..(823): k is g or t
atgccttcgagaatctctgatgccttcaaagcccaccctctccacctcaatcacagacacttggacttgaactcagtacaagaattacccgacttatatgcatgggcaggggtggacgagaacccttctggagactcgttaatcactgagtccgtgccggttattgatctcaccgaccctaatgcctcagaactcgtgggtcatgcatgcaagagctggggcgtcttccaagtcaccaaccatggcatccccggcagcctcctcgacgacattgagtctgctggcaggagccttttctctctacctgcccagcaaaagctgaaggccgctcgctcccctgatggggttgctggctatggcctcgccaggatttcctctttcttcaacaagctcatgtggtatgaaggcttcaccatcttcggatctccacttgaacacgctcgccaactttggcctcaagactacaccaaattctgtgatgtcacggaggagtttgagaaagagatgaaccaacttgcagagaggctcatgtggctcatgcttggatcactggggatcactaaagaagatgtcaactgggctggctcaaaaggcgacttcaaagctgccctgcagttgaactcttacccagcttgtccagagccggacagggcgatgggtctcgctgcccacactgactctagcctcttcacaatcctctaccagaacaccgtcagtggtctgcaggtccaacgagagggagccggatggatcacagttcctccactcccgggtgcacttgttatcaacgttggagacctcctccacatactatccaatgggktgttccctagtgtcgtacacagggccttggttaaccggacaaagcatcgactctctgtggcctacctctacggaccaccagccggtgttccaatctcgcccgtgccgaagctggttgactcgactcaccctcctctctaccgcccagtcacatggagcgagtacctctgcaccaaggcaaagcactttgacaaggctctttcattagttcggctgtgtatgcccaggaacggattcatcgatgtaaacgatcacaatggggtgaaagtaggttag

SEQ ID NO: 24557 - protein, 365 aa, Vitis vinifera
  misc_feature (275)..(275): The Xaa at location 275 stands for Leu, or Val.
MPSRISDAFKAHPLHLNHRHLDLNSVQELPDLYAWAGVDENPSGDSLITESVPVIDLTDPNASELVGHACKSWGVFQVTNHGIPGSLLDDIESAGRSLFSLPAQQKLKAARSPDGVAGYGLARISSFFNKLMWYEGFTIFGSPLEHARQLWPQDYTKFCDVTEEFEKEMNQLAERLMWLMLGSLGITKEDVNWAGSKGDFKAALQLNSYPACPEPDRAMGLAAHTDSSLFTILYQNTVSGLQVQREGAGWITVPPLPGALVINVGDLLHILSNGXFPSVVHRALVNRTKHRLSVAYLYGPPAGVPISPVPKLVDSTHPPLYRPVTWSEYLCTKAKHFDKALSLVRLCMPRNGFIDVNDHNGVKVG

SEQ ID NO: 24558 - DNA, 1128 bp, Vitis vinifera
  CDS (1)..(1128)
  misc_feature (420)..(420): y is t or c
  misc_feature (1122)..(1122): y is t or c
atggcatcaagaacctcaactgttgtaatggctcccccatcggaggagaagcatgacgttggatttttagtttttgacccaaagaagatggcaaaacaagagcttcccaaacagttcatttggccaaatgaagatttagttgaggccaaggaagagcttaatgaacccttggtagacatggagggattcttgaaaggtgatgaggttgcaactgcccatgctgccgagcttgttcgacaagcttgcgtaacccacggcttcttccaagttatcaaccatggggttaacccagatattctccgtgctacagaggttggattggatccttacttcaatctacccatgagcaggaagctcagcatgcataagaaggttgatgagttatgcggatactgtggtgcccattctgatcggtttgcygctaagttgacatggaaggagatgctcacttttgaataccattttaagggtgatactgactctgaggtagctgactacttcaaaaatgtggtaggtgaagattttgaggagacagggtgggttttccaaagattctgtgaagccatgaaggatttatctctaaagatttttaaactcttggcaataagcttgaacttagaagatacttcatactgtgagaaattttttgaggatggttttgcagtcttgagatgtaactactatccagtttgcccggaatctggccttacctttggcactggccctcattgtgacccgacctctttaacaatacttcatcaagatcaagttggagggcttgaagtattttcaaacgaaaaatggtattatgtcaagcctcagcctggtgctcttgtgattaacatcggtgacaccctcatggcattaaccaatggaatatacaagagttgtttgcacagggctgcggcaaaaaatgacagagacaggatatcattcgcttactttattagcccaaggcaggacaagctggtttcacccataaaagatcttattgctagagaaggctcaaagaaataccctgatttcaaatgggaacaacttttagacttcacccaagtccatgatcgcactgatgatactaccatcaaacgcttcgtggaattccttgagtcatcggaaacyaaataa

SEQ ID NO: 24559 - protein, 375 aa, Vitis vinifera
MASRTSTVVMAPPSEEKHDVGFLVFDPKKMAKQELPKQFIWPNEDLVEAKEELNEPLVDMEGFLKGDEVATAHAAELVRQACVTHGFFQVINHGVNPDILRATEVGLDPYFNLPMSRKLSMHKKVDELCGYCGAHSDRFAAKLTWKEMLTFEYHFKGDTDSEVADYFKNVVGEDFEETGWVFQRFCEAMKDLSLKIFKLLAISLNLEDTSYCEKFFEDGFAVLRCNYYPVCPESGLTFGTGPHCDPTSLTILHQDQVGGLEVFSNEKWYYVKPQPGALVINIGDTLMALTNGIYKSCLHRAAAKNDRDRISFAYFISPRQDKLVSPIKDLIAREGSKKYPDFKWEQLLDFTQVHDRTDDTTIKRFVEFLESSETK

SEQ ID NO: 24560 - DNA, 1251 bp, Vitis vinifera
  CDS (1)..(1251)
atggacaatacccattgtgttgttgatcttactttattgactttaccagcgggcttcaccgacagccatgcaaaacacaacgagccggagctttgccgaaaacgaggaccatcatgggtatttgaccagccgtcatcgtcttgggacttttgttctttggggcttcatatcacatctccagaactctctgatgccttcaaatccatgcctgccaatctctacgagaaacaattagacctgaactcaatccaagaattgcccgattcgcacgcatgggcgtctctcggcgagcacccttgcgtggactctttaattgcagaatcagtgccggttattgatctgagtgaccccaatgcattaacacttgtgggcgatgcatgtaagagttggggtgtgtttcaagtcatcaaccatggcatccccatcagcattcttgaagccattgaggatgctagcaggaaccttttcgcattgcctgctgagcaaaagctcaaggctactcgcccgcctgatggcttctccggcttcggccaaccccggattgctccgttctttgccaagcaaatgtggtatgaaggcttcaccgtcctcggatcgcctctcgagcttgtttccaaactttggcctgaagaatactgcaccaagttctgtgaagttactgaagaatatgacaaacagatgaagcagctagcaaataagctcctctggctcctgcttggctcactgggaatcaacaaagaagatgtagaatgggctggtccagaaggtcagttagaaggggcacatgctgccttgcagttgaactcttacccagcttgtccacagccggacaaggccatgggtcttgccgagcacactgactcctccctcctcaccatcctttaccagggcagcaccagtggtctccaagtcgtcctagaaggcagtggatggatcacagttcctcctctccctggtgcgcttgtcgtcaatatcggcgacctcctccatatactatccaacgctgcatttcccagtgtcctccaccgtgccatggttaacaactccaagcagcgtatctccgtcgcctatttctatggaccaccggcgaccattccagtggcgcccatcccaaaattagttgactccagtcaccctcctgtctaccgctcagttacatggagtgagttccttgctaccaaggcaaagcatttcaacaaggctctttcattagttaggatgcctgtgccggaaacggattcatcggagtaa

SEQ ID NO: 24561 - protein, 416 aa, Vitis vinifera
MDNTHCVVDLTLLTLPAGFTDSHAKHNEPELCRKRGPSWVFDQPSSSWDFCSLGLHITSPELSDAFKSMPANLYEKQLDLNSIQELPDSHAWASLGEHPCVDSLIAESVPVIDLSDPNALTLVGDACKSWGVFQVINHGIPISILEAIEDASRNLFALPAEQKLKATRPPDGFSGFGQPRIAPFFAKQMWYEGFTVLGSPLELVSKLWPEEYCTKFCEVTEEYDKQMKQLANKLLWLLLGSLGINKEDVEWAGPEGQLEGAHAALQLNSYPACPQPDKAMGLAEHTDSSLLTILYQGSTSGLQVVLEGSGWITVPPLPGALVVNIGDLLHILSNAAFPSVLHRAMVNNSKQRISVAYFYGPPATIPVAPIPKLVDSSHPPVYRSVTWSEFLATKAKHFNKALSLVRMPVPETDSSE

SEQ ID NO: 24562 - DNA, 1080 bp, Vitis vinifera
  CDS (1)..(1080)
  misc_feature (492)..(492): y is t or c
atgaattgcccacaagattggcctgagccaatagtcagggtccaatctttgtctgatagtggcgtggctgtgatccctgatcaatatatcaaaccatcaatggagaggcctgaggggttttctgagaacactcagacgaatatccctgtaattgatctcgaaggtctctttgatgatcagcatggtcttatgctgaactcctccataattgagctaatctaccaagcatgtagagagtggggttttttccaggtcgtgaaccatggcgtgagccccgacttgatggaccaagctcgcgaggtatggcgagacttctttcatcttccaatggaaatgaagcaagtgtacgcaaactcccccaagacatacgaaggttatggaagccgattaggagtagaaaaaggtgccattcttgattggagcgactactacttcctccactacaggccctcctcgctaaaagatcataacaagtggccttccccacctctygctttgagggaagtgattgaggagtatggcaaacaagtggtcgaactggccgggaaattaatgaaggttttgtctataaaccttggattaaaggaagagtatctacaaaatgcgtttggtggggacgacataggggcctgcctgagggtgaatttttatccaaggtgtccacagcctgacctaactttgggtctctcatcccattcagaccctggtggcatgacctttctgctaccggatcacgatgttcccggtcttcaagtacgcaaggaccacaaatggatcactgttaaaccagctccgcatgccttcatagtcaacataggggatcaaattcaggttctaagcaatgcaatctacaagagtgtggagcatagagtaatggtgaattcgctcaaagaacgcgtgtccctcgccttcttctacaacccgaagagcgatatactgatcgagccagtgaaggcgctcgtgacaccggatacaccagccttgtacccaggcatgacatttgatcagtacagactttacataaggatgaggggtccaagaggcaaatcccaagttgaatctctaaagtcccctagatga

SEQ ID NO: 24563 - protein, 359 aa, Vitis vinifera
MNCPQDWPEPIVRVQSLSDSGVAVIPDQYIKPSMERPEGFSENTQTNIPVIDLEGLFDDQHGLMLNSSIIELIYQACREWGFFQVVNHGVSPDLMDQAREVWRDFFHLPMEMKQVYANSPKTYEGYGSRLGVEKGAILDWSDYYFLHYRPSSLKDHNKWPSPPLALREVIEEYGKQVVELAGKLMKVLSINLGLKEEYLQNAFGGDDIGACLRVNFYPRCPQPDLTLGLSSHSDPGGMTFLLPDHDVPGLQVRKDHKWITVKPAPHAFIVNIGDQIQVLSNAIYKSVEHRVMVNSLKERVSLAFFYNPKSDILIEPVKALVTPDTPALYPGMTFDQYRLYIRMRGPRGKSQVESLKSPR

SEQ ID NO: 24564 - DNA, 1029 bp, Vitis vinifera
  CDS (1)..(1029)
atgggagaggtcgatccagccttcgtccaagacgcccaacataggcctaagctcgctgttatcgaagctgaaggcatccccctcattgatctctcttccgccaatgcttccaatcatgtttctcaaatagctgatgcatgcaagaactggggcttttttcaagtcatcaaccatggggtgccctcggagtctagccggaaaatttgggatgccgcgaggaagttcttcgctctgccagtggaggagaagaggaaggtgagtagagatgaggtgaatccttttgggtactttgatactgagcataccaagaacgttagggactggaaagaagtctttgatttcgtggtgagaacccccgccttcggccctgcttcggatgatcctgacgacaaggagctcatagagctgaccaatcggtggcctcagtaccctcctgaattaagggaggtctgtgaagaatatgcgagagaaacggaaaaactagctttcaagctgatgggactcatctctctgagcttaggtttgccagaaaacagattcaatcttttctttgaagaatcaacgagctccgtccgcttcaatcactacccaccttgccctgtccctcacctagctctgggcgttggtcaccacaaggatgtcggagccttaaccatccttgcccaggatgatgtcggagggttggaagtaaagcgaaaaaccgatggagaatgggttcgagtgaagcccaccccagatgcttatatcatcaatgttggggatataattcaggcttggagcaacgacacttatgagagtgtggagcacagagtgatactgaattcagagagggaaaggttctcgattccgttctttttcaatcccgcgcaccatctttgggtgcagcccttggaggagctgacgaagggggaaaaaccaaagtatagagcatacaacttgggaaagttctttgctacgagaaagcacggtaatctcaagaagcttggtgtggaaaacctccaaatttctcatttcaaggtatcagagtaa

SEQ ID NO: 24565 - protein, 342 aa, Vitis vinifera
MGEVDPAFVQDAQHRPKLAVIEAEGIPLIDLSSANASNHVSQIADACKNWGFFQVINHGVPSESSRKIWDAARKFFALPVEEKRKVSRDEVNPFGYFDTEHTKNVRDWKEVFDFVVRTPAFGPASDDPDDKELIELTNRWPQYPPELREVCEEYARETEKLAFKLMGLISLSLGLPENRFNLFFEESTSSVRFNHYPPCPVPHLALGVGHHKDVGALTILAQDDVGGLEVKRKTDGEWVRVKPTPDAYIINVGDIIQAWSNDTYESVEHRVILNSERERFSIPFFFNPAHHLWVQPLEELTKGEKPKYRAYNLGKFFATRKHGNLKKLGVENLQISHFKVSE

SEQ ID NO: 24566 - DNA, 1149 bp, Vitis vinifera
  CDS (1)..(1149)
atgtctatagtttgtgtcgaaggtaacccaccatccatgtttaatccgcctacagacgaccacaaaaaccaggaaccactagtgtttgatgcctcggttcttcggcaccaatccaacattcccaagcagttcatatggccggatgcagaaaagccaggggacaaggccacagagctgtctgttccactcatagacttgggaggcttcctctctggagaccctgctgcagccatggaagcaactaggcttgtgagggaggcatgccagaagcatggcttcttccttgttgttaaccatggggttgatgataaactcatatacaaagctcaccagtacatggacagcttctttgggttgcctttggccaagaagcaaagggctcagaggaagctgggtgagcactgtggatatgccagcagcttcattggcaggttctcttccaagctgccatggaaagagaccctttctttcagctattcagctgagaagaagtcatccaatgctgtgcaggagtatttcctcaacaaaatgggtgaagatttcagtgaattcgggcaagtgtaccaggactactgtgaggccatgagcacgctttcccttgtgatcatggagctgctggggatgagcctgggtataggcggagcccatttcagggaatttttcgaggaaaacgattcgataatgagactcaactactaccccccatgcctaaaacccgacctcactttaggaacagggcctcattgtgatccaacatctttaaccatccttcatcaggaccaagtgggtggccttcaagtgtttgtagatgacaaatggtggtccattagcccaaatttcgatgcctttgttgttaacatcggcgacaccttcatggctctttcaaatggaaggtacaagagctgcttacatagggcagtggtaaacagccaaactccaagaaaatctcttgctttctttttgtgtccagagaaagataaggtggtgaggccaccaactgaactggtggacaccaacagccctagaatatatccggatttcacttggtccaatctcctcgaattcacccagaagcattacagggctgacatgaaaacacttgaggttttctctagctggcttcaacagaaaacagctgaagcggtgtaa

SEQ ID NO: 24567 - protein, 382 aa, Vitis vinifera
MSIVCVEGNPPSMFNPPTDDHKNQEPLVFDASVLRHQSNIPKQFIWPDAEKPGDKATELSVPLIDLGGFLSGDPAAAMEATRLVREACQKHGFFLVVNHGVDDKLIYKAHQYMDSFFGLPLAKKQRAQRKLGEHCGYASSFIGRFSSKLPWKETLSFSYSAEKKSSNAVQEYFLNKMGEDFSEFGQVYQDYCEAMSTLSLVIMELLGMSLGIGGAHFREFFEENDSIMRLNYYPPCLKPDLTLGTGPHCDPTSLTILHQDQVGGLQVFVDDKWWSISPNFDAFVVNIGDTFMALSNGRYKSCLHRAVVNSQTPRKSLAFFLCPEKDKVVRPPTELVDTNSPRIYPDFTWSNLLEFTQKHYRADMKTLEVFSSWLQQKTAEAV

SEQ ID NO: 24568 - DNA, 1017 bp, Vitis vinifera
  CDS (1)..(1017)
  misc_feature (144)..(144): y is t or c
  misc_feature (471)..(471): y is t or c
  misc_feature (600)..(600): r is g or a
atggaatcaaaggtgttgtccaccggaatccggtacttgaccttgccacaaagttacatcaggccagagccggagaggccgagactctcccaagtgagtgagtgtaaacatgtccccataatcgacctcggcaaggacgtaaayagggcccaactcatccaacacatcgccgatgcttgcaggctctatggttttttccaggtgatcaatcatggggtagctgcagaaatgatggagaaaatgttggaggtggccgatgagttctacagactgccggtggaggagaagatgaagctgtattccgatgatcccaccaagacaatgaggttgtcaaccagctttaatgtgaataaggagaaggtccataactggagagattatctcagactccattgttatcctctggatcagtacacgcctgagtggccttccaatcctccttccttcaaggaaattgtgagtagttattgyaaagaggtaagagaacttgggttcagactacaagaaatgatatcagagagtttaggcttggaaaaggatcatataaagaatgtttttggtgaacaagggcaacacatggctgtaaactattatccgccrtgtccacaacccgagctcacttatggattgccaggacacacagaccccaacgcccttaccattcttcttcaagacctacgagtggcaggtcttcaagttctcaaggatggtacttggctcgctatcaagccacatcccggtgcttttgtcgtcaatataggcgatcaattacaggctgtgagtaatgggaaatacaaaagtgtatggcatagggccgttgtgaatgcagagagtgaaaggctatcagtggcttctttcctctgcccatgcaatgatgcagtaattggccctgcaaagcctctcacagaagatggatctgcacccatttacaagaatttcacatatgctgagtattacaagaagttctggggcagggacttggatcaagaacattgcttggaactattcaagaactag

SEQ ID NO: 24569 - protein, 338 aa, Vitis vinifera
MESKVLSTGIRYLTLPQSYIRPEPERPRLSQVSECKHVPIIDLGKDVNRAQLIQHIADACRLYGFFQVINHGVAAEMMEKMLEVADEFYRLPVEEKMKLYSDDPTKTMRLSTSFNVNKEKVHNWRDYLRLHCYPLDQYTPEWPSNPPSFKEIVSSYCKEVRELGFRLQEMISESLGLEKDHIKNVFGEQGQHMAVNYYPPCPQPELTYGLPGHTDPNALTILLQDLRVAGLQVLKDGTWLAIKPHPGAFVVNIGDQLQAVSNGKYKSVWHRAVVNAESERLSVASFLCPCNDAVIGPAKPLTEDGSAPIYKNFTYAEYYKKFWGRDLDQEHCLELFKN

SEQ ID NO: 24570 - DNA, 1029 bp, Vitis vinifera
  CDS (1)..(1029)
atgggagaggtcgatccagccttcgtccaagacgcccaacataggcctaagctcgctgttatcgaagctgaaggcatccccctcattgatctctcttccgccaatgcttccaatcatgtttctcaaatagctgatgcatgcaagaactggggcttttttcaagtcatcaaccatggggtgtcctcggagtctcgccggaaaatttgggatgccgcgaggaagttcttcgctctgccagtggaggagaagaggaaggtgagtagagatgaggtgaatccttttgggtactttgatactgagcataccaagaacgttagggactggaaagaagtctttgatttcgtggtgagaacccccgccttcggccctgcttcggatgatcctgacgacaaggagctcatagagctgaccaatcggtggcctcagtaccctcctgaattaagggaggtctgtgaagaatatgcgagagaaacggaaaaactagctttcaagctgatgggactcatctctctgagcttaggtttgccagaaaacagattcaatcttttctttgaagaatcaacgagctccgtccgcttcaatcactacccaccttgccctgtccctcacctagctctgggcgttggtcaccacaaggatgtcggagccttaaccatccttgcccaggatgatgtcggagggttggaagtaaagcgaaaaaccgatggagaatgggttcgagtgaagcccaccccagatgcttatatcatcaatgttggggatataattcaggcttggagcaacgacacttatgagagtgtggagcacagagtgatactgaattcagagagggaaaggttctcgattccgttctttttcaatcccgcgcaccatctttgggtgcagcccttggaggagctgacgaaaggggaaaaaccaaagtatagagcatacaacttgggaaagttcttggctacgaaaaagcgcagtaatcttaagaagcttggtgtggaaaacctccaaatttctcatttcaaggtatcagagtaa

SEQ ID NO: 24571 - protein, 342 aa, Vitis vinifera
MGEVDPAFVQDAQHRPKLAVIEAEGIPLIDLSSANASNHVSQIADACKNWGFFQVINHGVSSESRRKIWDAARKFFALPVEEKRKVSRDEVNPFGYFDTEHTKNVRDWKEVFDFVVRTPAFGPASDDPDDKELIELTNRWPQYPPELREVCEEYARETEKLAFKLMGLISLSLGLPENRFNLFFEESTSSVRFNHYPPCPVPHLALGVGHHKDVGALTILAQDDVGGLEVKRKTDGEWVRVKPTPDAYIINVGDIIQAWSNDTYESVEHRVILNSERERFSIPFFFNPAHHLWVQPLEELTKGEKPKYRAYNLGKFLATKKRSNLKKLGVENLQISHFKVSE

SEQ ID NO: 24572 - DNA, 1029 bp, Vitis vinifera
  CDS (1)..(1029)
  misc_feature (187)..(187): r is g or a
  misc_feature (274)..(274): m is a or c
atgggagaggtcgatccagctttcatccaagacacccaacataggcctaagctcgctgttatcgaagctgaaggcatccccctcattgatctctcttccgccaatgcttccaaccatgtttctcaaatagctgatgcatgcaagaactggggcttctttcaagtcatcaaccatggggtgccctcgragtctcgtcgtaaaattgaggatgccgcgaggaagttcttcgctctcccattggaggagaagaggaaggtgagtagagatgaggtgmatcctttggggtatttcgatactgagcataccaagaacgtcagggactggaaggaagtctttgatctcgtggtgtcatcccccgccttcatccctgcttcgcctaatcctgacgacaaggagctcaaagaactgatcaatcagtggcctcagtaccctcctgatttaagggaggtatgtgaagaatatgctagagaaatggaaaaactagctgtcaagctgttgggactcatctctctgagcttaggtttgccagagaacagattcaatcttctctttgaagaatcaacaaacttcatccgcctcaatcactacccaccttgctccattcctcacctagctctgggcgttggtcgccacaaggattccggagccttaactttccttgctcaggatgatgttggagggatggaagtaaagcgaaaaaccgatggagaatgggttcgagttaagcccaccccagatgcttatatcatcaatgttggggatatagttcaggtctggagcaacgatacttatgaaagtgtggagcacagggtgatggtgaattcagagagggaaaggttctcgattccgttcgttttgagtcccgggcaccatgtttggatgaagccctttgaggagctaacgaagggggaaaagccaaagtatagagcatacaactggggaaagttctttgttacgagaaggcgcagtagtttcaagaagcttgatgtggaaaacctccaaatttctcatttcaaggtatcagagtaa

SEQ ID NO: 24573 - protein, 342 aa, Vitis vinifera
  misc_feature (63)..(63): The Xaa at location 63 stands for Glu, or Lys.
  misc_feature (92)..(92): The Xaa at location 92 stands for Asn, or His.
MGEVDPAFIQDTQHRPKLAVIEAEGIPLIDLSSANASNHVSQIADACKNWGFFQVINHGVPSXSRRKIEDAARKFFALPLEEKRKVSRDEVXPLGYFDTEHTKNVRDWKEVFDLVVSSPAFIPASPNPDDKELKELINQWPQYPPDLREVCEEYAREMEKLAVKLLGLISLSLGLPENRFNLLFEESTNFIRLNHYPPCSIPHLALGVGRHKDSGALTFLAQDDVGGMEVKRKTDGEWVRVKPTPDAYIINVGDIVQVWSNDTYESVEHRVMVNSERERFSIPFVLSPGHHVWMKPFEELTKGEKPKYRAYNWGKFFVTRRRSSFKKLDVENLQISHFKVSE

SEQ ID NO: 24574 - DNA, 1044 bp, Vitis vinifera
  CDS (1)..(1044)
  misc_feature (42)..(42): s is g or c
  misc_feature (432)..(432): y is t or c
  misc_feature (513)..(513): y is t or c
  misc_feature (554)..(554): r is g or a
  misc_feature (570)..(570): r is g or a
  misc_feature (600)..(600): k is g or t
  misc_feature (612)..(612): s is g or c
  misc_feature (630)..(630): y is t or c
  misc_feature (669)..(669): y is t or c
  misc_feature (720)..(720): m is a or c
atgggagagattgatccagccttcatccaatccattgaacasaggccaaagctcactgtcaccgatcccggagaaatcccggtcatcgatctctcggcgttggactcgggcgccgtggatctcctagtcgctgatattggcaaagcatgcgaggagtgggggttctttaaagtgatcaaccatggagtgccactggaagtcgttcggagaattgaggctgcgatgaaggagtttttcgatcagagtatcgatgagaagaggaaggtgaagagggatgaggcgaagcctatgggctatcatgattcagagcataccaaaaatgttagggattggaaagaagtgttggatattgctgtggaagatcccctggtgatctcagcctctccagaccctcaagatcaggaattgaccaagtattacaaccagtggccygagtaccctccagaatttaggaaaattttgaaggaatatgctggagaaatagaaaaattagctttcaagctcttggaactyatctccttaagcttaggcttggccggggaccggttgattgrattcttccaagggcaraccagctttatccgactcaatcactatcckccgtgcccgtgsccggagctcgctctcggygtgggtcggcacaaggacgcaggagctttaaccgttctytttcaagatggtgtcgggggattggaagtgaagcgaaaagccgatggagamtgggttggagtaaaacctattccaaatgcttatatcattaatgttggtgatattattcaggtgtggagcaatgataaatatgagagcgtggagcacagggtggtggccaatagtgagaaggaaaggttttcgattccattcttcttatttccggcgcaccatgtgaatgtgaagccattggaggagttgaccaatgaggaaaacccccctaaatttaaagagtacaattgggggaagttcatggcaactagaaacaggagtgatttcaagaagcaagctgttgaaaacatccaaattcatcatttcagagtttccgaacaataa

SEQ ID NO: 24575 - protein, 347 aa, Vitis vinifera
  misc_feature (14)..(14): The Xaa at location 14 stands for Gln, or His.
  misc_feature (185)..(185): The Xaa at location 185 stands for Glu, or Gly.
  misc_feature (204)..(204): The Xaa at location 204 stands for Cys, or Trp.
  misc_feature (240)..(240): The Xaa at location 240 stands for Asp, or Glu.
MGEIDPAFIQSIEXRPKLTVTDPGEIPVIDLSALDSGAVDLLVADIGKACEEWGFFKVINHGVPLEVVRRIEAAMKEFFDQSIDEKRKVKRDEAKPMGYHDSEHTKNVRDWKEVLDIAVEDPLVISASPDPQDQELTKYYNQWPEYPPEFRKILKEYAGEIEKLAFKLLELISLSLGLAGDRLIXFFQGQTSFIRLNHYPPCPXPELALGVGRHKDAGALTVLFQDGVGGLEVKRKADGXWVGVKPIPNAYIINVGDIIQVWSNDKYESVEHRVVANSEKERFSIPFFLFPAHHVNVKPLEELTNEENPPKFKEYNWGKFMATRNRSDFKKQAVENIQIHHFRVSEQ

SEQ ID NO: 24576 - DNA, 987 bp, Vitis vinifera
  CDS (1)..(987)
atggccgttgtgcaagaagaaattgaatctaaatatgaccgaattattgagttgaaagcttttgatgactcgaaacttggtgtgaaggggcttgttgatgctgggctggcaaagatcccccggatgtttatccatccacaacataatctctatgagaaatcaggccccattgactctcattctaatattccaatcatagaccttgaaggtgtcaagaatgatgtgactctccatgctaaaatcatcaacgaagttcaaaaagcttgtgaaaactggggcatctttcagatagtcaatcatggaatttcagaagggattttggaggagatgatcgaaggcatacgtagatttcatgagcaagatgctgaagtgaagaaagagtattatactcgtgattttacaaaaaaggcatcatcagcctcctggagggatgcccttttgattaccatcactcctaatccccctgatcccatacaactgcctttagtatgcagagatatagtggtggaatactcgaagcaagtaaagcatttggggtatactctgttagaattgctatctgaggctcttggacttgaaccaaatcattttaaaaacatggaatttgctaagcagggtttcttcttggctcagtactatccttcatgtcctgaacccgaattgacgctgggcaccaaacgccatactgatcctaactttcttactattgttttacaagaccaagtgggtggtctccaaattcttcatgagaatcactggatggatgttcctcccatacctggggccctagtaataaacaccggagatgttctgcagattgtaaccaacggcaggtttaaaagtgtagaacacagagtactggcacagcatgaaggtccaagaatttcagtggcgtccttcttcaactcatgtttcccaccatcctcaaaagtttacacaccgattaaggagttgttgtctgaagagaatcctccaaatgataaataa

SEQ ID NO: 24577 - protein, 328 aa, Vitis vinifera
MAVVQEEIESKYDRIIELKAFDDSKLGVKGLVDAGLAKIPRMFIHPQHNLYEKSGPIDSHSNIPIIDLEGVKNDVTLHAKIINEVQKACENWGIFQIVNHGISEGILEEMIEGIRRFHEQDAEVKKEYYTRDFTKKASSASWRDALLITITPNPPDPIQLPLVCRDIVVEYSKQVKHLGYTLLELLSEALGLEPNHFKNMEFAKQGFFLAQYYPSCPEPELTLGTKRHTDPNFLTIVLQDQVGGLQILHENHWMDVPPIPGALVINTGDVLQIVTNGRFKSVEHRVLAQHEGPRISVASFFNSCFPPSSKVYTPIKELLSEENPPNDK

SEQ ID NO: 24578 - DNA, 1104 bp, Vitis vinifera
  CDS (1)..(1104)
atggagttgcccctagatgaagccaatactcaacaccagtctctagtgtttgatgcctccgttcttaaataccaatccaccataccatcacagttcatatggcctgatgaggagaagccctgtgccaagccacctgagcttcttgttcctcccattgacttgggaggcttcctctctgcagatcctcttgccatctcaaatgcggctcgtcttgtcaatgaggcatgcaggaagcatggcttcttccttgttgtgaatcatggtgtggatgcacagcttgtcactgaagcgcataagaacatggacttcttcttcaacatgtcactctctgagaagcaaagagctcagagaaaggttggtgaccactgtggatatgctagtagctttaccggcaggttctccaccaagctcccttggaaagagactctttcttttcgatattgtgatgatgatcaatcctcaaggatcattgagaaatatttctcaaatgtgatgggcgaagatttcaaacagttcgggagggtgtaccagcaatattgtgaagccatgagcagactctctcttgggatcatggagcttttgggcatgagcctaggtgttggccgcgagtatttcagagaattctttgaaggaaatgattcaataatgagactaaactactacccaccatgccaaaaacccaatctaactcttggaaccgggcctcactgtgaccctacatcattgacaatcctgcatcaggatcaggtgtctggccttcaagtgtttgtagatgaaaaatggcactcaatcagtcccaattcagaagcttttgttgtcaacatcggtgacacattcatggccctatcaaatgggatttacaagagttgcctgcacagagcagtggtaaatagccaaactccaaggaagtctctggctttctttttatgcccaaagatggagaaggtggtgagcccaccaaatgggctggcggacgccaacaatccaaggatatatcccgacttcacgtggtcatcgctgcttgaattcacgcagaaacattatagggccgacacgaaaaccctccatgtcttctcaaactggcttcaacagaaaaacaactga

SEQ ID NO: 24579 - protein, 367 aa, Vitis vinifera
MELPLDEANTQHQSLVFDASVLKYQSTIPSQFIWPDEEKPCAKPPELLVPPIDLGGFLSADPLAISNAARLVNEACRKHGFFLVVNHGVDAQLVTEAHKNMDFFFNMSLSEKQRAQRKVGDHCGYASSFTGRFSTKLPWKETLSFRYCDDDQSSRIIEKYFSNVMGEDFKQFGRVYQQYCEAMSRLSLGIMELLGMSLGVGREYFREFFEGNDSIMRLNYYPPCQKPNLTLGTGPHCDPTSLTILHQDQVSGLQVFVDEKWHSISPNSEAFVVNIGDTFMALSNGIYKSCLHRAVVNSQTPRKSLAFFLCPKMEKVVSPPNGLADANNPRIYPDFTWSSLLEFTQKHYRADTKTLHVFSNWLQQKNN

SEQ ID NO: 24580 - DNA, 1134 bp, Chrysanthemum x morifolium
  CDS (1)..(1134)
atggctatagattgcatgatcaagactacatcaaacatgccatcccttaaagaggatcaacgaaaatcattccttttcgatgcatccgtgctaaaacatgaaaccaatataccccaacagttcatatggcccgatcatgagaaacctaactcccaaaaatcaaaggaacttgaggttcctttgatagacctaggaggctttctttctggacgatcgagttcagctaatgacgcctccagtcttgtgggcgaggcttgtcaaaaacatggttttttcctagtcgtcaaccatggagttgatgcaaacctaatatccgatgctcaacgatacatggatttgttctttgagctcccgctttctgtaaagcaaagagctcaaagaaaagttggtgaaagttgtggctatgctagtagtttcactggacggttttcctctaagctgccttggaaagagacgctctctttccgattttcagctgaggagaacgcatccaacatagttaaggactactttgagaacacaatgggagaagagtttattcgacttgggaaggtttaccaagaatattgcaatgccatgagtagactctctcttgggatcatggagttactagggatgagccttggtgtgagccgagcttactacaaagattttttcgaggaacataattcaataatgaggcttaactactatccaccatgtcaaaaaccagaccttaccttaggcacgggtcctcactgtgatccaacatcattgacaatcctacatcaagataacgtcggtggactagaagtctttgtggacaatgagtggcgtttaatcgtacccaattcaaatgcttttgttgtaaacattggtgacacattcatggcactttcaaatggaagatacaaaagttgcttgcatagggctgttgtaaacagcaaaactactagaaagtcacttgctttcttcttatgtccaaagaaggataaggtagtgatcccaccaaaagaattggtggacgaaaataaccctagaatatatccagattttacatggtctacctttcttgagttcactcagaagcattacagggctgacaagaatacccttcaagctttctcaacctgggttcgacagaaaaccacttga

SEQ ID NO: 24581 - protein, 377 aa, Chrysanthemum x morifolium
MAIDCMIKTTSNMPSLKEDQRKSFLFDASVLKHETNIPQQFIWPDHEKPNSQKSKELEVPLIDLGGFLSGRSSSANDASSLVGEACQKHGFFLVVNHGVDANLISDAQRYMDLFFELPLSVKQRAQRKVGESCGYASSFTGRFSSKLPWKETLSFRFSAEENASNIVKDYFENTMGEEFIRLGKVYQEYCNAMSRLSLGIMELLGMSLGVSRAYYKDFFEEHNSIMRLNYYPPCQKPDLTLGTGPHCDPTSLTILHQDNVGGLEVFVDNEWRLIVPNSNAFVVNIGDTFMALSNGRYKSCLHRAVVNSKTTRKSLAFFLCPKKDKVVIPPKELVDENNPRIYPDFTWSTFLEFTQKHYRADKNTLQAFSTWVRQKTT

SEQ ID NO: 24582 - DNA, 1143 bp, Pisum sativum
  CDS (1)..(1143)
atggctatagaatgcataacaagtagtgcaaaactcatgactcaaaagagtgataaaaatgaaaatgaagaatcatcaaaattagtttttgatgcttcatttctaaaaaaccaactcaaccttccaaaacaattcatttggccagatgatgaaaagccatgcatgaatgtgccggaacttgatgttccactcattgatttcaaaaacttcctttctggtgacccttttgcggcaatggaagcttctaaaaccattggtgaagcatgtgagaaacatgggttttttcttgtggttaatcatggaattgatacaaagttaattgaacatgctcatagttacatgaatgatttctttgaggttcccctgtctcagaaacagaggtgtcagagaaaaacaggggaacattgtggttatgctagtagtttcactgggagattctcctcaaatcttccatggaaagaaactctttcttttcaattttcagatgagaaaaactcttcaaatattgttaaagattacctttccaacacattaggggaagattttcaacaatttggggaggtttaccaagaatattgtgaagcaatgagcaaactttcactagggataatggagctacttggaatgagtcttggagttgggaaagaatgttttagagatttttttgaagagaataaatcaattatgagacttaattattaccctccatgtcaaaaacctgatctcactttaggaactggccctcattgtgatccaacatctttaactattcttcaccaagatcaagttggtggcttgcaagtttttgttgataatgagtggcattccattaggccaaatttcaatgcttttgttgtcaatattggtgacaccttcatggctctttcaaatgggagatacaagagttgtttacatagggcagtggtgaacaacaagacaacaagaaaatctctagctttctttttgtgtccaaaaggtgataaagtggttagcccaccaagtgaattggtgaatgatttgacaccaaggatctatccagattttacatggccaatgcttcttgagtttactcaaaaacattatagagctgatatgaggacacttgaggcatttacaaaatggattcaacaaaaacaaaactag

SEQ ID NO: 24583 - protein, 380 aa, Pisum sativum
MAIECITSSAKLMTQKSDKNENEESSKLVFDASFLKNQLNLPKQFIWPDDEKPCMNVPELDVPLIDFKNFLSGDPFAAMEASKTIGEACEKHGFFLVVNHGIDTKLIEHAHSYMNDFFEVPLSQKQRCQRKTGEHCGYASSFTGRFSSNLPWKETLSFQFSDEKNSSNIVKDYLSNTLGEDFQQFGEVYQEYCEAMSKLSLGIMELLGMSLGVGKECFRDFFEENKSIMRLNYYPPCQKPDLTLGTGPHCDPTSLTILHQDQVGGLQVFVDNEWHSIRPNFNAFVVNIGDTFMALSNGRYKSCLHRAVVNNKTTRKSLAFFLCPKGDKVVSPPSELVNDLTPRIYPDFTWPMLLEFTQKHYRADMRTLEAFTKWIQQKQN

SEQ ID NO: 24584 - DNA, 1149 bp, Phaseolus vulgaris
  CDS (1)..(1149)
atggccatagattgcatgacaaatatacaaaccatgtctcagccacaaaagcaccaccaccaagacaacaaagaagatgaagcaccattggtttttgatgcctcacttctaaggcaccaactcaacctaccaaagcaattcatttggcctgatgatgagaagccatgcatgaatgtgcctgagcttgttgtccctctcattgacttgagggggttcctctctggtgaccctgttgccacaatggaagctgcaaggatggtcggtgaagcatgccaaaagcacggtttctttctcgtggtgaaccatgggattgatgccaacttaatctctcatgctcatagctacatggatgacttctttgaggttcccctgactcagaaacagagagctcagaggaaaacaggggaacactgtggctatgctagtagcttcactggcagattctcttccaagcttccatggaaagagacactctcttttcagttctcagctgaggagaaatcatccactattgtcaaagactacttgtgcaacacactgggccaggagtttgagcaatttgggagggtttaccaagactattgtgatgccatgagtaatctttctttggggataatggaacttttgggaatgagtcttggagttggtaaagcgtgttttagagagttctttgaagagaacgactcaataatgaggctgaattactaccctccttgtcaaaaacctgacctgactttgggcacaggacctcactgtgacccaacatctttgaccattcttcaccaggaccaagtgggaggcctccaagtttttgttgacaatgagtggcattccattaacccaaatttcaatgcttttgttgtcaacataggtgacaccttcatggctctttccaatggaaggtacaagagttgcttgcatagggcagtggtgaacagcaagacaacaagaaaatctcttgctttctttttgtgtccaaaaggtgataaggtggtcagtccaccaagtgaattggtggatgacttgaccccaaggttgtacccagattttacatggcctatgctgctagaatttactcagaaacactacagagctgacatgaaaacccttgaggcattcaccaactggcttcaacagaaaaggagctga

SEQ ID NO: 24585 - protein, 382 aa, Phaseolus vulgaris
MAIDCMTNIQTMSQPQKHHHQDNKEDEAPLVFDASLLRHQLNLPKQFIWPDDEKPCMNVPELVVPLIDLRGFLSGDPVATMEAARMVGEACQKHGFFLVVNHGIDANLISHAHSYMDDFFEVPLTQKQRAQRKTGEHCGYASSFTGRFSSKLPWKETLSFQFSAEEKSSTIVKDYLCNTLGQEFEQFGRVYQDYCDAMSNLSLGIMELLGMSLGVGKACFREFFEENDSIMRLNYYPPCQKPDLTLGTGPHCDPTSLTILHQDQVGGLQVFVDNEWHSINPNFNAFVVNIGDTFMALSNGRYKSCLHRAVVNSKTTRKSLAFFLCPKGDKVVSPPSELVDDLTPRLYPDFTWPMLLEFTQKHYRADMKTLEAFTNWLQQKRS

SEQ ID NO: 24586 - DNA, 1158 bp, Phaseolus vulgaris
  CDS (1)..(1158)
atggcaatagacatgcaccccatccccatcatgcctcaaccatccaaccaagaaatcaaagaacaagatcaacaccctcttgtctttgatgcctcactcctcagacaccaacttcacataccctctcagttcgtttggcctgatgaggagaaagcatgcttgaatgagcctgagttaccagttccattcattgacttgggaggcttcctctccggtgaccctcttgctgcaacggaagcctcccgacttgttggtgaggcatgccaaaagcatggcttctttctggttgtcaaccatgggattcagcagcagttgatatctgatgctcacctttacatggaccacttctttgcccttcccctgtctcacaaacagagggctcagaggatgccaggggagcactgcggctatgctagcagcttcactggcaggttctcctctaagctaccttggaaagagaccctttccttccagtactcaccacgcaatgactcacaaacccttgtcaaggactacttatgcgataaaatgggcaaagagtttgagaaattcgggaatgtttaccaggactactgtgaagccatgagcaatctttctttaggtataatggagcttctaggactgagccttggagttggtagaggttatttcagggagttctttgaagagaataactcgataatgaggctgaattactaccctccgtgtcaaaaaccagacctcactttaggcactggacctcattgcgatccaacatctttgaccattcttcaccaagaccaagtgggaggcctgcaagtttgtgttgacaatgagtggcattccatcaaacccgatgtcaatgcttttgttgtcaatgttggtgataccttcatggctctttcaaatgggagatacaagagctgcttgcacagggcagtggtgaacagcgagacaacaagaaaatctcttgctttctttttgtgtccaagaagtgacaaggtggtgagtccaccatgtgaattagtggacaaactgagcccaaggctgtacccagattttacatggcccatgcttcttgagttcactcaaaagcattacagagctgacatgaaaacccttgaggcatttaccaactggcttcaacgcagatcaaacttcgacaaccacatcatgtga

SEQ ID NO: 24587 - protein, 385 aa, Phaseolus vulgaris
MAIDMHPIPIMPQPSNQEIKEQDQHPLVFDASLLRHQLHIPSQFVWPDEEKACLNEPELPVPFIDLGGFLSGDPLAATEASRLVGEACQKHGFFLVVNHGIQQQLISDAHLYMDHFFALPLSHKQRAQRMPGEHCGYASSFTGRFSSKLPWKETLSFQYSPRNDSQTLVKDYLCDKMGKEFEKFGNVYQDYCEAMSNLSLGIMELLGLSLGVGRGYFREFFEENNSIMRLNYYPPCQKPDLTLGTGPHCDPTSLTILHQDQVGGLQVCVDNEWHSIKPDVNAFVVNVGDTFMALSNGRYKSCLHRAVVNSETTRKSLAFFLCPRSDKVVSPPCELVDKLSPRLYPDFTWPMLLEFTQKHYRADMKTLEAFTNWLQRRSNFDNHIM

SEQ ID NO: 24588 - DNA, 1113 bp, Phaseolus vulgaris
  CDS (1)..(1113)
atgttgatccctcatccatcaatgctacttgcatcacaaaacaccaacatggaaccacaacaaatcaacttacaggctcctactccaaaccagtcaaacataccctctgagttcgtctggcctgataatgagaaaccatgccttgaaccaccaaaactcaaaattccacccattgacatgaagggctttctctctggagacccagaaactgtgtcagccatttgtgctgaagtgaacgcggcatgcaggaagcatggcttctttcttgttgtcaaccatggtgttgacaagaagctcgtagagaaagctcataagctcatagacactttcttctgcatggaactgccagagaagcagaagcttcagagaaaacttggagaacattgtggctatgctaatagctttattggaaggttctcctccaaacttccttggaaggaaacactttctttccattacgcccctgataccaaaactgttgaggactatttcctaaattctatgggggaagagttcagggaatttgggagtttctttcaagaatactgtgaagtgatgagcaatctgtctcttgagatcatggagctgctgggaatgagcctaggagtgagcagggaatgtttcagggatttcttcaaaaacaatgagtctgttatgaggttgaattactacccaccatgccataaacctgagttagctttaggaactggacctcattgtgaccccacttccctaaccgttctccaccaagatcaagtcgagggcctccaagtgtttgtcgatggaaaatggtgctctgtcgccccaaaagaagatgctttcgttgtcaacattggcgacacatttatggctctttccaatgggatattcaagagttgcttacatagagcagttgtgaacaaccaaattgtgagaaaatctcttgctttcttcctatgtccaaataaagacaaagtggtcagtgctccaaaggaactaattaccgtggagaatccaaagaaatatccagatttcacatggccaaatcttcttgagttcacacagttacattacaggtctgaccctgaaacacttgatgccttcgccaactgggtactagagaagaacaagtga

SEQ ID NO: 24589 - protein, 370 aa, Phaseolus vulgaris
MLIPHPSMLLASQNTNMEPQQINLQAPTPNQSNIPSEFVWPDNEKPCLEPPKLKIPPIDMKGFLSGDPETVSAICAEVNAACRKHGFFLVVNHGVDKKLVEKAHKLIDTFFCMELPEKQKLQRKLGEHCGYANSFIGRFSSKLPWKETLSFHYAPDTKTVEDYFLNSMGEEFREFGSFFQEYCEVMSNLSLEIMELLGMSLGVSRECFRDFFKNNESVMRLNYYPPCHKPELALGTGPHCDPTSLTVLHQDQVEGLQVFVDGKWCSVAPKEDAFVVNIGDTFMALSNGIFKSCLHRAVVNNQIVRKSLAFFLCPNKDKVVSAPKELITVENPKKYPDFTWPNLLEFTQLHYRSDPETLDAFANWVLEKNK

SEQ ID NO: 24590 - DNA, 1161 bp, Cucurbita maxima
  CDS (1)..(1161)
atggctttgaacggcaaggtggcaaccgaatccgctccctcaaacttgaatgaggagatgaaaggggagtaccgtccgccatttgggggctccgacgagtcaaaggtgccggaggatttcatttggtcggaaaagtttgaggcatccgagctgctgccggtgctggatgttccaactattgacttggaaaagtttatgagtggcgacaaaagttatgtggaagaggcgacaaggctggtggatgaggcttgtagacaacatggcatattttttgtggtgaaccatggagtggacatagaaatgatgggccgtgttcatgactgtatgaatgagttctttacaatgcctttggatgtgaagcagagggctaagaggaaggtaggtgagagttatggatataccaatagcttctttgggagattcgcgtccaatcttccatggaaggaaaccttttcccttcgctgtgtggctgctcagaactcctccgcggctcatgactatgttcttgacactttaggctcatcattctcccatcatgggaaggcgtatcaagagtgtgggatagcattgaacgagcttggtacgaagattgtggagcttttggggcttagccttggcatttcaagagaatacttcaagaatttctacaaggacaacgattcaatattgaggcttaattactacccaacatgcgacaagccagaggttgtgttgggaactggccctcacactgatcccacctccgtcacaatccttcaccaagaccctgtcagtggccttcaagtgtgctccaatgatcaatggtattcaattcctccaaacccagaagcctttgtcatcaacatcggtgacactttcacgtctctcacgaatgggatttacaagggctgcatacaccgcgctgtcgtgaattccatgaatgcaagaaaatcattggccttctttctgtgtccatcgcatgacaaagtggtgagagcaccggaggaattggtggagaagagtccaccacgaaagtatccagattataaatggccaatgttgcttgaaatgacccaaaagcgttaccgccctgcttgcaacactttggaagccttcaaaacttgggttcaagagggaaaggcgttggacactgggtccactattaccgccccgtctgcttaa

SEQ ID NO: 24591 - protein, 386 aa, Cucurbita maxima
MALNGKVATESAPSNLNEEMKGEYRPPFGGSDESKVPEDFIWSEKFEASELLPVLDVPTIDLEKFMSGDKSYVEEATRLVDEACRQHGIFFVVNHGVDIEMMGRVHDCMNEFFTMPLDVKQRAKRKVGESYGYTNSFFGRFASNLPWKETFSLRCVAAQNSSAAHDYVLDTLGSSFSHHGKAYQECGIALNELGTKIVELLGLSLGISREYFKNFYKDNDSILRLNYYPTCDKPEVVLGTGPHTDPTSVTILHQDPVSGLQVCSNDQWYSIPPNPEAFVINIGDTFTSLTNGIYKGCIHRAVVNSMNARKSLAFFLCPSHDKVVRAPEELVEKSPPRKYPDYKWPMLLEMTQKRYRPACNTLEAFKTWVQEGKALDTGSTITAPSA

SEQ ID NO: 24592 - DNA, 999 bp, Arabidopsis thaliana
  CDS (1)..(999)
atgtctgaacttcattcttctctgcagcttcctgtgttagacttaacacaaccaattgagtcctctatactgtcttctctctctgaggcttgtaaagagtggggattcttctatgtcaccaatcatggaatctctaaagagatgttcagcaaaatttgttccttgtccagagatgttttcaaagctcctcttgaatcaaagctcaagcttggtcccatttcatatactcctcggtacatcgcctctccttatttcgaaagccttgttgtctctggacctgatttctctgattctgccaaagcttcagcagatgttttgttccaagatcatcataaaccagagttaaggttgtcattacaacacaaatcagtagaaacaatgcaagaatacggagctaaaatggcagaattgtccaaaagactcataaagattctcttgatgatgactttaggagatgaaaccggaaagagactctaccaaactgactttagcaactgtcatggatacttaaggctagtgaactacacacctccacacgacgtggagaagcaagaagagctcgttgaaggtctcgggatgcacactgatatgagctgcataacaatagtctatcaagattccgttggtgggcttcagatgaggtctaaagaagggaaatggatcgatataaacccgtgcaacgatttccttgttgttaatattggagaccttatgcaagcatggagtaatggacggctgagatcatctgaacatcgagttgtattgagaaagttggtgaacagagtctctctggcgttttttctctgttttgaggatgagaaagtgatacttgcacctcaagaaattgtgggtgagggaaaacaaagaagctacaagtcgtttaagtgttcggagtacctgaagttcagacagagcaatgaagaagggaagtttgagaagattggtttcactgtcaaagactttgctggactaaagctggctcaaccagatgatccttag

SEQ ID NO: 24593 - protein, 332 aa, Arabidopsis thaliana
MSELHSSLQLPVLDLTQPIESSILSSLSEACKEWGFFYVTNHGISKEMFSKICSLSRDVFKAPLESKLKLGPISYTPRYIASPYFESLVVSGPDFSDSAKASADVLFQDHHKPELRLSLQHKSVETMQEYGAKMAELSKRLIKILLMMTLGDETGKRLYQTDFSNCHGYLRLVNYTPPHDVEKQEELVEGLGMHTDMSCITIVYQDSVGGLQMRSKEGKWIDINPCNDFLVVNIGDLMQAWSNGRLRSSEHRVVLRKLVNRVSLAFFLCFEDEKVILAPQEIVGEGKQRSYKSFKCSEYLKFRQSNEEGKFEKIGFTVKDFAGLKLAQPDDP

SEQ ID NO: 24594 - DNA, 1140 bp, Nicotiana tabacum
  CDS (1)..(1140)
atggcaattgattgtatgatcacgaatgtgaattcacccatgctacggatattagaagatgacaaaaagccattgatttttgatgcatctcagatgaaacgcgagtacaacattccaacacaattcatatggccagacgacgagaagcctcgtgctgtagcacgagaacttccggttccacttatcgacttaggaggtttcctttctggagaccccgtcgcggcccaacaagcatctagacttgttggtgaagcatgccgtaatcatggtttctttcttgtagttaaccacggagttaacgctaatctcatctccaacgcccatcgttacatggacatgttttttgacttgccactttctgaaaagcaaaaggctcagaggaaacttgaagagcattgtggttatgccagtagctttactggaaggttttcctctaagctaccttggaaagagacactctcttttcgatactccgctgaagaagactcatctcacatagttgaagaatacttccaaaatacaatgggtgaaagttttagccatcttgggaatgtttatcaagaatattgcaattcaatgagcacactttctctagggataatggaacttttgggaatgagcctaggcgtagggagggaacacttcaaagagttttttgaagaaaatgaatccataatgagactcaactattatccaccatgccagaaaccagacctcactttagggacagggccacattgtgatccaacatcattaacaattctacatcaagatagtgttggcgggcttcaagtttttgtggacaacgaatggcgctccgtcagtccaaatttcaacgctttcgtggttaacataggcgatacatttatggctctttcaaatggaagatacaaaagttgcttgcacagagcagtggtaaacaacaaaactcctaggaaatcacttgctttctttcttgtcccaaagaaggataaggtagtgagcccaccaaatgaattggtggacaccaacaaccctagaatatatcccgacttcacatggcctactctccttgagtttacacagaagcattacagagctgatatgaacactcttcaaactttctcaaattggcttaaacagaaaactgcacaagtttaa

SEQ ID NO: 24595 - protein, 379 aa, Nicotiana tabacum
MAIDCMITNVNSPMLRILEDDKKPLIFDASQMKREYNIPTQFIWPDDEKPRAVARELPVPLIDLGGFLSGDPVAAQQASRLVGEACRNHGFFLVVNHGVNANLISNAHRYMDMFFDLPLSEKQKAQRKLEEHCGYASSFTGRFSSKLPWKETLSFRYSAEEDSSHIVEEYFQNTMGESFSHLGNVYQEYCNSMSTLSLGIMELLGMSLGVGREHFKEFFEENESIMRLNYYPPCQKPDLTLGTGPHCDPTSLTILHQDSVGGLQVFVDNEWRSVSPNFNAFVVNIGDTFMALSNGRYKSCLHRAVVNNKTPRKSLAFFLVPKKDKVVSPPNELVDTNNPRIYPDFTWPTLLEFTQKHYRADMNTLQTFSNWLKQKTAQV

SEQ ID NO: 24596 - DNA, 1140 bp, Nicotiana tabacum
  CDS (1)..(1140)
atggcaattgattgtatgatcacgaatgtgaaatcaccaattctgcggatattagaagatgagaaaaaaccattgatttttgatgcatctcagatgaaacgcgagtacaacattccaacacaattcgtatggccagacgacgagaagcctcgtgctgtagcacgagaacttccggttccacttatcgacttaggaggtttcctttctggagaccccgtcgcggcccaacaagcatctagacttgttggtgaagcatgccgtaatcatggtttctttcttgtagttaaccacggagttaacgctaatctcatctccaacgcccatcgttacatggacatgttttttgacttgccactttctgaaaagcaaaaggctcagaggaaacttgaagagcattgtggttatgccagtagctttactggaaggttttcctctaagctaccttggaaagagacactctcttttcgatactccgctgaagaagactcatctcacatagttgaagaatacttccaaaatacaatgggtgaaagttttagccatcttgggaatgtttatcaagaatattgcaattcaatgagcacactttctctagggataatggaacttttgggaatgagcctaggcgtagggagggaacacttcaaagagttttttgaagaaaatgaatccataatgagactcaactattatccaccatgccagaaaccagacctcactttagggacagggccacattgtgatccaacatcattaacaattctacatcaagatagtgttggcgggcttcaagtttttgtggacaacgaatggcgctccatcagtccaaatttcaacgctttcgtggttaacataggcgatacatttatggctctttcaaatggaagatacaaaagttgcttgcacagagcagtggtaaacaacaaaactcctaggaaatcacttgctttctttctttgtccaaagaaggataaggtagtgagcccaccaactgaattggtggacaccaacaaccctagaatatatcccgacttcacatggcctactctccttgagtttacacagaagcattacagagctgatatgaacactcttcaaactttctcaaattggcttcaacagaaaactgcacaagtttaa

SEQ ID NO: 24597 - protein, 379 aa, Nicotiana tabacum
MAIDCMITNVKSPILRILEDEKKPLIFDASQMKREYNIPTQFVWPDDEKPRAVARELPVPLIDLGGFLSGDPVAAQQASRLVGEACRNHGFFLVVNHGVNANLISNAHRYMDMFFDLPLSEKQKAQRKLEEHCGYASSFTGRFSSKLPWKETLSFRYSAEEDSSHIVEEYFQNTMGESFSHLGNVYQEYCNSMSTLSLGIMELLGMSLGVGREHFKEFFEENESIMRLNYYPPCQKPDLTLGTGPHCDPTSLTILHQDSVGGLQVFVDNEWRSISPNFNAFVVNIGDTFMALSNGRYKSCLHRAVVNNKTPRKSLAFFLCPKKDKVVSPPTELVDTNNPRIYPDFTWPTLLEFTQKHYRADMNTLQTFSNWLQQKTAQV

SEQ ID NO: 24598 - DNA, 1104 bp, Nicotiana tabacum
  CDS (1)..(1104)
atgcatgatgaaacacaaaatgaaaaaacaacatctcttgtctttgatgcacttttccttcaaaacaattcaaacattcctcagcaattcatatggccggaaggcgaaaggccatgccctgagccaccacctccattacatgtccctccaattgacttgaatgactacctctccggcgaccccctcgccgtctccaacgcaactcgccttgtcaatcaggcatgtcgaaagcatggtttcttcctcgtcgttaaccatggtatagattcgaagctcatcaatgaagctcataagaatatggattttttctttgaaaaacctcttgtggagaaggaaagagccaagagaaagcttggtgattattgtggttatgctagtagctttactagtaggttttcttgcaatcttccttggaaagaaacactttcttttcgatattctgctgaggttccttcttcacagcatatagtccaaagctacatcttgaatgtcatgggccaagattacactcattttgggaatgtgtaccaaaaatactgtgaagaaatgagcaagctttcccttaaggtaatggagcttttaggggagagtcttggagttggaagagcatattttagagaattttttgaagggaatgattcaataatgagactgaactattacccgccttgcaaaaaacctgatttgactctagggacaggacctacttgtgatcctacatctttaaccatccttcatcaagataatgttggtggcctcgaagtctttgtggatgaaaaatggtactctattcctcccaatactaatgcttttgtggtcaacattggtgataccttcatggttatgtcaaatgggacatacaagagttgcttgcatagagcagtagtaaacagtagaaaaccaaggaagtctttggcatttttcctatgtccaaagaaggacaagatagtaagcccaccaaaagagttgattactaggaatgtaccaaggaagttccctgatttcacatggccggtttttcttgaattcactcagaaacattacagagctgacaaaaaaactcttgatgcttttgtgcattggcttcttcacaaaggctactag

SEQ ID NO: 24599 - protein, 367 aa, Nicotiana tabacum
MHDETQNEKTTSLVFDALFLQNNSNIPQQFIWPEGERPCPEPPPPLHVPPIDLNDYLSGDPLAVSNATRLVNQACRKHGFFLVVNHGIDSKLINEAHKNMDFFFEKPLVEKERAKRKLGDYCGYASSFTSRFSCNLPWKETLSFRYSAEVPSSQHIVQSYILNVMGQDYTHFGNVYQKYCEEMSKLSLKVMELLGESLGVGRAYFREFFEGNDSIMRLNYYPPCKKPDLTLGTGPTCDPTSLTILHQDNVGGLEVFVDEKWYSIPPNTNAFVVNIGDTFMVMSNGTYKSCLHRAVVNSRKPRKSLAFFLCPKKDKIVSPPKELITRNVPRKFPDFTWPVFLEFTQKHYRADKKTLDAFVHWLLHKGY

SEQ ID NO: 24600 - DNA, 1143 bp, Pisum sativum
  CDS (1)..(1143)
atggctatagaatgcataacaagtagtgcaaaactcatgactcaaaagagtgataaaaatgaaaatgaagaatcatcaaaattagtttttgatgcttcatttctaaaaaaccaactcaaccttccaaaacgattcatttggccagatgatgaaaagccatgcatgaatgtgccggaacttgatgttccactcattgatttcaaaaacttcctttctggtgacccttttgcggcaatggaagcttctaaaaccattggtgaagcatgtgagaaacatgggttttttcttgtggttaatcatggaattgatacaaagttaattgaacatgctcatagttacatgaatgatttctttgaggttcccctgtctcagaaacagaggtgtcagagaaaaacaggggaacattgtggttatgctagtagtttcactgggagattctcctcaaatcttccatggaaagaaactctttcttttcaattttcagatgagaaaaacccttcacatattgttaaagattacctttccaacacattaggggaagattttcaacaatttggggaggtttaccaagaatattgtgaagcaatgagcaaactttcactagggataatggagctacttggaatgagtcttggagttgggaaagaatgttttagagatttttttgaagagaataaatcaattatgagacttaattattaccctccatgtcaaaaacctgatctcactttaggaactggccctcattgtgatccaacatctttaactattcttcaccaagatcaagttggtggcttgcaagtttttgttgataatgagtggcattccattaggccaaatttcaatgcttttgttgtcaatattggtgacaccttcatggctctttcaaacgggagatacaagagttgtttacatagggcagtggtgaacaacaagacaacaagaaaatctctagctttctttttgtgtccaaaaggtgataaagtggttagcccaccaagtgaattggtgaatgatttgacaccaaggatctatccagattttacatggccaatgcttcttgagtttactcaaaaacattatagagctgatatgaggacacttgaggcatttacaaaatggattcaacaaaaacaaaactag

SEQ ID NO: 24601 - protein, 380 aa, Pisum sativum
MAIECITSSAKLMTQKSDKNENEESSKLVFDASFLKNQLNLPKRFIWPDDEKPCMNVPELDVPLIDFKNFLSGDPFAAMEASKTIGEACEKHGFFLVVNHGIDTKLIEHAHSYMNDFFEVPLSQKQRCQRKTGEHCGYASSFTGRFSSNLPWKETLSFQFSDEKNPSHIVKDYLSNTLGEDFQQFGEVYQEYCEAMSKLSLGIMELLGMSLGVGKECFRDFFEENKSIMRLNYYPPCQKPDLTLGTGPHCDPTSLTILHQDQVGGLQVFVDNEWHSIRPNFNAFVVNIGDTFMALSNGRYKSCLHRAVVNNKTTRKSLAFFLCPKGDKVVSPPSELVNDLTPRIYPDFTWPMLLEFTQKHYRADMRTLEAFTKWIQQKQN

SEQ ID NO: 24602 - DNA, 1104 bp, Beta vulgaris
  CDS (1)..(1104)
atgcaagcacttcttacagttccaacccctgttccagaatttaatacatcaattcttaaacatgaacataacataccaacccaatttatatggccagatgatgaaaagccaggctctcaaactcctccagagcttcaagttcctcccattgatctaggtgggtttctctctggagacccagttgcagtatctaattctactagacttgccaatgaagcatgcaagaagcatggattcttcttggttttcaatcatggcgtcgattcgaagctcttagcgaaagctcatgaagccatggacgtcttcttcgaacagccgttttctcagaaacagagagctctgagaaaacagggtgatcattgtggttatgctagtagttttgttggtagatttgccacaaaactcccatggaaagagacactttcctttccatattctgctgatcataagtcctcaaatatggttgaagattatttcttcaacaaaatggggagtgagtttcaagaatttgggaaggtatatcaagaatattgtaaggctatgagcaacttgtctcttgggatcatggagctcttgggaatgagtttaggagttgaaagaagccatttcagagatttttttgaagaaaatgagtcaatcatgagattaaactattacccaccatgtctaaaacctgatttaactcttggcacagggcctcattgtgatcccacatcactcactattcttcatcaggatcatgtaggaggccttgaagtgttcgtagaccaaaaatggtactccatccgtcccaattccgaagcatttgtcgtcaacattggtgataccttcatggctttgtcaaatggaatatacaagagttgcctacacagggcagtggtaaatagtgaaacaccaagaaaatcactagcattctttttatgtccaaggggagacaaagtgattagcccaccaaatgaattgatggaagacttgaagtctctaagggtatatccggactttacatggcaactttttctagaatttacacaaaaacattatagggcagacatgaaaactctagatacttttacaaagtggcttcaaaacagaagagagcaataa

SEQ ID NO: 24603 - protein, 367 aa, Beta vulgaris
MQALLTVPTPVPEFNTSILKHEHNIPTQFIWPDDEKPGSQTPPELQVPPIDLGGFLSGDPVAVSNSTRLANEACKKHGFFLVFNHGVDSKLLAKAHEAMDVFFEQPFSQKQRALRKQGDHCGYASSFVGRFATKLPWKETLSFPYSADHKSSNMVEDYFFNKMGSEFQEFGKVYQEYCKAMSNLSLGIMELLGMSLGVERSHFRDFFEENESIMRLNYYPPCLKPDLTLGTGPHCDPTSLTILHQDHVGGLEVFVDQKWYSIRPNSEAFVVNIGDTFMALSNGIYKSCLHRAVVNSETPRKSLAFFLCPRGDKVISPPNELMEDLKSLRVYPDFTWQLFLEFTQKHYRADMKTLDTFTKWLQNRREQ

SEQ ID NO: 24604 - DNA, 1116 bp, Zea mays
  CDS (1)..(1116)
atggtgctggctgcgcacgatccccctccccttgtgttcgacgctgcccgcctgagcggcctctccgacatcccgcagcagttcatctggccggcggacgagagccccaccccggactccgccgaggagctggccgtgccgctcatcgacctctccggggacgccgccgaggtggtccggcaggtccggcgcgcctgcgacctgcacggcttcttccaggtggtggggcacggcatcgacgcggcgctgacggcggaggcccaccgctgcatggacgccttcttcacgctgccgctcccggacaagcagcgcgcgcagcgccgccagggggacagctgcggctacgccagcagcttcacgggccggttcgcgtccaagctgccctggaaggagacgctgtcgttccgctacaccgacgacgacgacggcgacaagtccaaggacgtcgtggcgtcctacttcgtggacaagctgggcgaggggtaccggcaccacggggaggtgtacgggcgctactgctctgagatgagccgtctgtcgctggagctcatggaggtgctaggcgagagcctgggcgtgggccgccgccacttccgccgcttcttccaggggaacgactccatcatgcgcctcaactactacccgccgtgccagcggccctacgacacgctgggcacggggccgcattgcgaccccacgtcgctcaccatcctgcaccaggacgacgtgggcggactccaggtgttcgacgccgccacgctcgcgtggcgctccgtcaggccccgcccgggcgccttcgtcgtcaacatcggcgacaccttcatggcgctctccaacgggcgctacaggagctgcctccaccgcgccgtcgtcaacagccgggtggcacgccgctcgctcgccttcttcctgtgcccggagatggacaaggtggtcaggccgcccaaggagctggtggacgacgccaacccgagggcgtacccggacttcacgtggaggacgctgctggacttcaccatgaggcactacaggtcggacatgaggacgctcgaggccttctccaactggctcagcacccgtagcaatggcggacagcacctgctggagaagaagtag

SEQ ID NO: 24605 - protein, 371 aa, Zea mays
MVLAAHDPPPLVFDAARLSGLSDIPQQFIWPADESPTPDSAEELAVPLIDLSGDAAEVVRQVRRACDLHGFFQVVGHGIDAALTAEAHRCMDAFFTLPLPDKQRAQRRQGDSCGYASSFTGRFASKLPWKETLSFRYTDDDDGDKSKDVVASYFVDKLGEGYRHHGEVYGRYCSEMSRLSLELMEVLGESLGVGRRHFRRFFQGNDSIMRLNYYPPCQRPYDTLGTGPHCDPTSLTILHQDDVGGLQVFDAATLAWRSVRPRPGAFVVNIGDTFMALSNGRYRSCLHRAVVNSRVARRSLAFFLCPEMDKVVRPPKELVDDANPRAYPDFTWRTLLDFTMRHYRSDMRTLEAFSNWLSTRSNGGQHLLEKK

SEQ ID NO: 24606 - DNA, 1200 bp, Rumex palustris
  CDS (1)..(1200)
atggccatagaatgcatgcacaagactgatcatgaggtcaaacaaggaagagagcctctctccttagtgttcgactccaaaatccttcggaatcaagccagcataccgaaggaattcatctggcccgacgatgaaaagcctgaccacgaagccgctgagctggaagtacccgtcatcgacatggaaggattctgtagagaggaaacaaaatcaaccaacaatgcttcgaagttggttcaagaagccttcatgaagcacgggttcttcctagtcaagaaccacggcgttgaggcagagctgataaagcacacgcacaagtacatgagagagttctttgaacttccgttggtggagaagcaaagagttcaaaggaagcttggtgagcattgtggttatgctagtagcttcactacaaggttctcatgtaagctcccatggaaagagacactttccttcccatactctcctgaagaagctaacaacaccaaagttgttgaggagtattttaatagcaaaatgactaaagattttgctcatatgggaaagctctaccaagagtattgtgaagccatgaacaaactctccctaagaataatggagcttctaggattaagccttggagtcggaaggcaatacttccgagactatttccaaggcaacgactcggtgatgcggctcaactactaccctccatgccaagagcccgagctcgccctcggaaccgggccccactgcgaccccacctcccttaccatactccaccaggatcatgttaacggccttcaagtgtttgtcgatggcgagtggcgtttcatctatccacgatttgacacctttgtcgttaacattggcgacaccttcatggcgttgtcgaatggaaagtacaagagctgtcttcacagggcggtagtgaacgacacgagtccaaggaagtctttggccttctttttgtgcccaaaggaagacctaattgtgtgtcctccaaacgagttggtcaacgagtcaagcccacgggtttacccggatttcacgtggcccattttcctcgagttcactcagaaacactatagagctgatatgaacacccttctaaacttctctaggtgggtccgggagaggaatcaagtgcaacaatccgacgggtcttcatctgtctgtccatccatccatctgtcttgttgtaacgtacaaattaagtga

SEQ ID NO: 24607 - protein, 399 aa, Rumex palustris
MAIECMHKTDHEVKQGREPLSLVFDSKILRNQASIPKEFIWPDDEKPDHEAAELEVPVIDMEGFCREETKSTNNASKLVQEAFMKHGFFLVKNHGVEAELIKHTHKYMREFFELPLVEKQRVQRKLGEHCGYASSFTTRFSCKLPWKETLSFPYSPEEANNTKVVEEYFNSKMTKDFAHMGKLYQEYCEAMNKLSLRIMELLGLSLGVGRQYFRDYFQGNDSVMRLNYYPPCQEPELALGTGPHCDPTSLTILHQDHVNGLQVFVDGEWRFIYPRFDTFVVNIGDTFMALSNGKYKSCLHRAVVNDTSPRKSLAFFLCPKEDLIVCPPNELVNESSPRVYPDFTWPIFLEFTQKHYRADMNTLLNFSRWVRERNQVQQSDGSSSVCPSIHLSCCNVQIK

SEQ ID NO: 24608 - DNA, 1149 bp, Vitis vinifera
  CDS (1)..(1149)
atgtctatagtttgtgtcgaaggtaacccaccatccatgtttaatccgcctacagacgaccacaaaaaccaggaaccactagtgtttgatgcctcggttcttcggcaccaatccaacattcccaagcagttcatatggccggatgcagaaaagccaggggacaaggccacagagctgtctgttccactcatagacttgggaggcttcctctctggagaccctgctgcagccatggaagcaactaggcttgtgagggaggcatgccagaagcatggcttcttccttgttgttaaccatggggttgatgataaactcatatacaaagctcaccagtacatggacagcttctttgggttgcctttggccaagaagcaaagggctcagaggaagctgggtgagcactgtggatatgccagcagcttcattggcaggttctcttccaagctgccatggaaagagaccctttctttcagctattcagctgagaagaagtcatccaatgctgtgcaggagtatttcctcaacaaaatgggtgaagatttcagtgaattcgggcaagtgtaccaggactactgtgaggccatgagcacgctttcccttgtgattatggagctgctggggatgagcctgggtataggcggagcccatttcagggaatttttcgaggaaaacgattcgataatgagactcaactactaccccccatgcctaaaacccgacctcactttaggaacagggcctcattgtgatccaacatctttaaccatccttcatcaggaccaagtgggtggccttcaagtgtttgtagatgacaaatggtggtccattagcccaaatttcgatgcctttgttgttaacatcggcgacaccttcatggctctttcaaatggaaggtacaagagctgcttacatagggcagtggtaaacagccaaactccaagaaaatctcttgctttctttttgtgtccagagaaagataaggtggtgaggccaccaactgaactggtggacaccaacagccctagaatatatccggatttcacttggtccaatctcctcgaattcacccagaagcattacagggctgacatgaaaacacttgaggttttctctagctggcttcaacagaaaacagctgaagcggggtaa

SEQ ID NO: 24609 - protein, 382 aa, Vitis vinifera
MSIVCVEGNPPSMFNPPTDDHKNQEPLVFDASVLRHQSNIPKQFIWPDAEKPGDKATELSVPLIDLGGFLSGDPAAAMEATRLVREACQKHGFFLVVNHGVDDKLIYKAHQYMDSFFGLPLAKKQRAQRKLGEHCGYASSFIGRFSSKLPWKETLSFSYSAEKKSSNAVQEYFLNKMGEDFSEFGQVYQDYCEAMSTLSLVIMELLGMSLGIGGAHFREFFEENDSIMRLNYYPPCLKPDLTLGTGPHCDPTSLTILHQDQVGGLQVFVDDKWWSISPNFDAFVVNIGDTFMALSNGRYKSCLHRAVVNSQTPRKSLAFFLCPEKDKVVRPPTELVDTNSPRIYPDFTWSNLLEFTQKHYRADMKTLEVFSSWLQQKTAEAG

SEQ ID NO: 24610 - DNA, 1077 bp, Fragaria ananassa
  CDS (1)..(1077)
atgcctgtaagaatctccgaagcctttccatcccacccccataaacactaccctgcagacttcaactcactacacgagttaccagactcatatgcatggactaatcaactcgacgagtgcccatctctggactcgtcattcggctctgatctgtgtgttccggtcatcgatctaaatgaccaaaatgtcattaaactcataggacatgcatgtaaaacatggggtgtgttccaagtcacaaaccatggagtcccacagaagcttgttcatgatattgaatcaacttgtcgaagcctcttctctctgccagtccagcagaagctcaaagccgctcgaccggccgacggaatttctggttatggaatccatcggatatcttcgtttttccaaaaactcatgtggtccgagggcttcacccttgttggctcaccccttgaacattttcgacaactctggccccaagattacaacaaattctgttgtatggtagaagaatacgagacagagatgaagaagctagcagggaggctgatgtggctaatatttggatcattgggaatatccaaggaagacgtcagttgggccggcccaaaaggtgactttgaagacgcatccaatgctctacaattgaattcctacccggcttgtccggatcctagtcgggccatgggtctggccgagcacaccgactcaaccctcctcacaatcatccaccaatccaacataagtggcctgcaagttcttcgtgaaggcgccgggtggctcactgttccgcctgtcgccggagctttggtgatcaacatcggcgatctcattcatatcttgtccaacggggagtaccagaatgtgtttcaccgggcaatagtcaaccgaagtcaacaacgtttatcagtggcttacttatatgggccaccgattaacgttcaaatctcgcctcattcaaaattggtcaccccaagtcacccttctctttaccgcccggtcacttggaaagagtaccttggtatcgaaggaaaactctacaacaaggcactttcatccattaagtttcatgatcatcaaaatgatcaaatgtag

SEQ ID NO: 24611 - protein, 358 aa, Fragaria ananassa
MPVRISEAFPSHPHKHYPADFNSLHELPDSYAWTNQLDECPSLDSSFGSDLCVPVIDLNDQNVIKLIGHACKTWGVFQVTNHGVPQKLVHDIESTCRSLFSLPVQQKLKAARPADGISGYGIHRISSFFQKLMWSEGFTLVGSPLEHFRQLWPQDYNKFCCMVEEYETEMKKLAGRLMWLIFGSLGISKEDVSWAGPKGDFEDASNALQLNSYPACPDPSRAMGLAEHTDSTLLTIIHQSNISGLQVLREGAGWLTVPPVAGALVINIGDLIHILSNGEYQNVFHRAIVNRSQQRLSVAYLYGPPINVQISPHSKLVTPSHPSLYRPVTWKEYLGIEGKLYNKALSSIKFHDHQNDQM

SEQ ID NO: 24612 - DNA, 1122 bp, Fragaria ananassa
  CDS (1)..(1122)
atggcagttgggtgtatgaaaaccctaagccaccacaaagaagatgaccaaaagccactagtctttgacgcttctttgctccggtacgaaactgacatacccaaacagttcatttggcccgatgatgagaagccatgtcctaacacacgagaactacaagttccactcatagacttgggtgacttcctctccggcaaccctgaggccgcaatgaaagcctcgaggctcgtcggagaagcctgcgaaaagcatggcttctttctcgtcgtgaatcaccgcgttaaagagagcctcatagctgatgcacaccaatacatggacgagttctttggtttgcccctctctgaaaaacagaggactcagaggaaagccggcgagcactgcggctacgccagtagcttcaccggaaggttctcgtcgaaactcccctggaaagaaacgctgtcgtttagctacaccgcggatcaaagctcctccaatgttgttaaggattacctctgcaatgccatgggagaagagttcgatgaattcgggagggtgtaccaagattacagtgaggccatgagcacactgtccatagggatcatggagcttctgggaatgagcctcggcgtgggcagaacacatttcaaagagtttttcggagacaatgattcgataatgaggttgaattactacccgccatgccagaaaccagaccagactttaggcacaggacctcattgtgatccgacttctttaaccattctccaccaagaccaagttgggggacctgaagtgtttgtggacgaagaatggcgctcgatcagcccgaatttaaacgcctttgttgtcaacattggtgacgccttcatggctctttcaaacgggaggtacaagagttgcttgcacagagcagtagtgaacagcaaaaccccaaggaaatcactagcatttttcttgtgtccaaaagatgataaggtggtgaagccaccgagggagttgattgatagttcgtacccgagaatatatccggatttcacatggccgatgttgctagagttcacacagaagcattacagagctgacatgaagaccctgcaagccttcacgaactggcttcaagaacagaggagcagctga

SEQ ID NO: 24613 - protein, 373 aa, Fragaria ananassa
MAVGCMKTLSHHKEDDQKPLVFDASLLRYETDIPKQFIWPDDEKPCPNTRELQVPLIDLGDFLSGNPEAAMKASRLVGEACEKHGFFLVVNHRVKESLIADAHQYMDEFFGLPLSEKQRTQRKAGEHCGYASSFTGRFSSKLPWKETLSFSYTADQSSSNVVKDYLCNAMGEEFDEFGRVYQDYSEAMSTLSIGIMELLGMSLGVGRTHFKEFFGDNDSIMRLNYYPPCQKPDQTLGTGPHCDPTSLTILHQDQVGGPEVFVDEEWRSISPNLNAFVVNIGDAFMALSNGRYKSCLHRAVVNSKTPRKSLAFFLCPKDDKVVKPPRELIDSSYPRIYPDFTWPMLLEFTQKHYRADMKTLQAFTNWLQEQRSS

SEQ ID NO: 24614 - DNA, 1155 bp, Musa acuminata
  CDS (1)..(1155)
atggattccgtctctcctgtcactttagacctcaacaaggaggaaggccactgcagcaacggtgccgtcgtcttcgacacctccttcctccggagacaagctaagatacccgagtcattcgtctggcctcgcaacgagaggcctcacccactggaggagctcgaggtgcccgtcgtcgacctccgaggactcttcgagggcgacgaggcctccatcagccgcgcggccgaggccagccgggccgcatgcgtgcgccacggattcttccaagtgatcaaccataaggttgacgcgaaggtctccggcgacgcccttgacgctgccggggacttcttcaagctccccctgagcaccaaactgagggcccggaggcagcccgggagcgcgtggggctatgtcggagcccacgccgatcgcttcgcctccaagctgccgtggaaggagaccctgacgttcggctacgactacggcgagcgcggggatggtgtcgtggactacttcacgtcgaagctcggggaaggattcgagccgatggggagggtgtaccggaggtactgtgaggccatgaaggagctgtcgctgtcgatcatggagctgctggggatcagtctgggcgtgggaagggagtactacaggcagttcttcgaggacgggagctccatcatgaggtgcaacagctacccgccgtgccaagaaccagagctggcgctggggacggggcctcactgcgatcccaccgcgctgacgattctgctgcaagaccatgtgggcggcctgcaggtgttcacggagggcaaatggcaggccgttcgccccgtccggagcgcgctggtcatcaacatcggcgacacgttcatggcattgtccaacgggaggtacaagagctgcctccaccgggcggtggtcaacagcgagagggagcggctgtctttggccttcttcgtgtgtccgagaggcgacagggtggttcggccgccaagggagctgctgctgctgctggaggaggaggaggaggaggaggaggaggcggtgccgagggcgttccccgacttcacttggacggagctgctggagttcacgcagacccactacagagcagacaccaccacgctccaaaactttgcccgccgccggttcctcgcctcctcaccctaa

SEQ ID NO: 24615 - protein, 384 aa, Musa acuminata
MDSVSPVTLDLNKEEGHCSNGAVVFDTSFLRRQAKIPESFVWPRNERPHPLEELEVPVVDLRGLFEGDEASISRAAEASRAACVRHGFFQVINHKVDAKVSGDALDAAGDFFKLPLSTKLRARRQPGSAWGYVGAHADRFASKLPWKETLTFGYDYGERGDGVVDYFTSKLGEGFEPMGRVYRRYCEAMKELSLSIMELLGISLGVGREYYRQFFEDGSSIMRCNSYPPCQEPELALGTGPHCDPTALTILLQDHVGGLQVFTEGKWQAVRPVRSALVINIGDTFMALSNGRYKSCLHRAVVNSERERLSLAFFVCPRGDRVVRPPRELLLLLEEEEEEEEEAVPRAFPDFTWTELLEFTQTHYRADTTTLQNFARRRFLASSP

SEQ ID NO: 24616 - DNA, 1143 bp, Musa balbisiana
  CDS (1)..(1143)
atggattccgtctctcctgtcactttagacctcaacaaggaggaaggccactgcagcaacagtgccgtcgtcttcgacacctccttcctccggagacaagctaagatacccgagtcattcgtctggcctcgcagcgagaggcctcacccactggaggagctcgaggtgcccgtcgtcgacctccgaggactcttcgagggcgacgaggcctccatcagccgcgcggccgaggccagccgggccgcatgcgtgcgccacggattcttccaagtgatcaaccataaggttgacgcgaaggtctccggcgacgcccttgacgctgccggggacttcttcaagctccccttgagcaccaaactgagggcccggaggcagcccgggagcgcgtggggctacgtcggagcccacgccgatcgcttcgcctccaagctaccgtggaaggagacactcacgttcggctacgactacggcgagcgcggggatggtgtcgtggactacttcacgtcgaagctcggggaaggattcgagccgatggggagggtgtaccggaggtactgtgaggccatgaaggagctgtcgctgtcgatcatggagctgctggggatcagtctgggcgtgggaagggagtactacaggcagttcttcgaggacgggagctccatcatgaggtgcaacagctacccgccgtgccaagaaccagagctggcgctggggacggggcctcactgcgatcccaccgcgctgacgattctgctgcaagaccaagtgggcggcctgcaggtgttcacggagggcaaatggcaggccgttcgccccgtccggagcgcggtggtcatcaacatcggcgacacgttcatggcattgtccaacgggaggtacaagagctgcctccaccgggcggtggtcaacagcgagagggagcggctgtctttggccttcttcgtgtgcccgagaggcgacagggtggttcggccgccaagggagttgctgctgctgctggaggaggaggaggaggcggtgccgagggcgttccccgacttcacttggacggagctgctggagttcacgcagacccactacagagcagacaccaccacgctccaaagcttctcccgccaccggttcctcgcctcctcaccctaa

SEQ ID NO: 24617 - protein, 380 aa, Musa balbisiana
MDSVSPVTLDLNKEEGHCSNSAVVFDTSFLRRQAKIPESFVWPRSERPHPLEELEVPVVDLRGLFEGDEASISRAAEASRAACVRHGFFQVINHKVDAKVSGDALDAAGDFFKLPLSTKLRARRQPGSAWGYVGAHADRFASKLPWKETLTFGYDYGERGDGVVDYFTSKLGEGFEPMGRVYRRYCEAMKELSLSIMELLGISLGVGREYYRQFFEDGSSIMRCNSYPPCQEPELALGTGPHCDPTALTILLQDQVGGLQVFTEGKWQAVRPVRSAVVINIGDTFMALSNGRYKSCLHRAVVNSERERLSLAFFVCPRGDRVVRPPRELLLLLEEEEEAVPRAFPDFTWTELLEFTQTHYRADTTTLQSFSRHRFLASSP

SEQ ID NO: 24618 - DNA, 999 bp, Vitis vinifera
  CDS (1)..(999)
atggaggttgagagagtgcaagccctggcctctggtgctgatctcaatgagcttccggcgaaattcatccggccagcccatgagcggccggagaataccaagccccttgaaggggtgagcgtgccggtcatctccttagcggagtctcacgatgttttggtgaaggaaatctacaaggcttgtagcgagtggggatttttccttctgaaggatcatggtatatctccagggttgatagaaaagttgcaggaggttgggatagaattctttaagcagccacaggaggagaaggagaagtatgcaaatgatccttcaactggtaagtttgaagggtatggaaccaagatgactaagaaccttgatgagaaggtggagtgggttgattattttttccatctcatgtctcctccttctaatgttaaccatcagatctggccccaaaccccttcttcctacagggaagtcacagaagtatacaacaaggaactactaaaagtaacagatacgctactggagctgctctcagaggggctcggtttggaagggaaggtcctgaaatcacacgtgggtggtgatgaaattgaacttgaaatgaaaatcaacatgtacccaccatgcccacagcctcaactggcgctcggagttgagcctcacaccgacatgtccgccctcaccctactcgtgcccaatgatgttccaggccttcaagtctggaaagacgattactgggttgccgtcgattacttgccaaatgccctctttgtccatgtcggtgatcaaattgaggtgctgagcaatgggaagtacaagagtgttctccacaggagtacagtgaacaaggaacgaacccgcatgtcatgggctgtgttttgcgcacctccccataaggcaatgatcggacctcttccagagcttgtggatgaaccaaaccctgccaagtattcaaccaaaacctttgctgagtaccgctaccgcaaatttaataagcttcctcaataa

SEQ ID NO: 24619 - protein, 332 aa, Vitis vinifera
MEVERVQALASGADLNELPAKFIRPAHERPENTKPLEGVSVPVISLAESHDVLVKEIYKACSEWGFFLLKDHGISPGLIEKLQEVGIEFFKQPQEEKEKYANDPSTGKFEGYGTKMTKNLDEKVEWVDYFFHLMSPPSNVNHQIWPQTPSSYREVTEVYNKELLKVTDTLLELLSEGLGLEGKVLKSHVGGDEIELEMKINMYPPCPQPQLALGVEPHTDMSALTLLVPNDVPGLQVWKDDYWVAVDYLPNALFVHVGDQIEVLSNGKYKSVLHRSTVNKERTRMSWAVFCAPPHKAMIGPLPELVDEPNPAKYSTKTFAEYRYRKFNKLPQ

SEQ ID NO: 24620 - DNA, 1167 bp, Gossypium hirsutum
  CDS (1)..(1167)
atggtacattgtctgccaaaggtttttgtcattcaagacaagccgattcttccatcaactgctgctgtcgcaaaggatgagtattggccgcctttagctttcgatgcatcgatccttggatctgaatccaacataccctctcagttcatatggcctgacgacgagaagccatgcctggatgccccagaacttgtaattccaaccattgacttgggagctttcttgcttaggtactctcttgctgtatcaaaagcggcagaggtggtgaatgaggcatgcaagaagcatgggttttttctggttgtaaaccatggggtggattcagggcttatagacaaagctcatcagtacatggaccgcttcttcagcctgcaactttctgagaagcaaaaggctaagagaaaagtaggagaaagctatgggtatgcaagcagtttcgttgggaggttttcctccaagttgccatggaaagaaacactgtcttttcggtactgtcctcgcactcaaaatatcgtgcaacactatatggtgaatttgatgggtgaagattttagagatttcgggaggctttaccaggaatattgtgaagccatgaacaaggtttcccaagagataatggggctgctagggataagtctaggacttgaccaagcctacttcaaagactttttcgaacaaaatgattcaatcctgagactgaatcactatcccccatgccaaaagcctgagttgactctgggaaccggtccccacaccgatcccacttccttgacaatccttcatcaggatcaagttggaggccttcaggtgtttgcagatgaaaagtggcactccgttgctccctacccaggagcttttgttgtcaacgttggcgacacattcatggctttgacaaaggctttttacaagagctgcttgcacagagcagtggtgaatactgaaacggtgagaaaatcacttcgattctttctatgtcccaagctggagagaccggtgacaccagcagctggcttagttactgccgaaaatccgaggaaatacccagacttcacttgggcagcactgctgaagttcacacagaaccattaccgtgctgacatgaaaacccttgttgcattctccaaatgggttcaagaacaagaatcgaactacaaattaataccttag

SEQ ID NO: 24621 - protein, 388 aa, Gossypium hirsutum
MVHCLPKVFVIQDKPILPSTAAVAKDEYWPPLAFDASILGSESNIPSQFIWPDDEKPCLDAPELVIPTIDLGAFLLRYSLAVSKAAEVVNEACKKHGFFLVVNHGVDSGLIDKAHQYMDRFFSLQLSEKQKAKRKVGESYGYASSFVGRFSSKLPWKETLSFRYCPRTQNIVQHYMVNLMGEDFRDFGRLYQEYCEAMNKVSQEIMGLLGISLGLDQAYFKDFFEQNDSILRLNHYPPCQKPELTLGTGPHTDPTSLTILHQDQVGGLQVFADEKWHSVAPYPGAFVVNVGDTFMALTKAFYKSCLHRAVVNTETVRKSLRFFLCPKLERPVTPAAGLVTAENPRKYPDFTWAALLKFTQNHYRADMKTLVAFSKWVQEQESNYKLIP

SEQ ID NO: 24622 - DNA, 1065 bp, Gossypium hirsutum
  CDS (1)..(1065)
atggtgacctcagtgctacctagagtagaaagcttggcaagcagtgggattcaatcaatcccgaaagaatatatcaggcctcaagaagagcttacaagcataggtaacgtgtttgaagaagagaaaaaagaggaagggcctcaggttccgaccatcgatttgacagaaatcgagtcggaggacaaagaggtccgggaaagatgtcagcaggagctgaaaaaggctgccatggaatggggtgtgatgcaccttgttaaccatggcatctccgaggagctcatggatcgtgttaggaaagttgggcagaaattctttgaactccctgtggaggagaaagagaagtatgccaacgaccagagctctgggaatgttcagggctatggtagcaagcttgctaacaatgctagtgggcagcttgagtgggaggactacttcttccatcttatttttcctgaggataagagagacttgtcaatttggcctaaaatccccagcgaatacactgaagttacaagtgagtatgcaaggcaactgcgaggcctagcgagcaaaatactttcagcactatcaatttgcttgggattagaagaaggaaggctagagaaggaagttggtggcgtggaagagcttcttcttcaattgaaaatcaattactaccccaagtgtccacaaccagaactcgctctcggtgtcgaagctcacaccgatataagtgcactcactttcattctccacaacatggttcctggcctccaactcttttaccaaggcaagtgggtgaccgctaaatgtgttcccaactccatcatcatgcacattggagacaccatcgagatcctcagcaatggaaagttcaagagcattctccacaggggtctggttaataaggagaaggttaggatctcatgggcagttttctgtgagccaccgaaggataagatcatccttaagccactcccggagactgtctctgagaccgaacctccactgttccctcctcgtacctttgctcagcatatcgagcataagctgttcaggaagacccaggataatctgtccaactga

SEQ ID NO: 24623 - protein, 354 aa, Gossypium hirsutum
MVTSVLPRVESLASSGIQSIPKEYIRPQEELTSIGNVFEEEKKEEGPQVPTIDLTEIESEDKEVRERCQQELKKAAMEWGVMHLVNHGISEELMDRVRKVGQKFFELPVEEKEKYANDQSSGNVQGYGSKLANNASGQLEWEDYFFHLIFPEDKRDLSIWPKIPSEYTEVTSEYARQLRGLASKILSALSICLGLEEGRLEKEVGGVEELLLQLKINYYPKCPQPELALGVEAHTDISALTFILHNMVPGLQLFYQGKWVTAKCVPNSIIMHIGDTIEILSNGKFKSILHRGLVNKEKVRISWAVFCEPPKDKIILKPLPETVSETEPPLFPPRTFAQHIEHKLFRKTQDNLSN

SEQ ID NO: 24624 - DNA, 1059 bp, Glycine max
  CDS (1)..(1059)
atgggtacggtggctcccagagttgaaagcttggcgagcagtgggataaagtgtatcccgaaggaatacgtgaggcctgaaaaagagttgaagagcatagggaacgtgttcgaggaggaaaagaaggaagggccagaggttcccacaattgacttgagagagatagattcggaggacgaggttgtccgaggcaagtgtcgccagaagctgaagaaagcggcggaggaatggggtgtgatgaacttggtgaaccatgggatccaggatgagctgatagagcgagtgaagaaagcaggggaagagttctttggtctggcggttgaggaaaaggagaagtacgccaatgatcaggagtctggtaagattcaaggctatggaagcaagctggccaacaatgccagtggccaactcgagtgggaagactacttcttccaccttgttttccctgaggacaagcgtgacctctccatctggcccaagaaacccgatgattatattgaggttacaagcgagtatgcaaagagactgagggggcttgccaccaagatgttggaggccctctctattggattgggtctggaaggagggaggttggagaaggaagttggtgggatggaagagcttctacttcaattgaagatcaactactaccctatttgtccccagccagaacttgctcttggagttgaagcccacaccgatgtcagttcactcactttcctccttcataacatggtgccaggtctgcagctattctaccaaggccaatggttcacagcaaaatgtgtccccaattccattctcatgcacattggtgacaccattgagatcctgagcaacggcaagtacaagagcattcttcatcggggtttggtcaacaaggaaaaggttagaatatcgtgggcaatgttctgtgaaccccccaaggagaagatcatcctgcagccacttcccgagcttgtcactgagacagagccagcacgctttccacctcgcacttttgctcagcatattcaccacaaactattcaggaaggatcaggaaggtctcccaaattga

SEQ ID NO: 24625 - protein, 352 aa, Glycine max
MGTVAPRVESLASSGIKCIPKEYVRPEKELKSIGNVFEEEKKEGPEVPTIDLREIDSEDEVVRGKCRQKLKKAAEEWGVMNLVNHGIQDELIERVKKAGEEFFGLAVEEKEKYANDQESGKIQGYGSKLANNASGQLEWEDYFFHLVFPEDKRDLSIWPKKPDDYIEVTSEYAKRLRGLATKMLEALSIGLGLEGGRLEKEVGGMEELLLQLKINYYPICPQPELALGVEAHTDVSSLTFLLHNMVPGLQLFYQGQWFTAKCVPNSILMHIGDTIEILSNGKYKSILHRGLVNKEKVRISWAMFCEPPKEKIILQPLPELVTETEPARFPPRTFAQHIHHKLFRKDQEGLPN

SEQ ID NO: 24626 - DNA, 1161 bp, Cucurbita maxima
  CDS (1)..(1161)
atggctttgaacggcaaggtggcaaccgaatccgctccctcaaacttgaatgaggagatgaaaggggagtaccgtccgccatttgggggctccgacgagtcaaaggtgccggaggatttcatttggtcggaaaagtttgaggcatccgagttgctgccggtgctggatgttccaactattgacttggaaaagtttatgagtggcgacaaaagttatgtggaagaggcgacaaggctggtggatgaggcttgtagacaacatggcatattttttgtggtgaaccatggagtggacatagaaatgatgggccgtgttcatgactgtatgaatgagttctttacaatgcctttggatgtgaagcagagggctaagaggaaggtaggtgagagttatggatataccaatagcttctttgggagattcgcgtccaatcttccatggaaggaaaccttttcccttcgctgtgtggctgctcaaaactcctccgcggctcatgactatgttcttgacactttaggcccatcattctcccatcatgggaaggcgtatcaagagtgtgggatagcattgaacgagcttggtacgaagattgtggagcttttggggcttagccttggcatttcaagagaatacttcaagaatttcttcgaggacaacgattcaatattgaggcttaattactacccaacatgcgacaagccagaggttgtgttgggaactggccctcacactgatcccacctccgtcacaatccttcaccaagaccctgtcagtggccttcaagtgtgctccaatgatcaatggtattcaattcctccaaacccagaagcctttgtcatcaacatcggtgacactttcacgtctctcacgaatgggatttacaagggctgcatacaccgcgctgtagtgaattccatgaatgcaagaaaatcattggccttctttctgtgtccatcgcatgacaaagtggtgagagcaccggaggaattggtggagaagagtccaccacgaaagtatccagattataaatggccaatgttgcttgaaatgacccaaaagcgttaccgacctgattgcaacactttggaagccttcaaaacttgggttcaagagggaaaggcgttggacactgggtccactattaccgccccgtctgcttaa

SEQ ID NO: 24627 - protein, 386 aa, Cucurbita maxima
MALNGKVATESAPSNLNEEMKGEYRPPFGGSDESKVPEDFIWSEKFEASELLPVLDVPTIDLEKFMSGDKSYVEEATRLVDEACRQHGIFFVVNHGVDIEMMGRVHDCMNEFFTMPLDVKQRAKRKVGESYGYTNSFFGRFASNLPWKETFSLRCVAAQNSSAAHDYVLDTLGPSFSHHGKAYQECGIALNELGTKIVELLGLSLGISREYFKNFFEDNDSILRLNYYPTCDKPEVVLGTGPHTDPTSVTILHQDPVSGLQVCSNDQWYSIPPNPEAFVINIGDTFTSLTNGIYKGCIHRAVVNSMNARKSLAFFLCPSHDKVVRAPEELVEKSPPRKYPDYKWPMLLEMTQKRYRPDCNTLEAFKTWVQEGKALDTGSTITAPSA

SEQ ID NO: 24628 - DNA, 1140 bp, Pisum sativum
  CDS (1)..(1140)
atgaaagtgctttgttcttcaatgctatttgcacccccaaatgcaaatgaaagtttcatgaatgaacaaaaacaatgtcttgataatacatcttctctaccgttgcaaattacaaacataccctcagagttcatatggccagatcatgagaaaccttgtttaacaccgccaaaacttgaagttccacctattgacttgaaagcttttctatctgatgatccaaagtccatttcaaatgcttgttcaaaggtgaaccatgcatgcaaaaaacatggtttttttcttgttgttaaccatggtgttgataacaagcttatagctcaagctcataagcttgttgatgaattcttttgcatgcaactatctgagaaacaaagagctcaaagaaagattggtgaacattgtggttatgctaatagtttcattggaagattctcatctaaacttccatggaaggaaacactctcttttcgttactccgcggatgaatcgtgcagaactgttgaggactattttgtcaatatcatgggagaagatttcagacaatttgggattgtctaccagaagtattgtgaagctatgagcaatctctcacttgggataatggagcttcttggtatgagcttaggagttggcaaggaatattttagagaattttttgaaggaaatgaatcagtaatgagattgaattactatccaccgtgtaaaaatcctgatttagcattcggaactggacctcattgtgaccctacttcactaaccattctccaccaagatcaagttgaaggtcttcaagtgcttgtggatggaatatggcactcggttgttcctaaagaagatgcttttgtggtcaacattggtgacacatttatggctctatcaaatggaatgttcaagagttgcttgcatagagcaattgtaaatgacaaaatagtgagaaaatcacttgcattttttctatgtccaaatgaagacaaaatagtgactcctccaaaagagcttattgacaaagagaatccaaggaaatatccaaacttcacatggccaagtttgcttgaatttacacaaaaacattacagggctgatgaaagaacacttgatgctttttcaatgtggttacaagaaaaaacaactacttag

SEQ ID NO: 24629 - protein, 379 aa, Pisum sativum
MKVLCSSMLFAPPNANESFMNEQKQCLDNTSSLPLQITNIPSEFIWPDHEKPCLTPPKLEVPPIDLKAFLSDDPKSISNACSKVNHACKKHGFFLVVNHGVDNKLIAQAHKLVDEFFCMQLSEKQRAQRKIGEHCGYANSFIGRFSSKLPWKETLSFRYSADESCRTVEDYFVNIMGEDFRQFGIVYQKYCEAMSNLSLGIMELLGMSLGVGKEYFREFFEGNESVMRLNYYPPCKNPDLAFGTGPHCDPTSLTILHQDQVEGLQVLVDGIWHSVVPKEDAFVVNIGDTFMALSNGMFKSCLHRAIVNDKIVRKSLAFFLCPNEDKIVTPPKELIDKENPRKYPNFTWPSLLEFTQKHYRADERTLDAFSMWLQEKTTT

SEQ ID NO: 24630 - DNA, 1125 bp, Spinacia oleracea
  CDS (1)..(1125)
atgatgcaaccacttcttaccattccaccaccacttccaacaacctcattgtttgatacatcatttcttaaacatgaagataacataccaagccaatttatatggccagatgatgaaaaaccatgctcggaaacgcctccagagctcgaggtacctcccattgatctaggggggttcctctcaggagacccagttgcagtgtcaaaggcaactacacttgccaatgaagcatgcaagtggcatgggttcttcttgattgtcaaccatgatatctatttcgagctcttagttaaagctcatgaagctatggattacttttttagtcagccgttttcccaaaaacaaaaagctctcaggaaacaaggtgatcattgtggctatgctagtagctttcttggaagatttgccacaaaacttccttggaaagagactctttcctttcgatattatgatgatgatgatgataagtcctcaaaaatggtacaaaactacatctccaacttaatggggactgactttcaagaatttgggagggtgtaccaagaatattgtaaggctatgagcaagttgtcccttggtatcatggagcttttgggaatgagcctaggagttggaagaaactatttcagggaatttttcaaagggaatgactcaataatcagactaaactactacccgccttgccaaaaacccgaattaactcttgggacggggcctcactgtgatcccacgtcgctgacgattcttcatcaagatcatgttggtggccttgaagtcttcgtcgaccaaaaatggtactccatccgtcccaaccagaaagcatttgtcgtcaacattggagataccttcatggctttgtcaaatgggaaatacaagagttgcttgcacagggcagtggtgaatagcaaaactcctagaaaatcagtggctttctttctgtgtccaaggggaaacaaagtgattcgtccaccaattgagttagggcatccaagggtatacccggattttacatggccgcttcttttggagtttacacagaaacattatagggccgacacaaaaactctagattcttttacaaagtggcttcaaaagagatcaactgaagacgagcgagtaaagtaa

SEQ ID NO: 24631 - protein, 374 aa, Spinacia oleracea
MMQPLLTIPPPLPTTSLFDTSFLKHEDNIPSQFIWPDDEKPCSETPPELEVPPIDLGGFLSGDPVAVSKATTLANEACKWHGFFLIVNHDIYFELLVKAHEAMDYFFSQPFSQKQKALRKQGDHCGYASSFLGRFATKLPWKETLSFRYYDDDDDKSSKMVQNYISNLMGTDFQEFGRVYQEYCKAMSKLSLGIMELLGMSLGVGRNYFREFFKGNDSIIRLNYYPPCQKPELTLGTGPHCDPTSLTILHQDHVGGLEVFVDQKWYSIRPNQKAFVVNIGDTFMALSNGKYKSCLHRAVVNSKTPRKSVAFFLCPRGNKVIRPPIELGHPRVYPDFTWPLLLEFTQKHYRADTKTLDSFTKWLQKRSTEDERVK

SEQ ID NO: 24632 - DNA, 1119 bp, Sesbania rostrata
  CDS (1)..(1119)
atggattcaggtttgtgcttagtgtctggacttaatcacaaagacgttcaaactcgtttctttggcccatcttggttacagatgcagtctcatgttcccatgaacttcatttggccaaaggagtgtctcgttaacgcccatgaagagctccaagcgccattggttgaccttgatgggttcctaagaggggacgaagaggccacacaccgtgctgctgagctcatatcaaaggcttgtttgacacatggattcttccaagtgatcaatcatggggttgatcaacgactcattggtgaagcgtataatcaaatggacggtttttttaagctcccaattgataggaaactgagtgttcgtaagatacccggttccatgtggggttattctggtgctcatgctgaccggttttcatccaaattgccatggaaagagacactttctttccccttccatgacaataactcagagcctgttgttaccaactactttaactccaccttagggaagacttttgaacaaactggagtgacattccagaagtactgtgaagctatgaaagggttgggaatgaagctgatggagctattggctataagcttggacgtggaccggttccattataaggacttgtttgaagatggttgctccatcatgagatgcaactattacccatcgtgccagcaaccaagtcttgctcttgggacgggaccgcattgtgacccaacaacactaaccatacttcaccaagatcaagttggagggcttgatgtgtttgcagacaagaagtggcagacggttcgacctcttcctcatgctcttgtagtcaacattggtgatacattcacggcattatcaaatgggagatacaagagttgcttgcatagggcagtggttaaccagtacaaagagaggaggtccttggcattctttgtgtgcccaaaagaagacaaagtggtgagacccccagaggatattgtgcgtagggatgggacaaaacagtatccagatttcacatggtctaaattgcttgaattcacacaaaagtactacagagccgacgaagataccctgcaaaacttcaccaagtggttgctatcctccaaaccacaaaccctttaa

SEQ ID NO: 24633 - protein, 372 aa, Sesbania rostrata
MDSGLCLVSGLNHKDVQTRFFGPSWLQMQSHVPMNFIWPKECLVNAHEELQAPLVDLDGFLRGDEEATHRAAELISKACLTHGFFQVINHGVDQRLIGEAYNQMDGFFKLPIDRKLSVRKIPGSMWGYSGAHADRFSSKLPWKETLSFPFHDNNSEPVVTNYFNSTLGKTFEQTGVTFQKYCEAMKGLGMKLMELLAISLDVDRFHYKDLFEDGCSIMRCNYYPSCQQPSLALGTGPHCDPTTLTILHQDQVGGLDVFADKKWQTVRPLPHALVVNIGDTFTALSNGRYKSCLHRAVVNQYKERRSLAFFVCPKEDKVVRPPEDIVRRDGTKQYPDFTWSKLLEFTQKYYRADEDTLQNFTKWLLSSKPQTL

SEQ ID NO: 24634 - DNA, 1095 bp, Solanum lycopersicum
  CDS (1)..(1095)
atgacaacctccaacacacaacaaagctatgacaaaacaagtgaactaaaagcctttgatgacacaaaagcaggtgtcaaaggacttattgatagtggaattactaaagtacctcaaatattcattcatccagaggccttagaaaataaaaccacaaatcccaaaaatacacatttcattttccctttaatagacctccaaaacatcagcattaacaacaaagagatagtgaaacaaattcaagaagcatcagagacatggggtttctttcaagttatcaatcatggtatccccgtccccgtcctagacgaaatgttgcgtggggcacgacgttttcacgatcaagatatcgacgttaaaaagccatactatagtcgagatattgcaaggaaagttatgtacaattgcaattttgatctatttagtgagaaatctcttgcagcaaattggagagactcactttactctgtcatggctcctaatcctgctactcccgaggaaatccccgagacatgcagggaaatcacaattgagtactcaaattatgtgatgaatttgggatacacattgcttgaattattttcagaaggacttggtttaaaaccaaaccatctcaaagaaatgggatgtgctgagggactaggcattttgtgcaattactaccctaaatgtccacaaccagaaattgcaattggcacaagtagacatgctgataatgattttttcacagtgcttttgcaagatgatattggtggacttcaagttcttcacaagaatcaatgggttgatgtccctcctactcatggagctttagttgtcaatattggtgacattcttcagcttatatcgaatgacaaatataagagcgtagttcacagagtattggcaaatacaattggtccaagaatatcaatagcaagtttcttcagcacagggccattttcaacttctagaatttatggaccaattgaggaattattatcaaaagataatcctccaaagtatagatcaacaacaatgaaggacttctttgaatattctaataaaaaaggacttgatggcaattctaatttgtctcactacaaaataatatga

SEQ ID NO: 24635 - protein, 364 aa, Solanum lycopersicum
MTTSNTQQSYDKTSELKAFDDTKAGVKGLIDSGITKVPQIFIHPEALENKTTNPKNTHFIFPLIDLQNISINNKEIVKQIQEASETWGFFQVINHGIPVPVLDEMLRGARRFHDQDIDVKKPYYSRDIARKVMYNCNFDLFSEKSLAANWRDSLYSVMAPNPATPEEIPETCREITIEYSNYVMNLGYTLLELFSEGLGLKPNHLKEMGCAEGLGILCNYYPKCPQPEIAIGTSRHADNDFFTVLLQDDIGGLQVLHKNQWVDVPPTHGALVVNIGDILQLISNDKYKSVVHRVLANTIGPRISIASFFSTGPFSTSRIYGPIEELLSKDNPPKYRSTTMKDFFEYSNKKGLDGNSNLSHYKII

SEQ ID NO: 24636 - DNA, 1131 bp, Nerium oleander
  CDS (1)..(1131)
atggcgatagattgtatgttcaaaagtaaatctacggtgccagaaatgtgcaaggatgagaaaaagccgctagtgttcgatgcatccctgcttcaacaccagacccacatacccacggaatttatatggcctgagcatgaaaagccttgtcctaatccacgagaacatccggttccgctcatcgacttaggcggcttcctttctggaaaccctgttgcggccatggaagcctccaggcttgttggcgaagcgtgtcaagagcatggtttctttctagtagttaatcacggtgtagatgctgatctcatagcggatgctcatcgttatatggactacttctttgaactgccactttgtgacaaacaaagagctcagagaaagcttggcgagcattgtggttatgctagcagtttcactgggaagatctccaccaagttaccgtggaaagagacactttcgtttcggttctccgccgagaaaagatcatcccacatggtcgaagagtactttgagaagaccctgggagatgaattcgcgcatcttgggaatgtttaccaagaatactgcaatgcaatgagcaccctttctctagggatcatggaactcttggggatgagccttggcataagcagagaaagtttcaaagatttcttccaagataatgaatccataatgaggttgaactattatcccccgtgtcagaaaccggaactcacgttaggaacaggaccgcactgcgatcccacctcattaaccatcctccatcaagacactgttggtggccttcaagtgtttgtagatggcgaatggcggtccatcagcccaaacgtcagcgcttttgttgtcaacataggcgacaccttcgtggctctctcaaatggtagatacaaaagttgcctacatcgagcagtggtaaacaacaaaactcctaggaaatctcttgctttctttctttgtcccaaggaggataaggtggtgagcccaccatctgaattggttgattccaataaccccagaatatatccagacttcacatgggcgaagctgcttgagttcacgcagaagcattacagagctgacatgaacacccttcaaattttctcaaattggcttcaacagaaaaacagctga

SEQ ID NO: 24637 - protein, 376 aa, Nerium oleander
MAIDCMFKSKSTVPEMCKDEKKPLVFDASLLQHQTHIPTEFIWPEHEKPCPNPREHPVPLIDLGGFLSGNPVAAMEASRLVGEACQEHGFFLVVNHGVDADLIADAHRYMDYFFELPLCDKQRAQRKLGEHCGYASSFTGKISTKLPWKETLSFRFSAEKRSSHMVEEYFEKTLGDEFAHLGNVYQEYCNAMSTLSLGIMELLGMSLGISRESFKDFFQDNESIMRLNYYPPCQKPELTLGTGPHCDPTSLTILHQDTVGGLQVFVDGEWRSISPNVSAFVVNIGDTFVALSNGRYKSCLHRAVVNNKTPRKSLAFFLCPKEDKVVSPPSELVDSNNPRIYPDFTWAKLLEFTQKHYRADMNTLQIFSNWLQQKNS

SEQ ID NO: 24638 - DNA, 1134 bp, Arabidopsis thaliana
  CDS (1)..(1134)
atggccgtaagtttcgtaacaacatctcctgaggaagaagacaaaccgaagctaggccttggaaatattcaaactccgttaatcttcaacccttcaatgcttaaccttcaagccaatatcccaaaccaattcatctggcctgacgacgaaaaaccttccatcaacgttctcgagcttgatgttcctctcatcgaccttcaaaaccttctctctgatccatcctccactttagatgcttcgagactgatctctgaggcctgtaagaagcacggtttcttcctcgtggtcaatcacggcatcagcgaggagcttatttcagacgctcatgaatacacgagccgcttctttgatatgcctctctccgaaaaacagagggttcttagaaaatccggtgagagtgttggctacgcaagcagtttcaccggacgcttctccaccaagcttccatggaaggagaccctttctttccggttttgcgacgacatgagccgctcaaaatccgttcaagattacttctgcgatgcgttgggacatgggtttcagccatttgggaaggtgtatcaagagtattgtgaagcaatgagttctctatcactgaagatcatggagcttctggggctaagtttaggcgtaaaacgggactactttagagagtttttcggagaaaacgattcaataatgagactgaattactaccctccatgtataaaaccagatctcacactaggaacaggacctcattgtgatccaacatctcttaccatccttcaccaagaccatgttaatggccttcaagtctttgtggaaaatcaatggcgctccattcgtcccaaccccaaggcctttgtggtcaatatcggcgatactttcatggctctatcgaacgatagatacaagagctgcttgcaccgggcggtggtgaacagcgagagcgagaggaaatcacttgcattcttcttgtgtccgaaaaaagacagagtagtgacgccaccgagagagcttttggacagcatcacatcaagaagataccctgacttcacatggtctatgttccttgagttcactcagaaacattatagagcagacatgaacactctccaagccttttcagattggctcaccaaacccatctaa

SEQ ID NO: 24639 - protein, 377 aa, Arabidopsis thaliana
MAVSFVTTSPEEEDKPKLGLGNIQTPLIFNPSMLNLQANIPNQFIWPDDEKPSINVLELDVPLIDLQNLLSDPSSTLDASRLISEACKKHGFFLVVNHGISEELISDAHEYTSRFFDMPLSEKQRVLRKSGESVGYASSFTGRFSTKLPWKETLSFRFCDDMSRSKSVQDYFCDALGHGFQPFGKVYQEYCEAMSSLSLKIMELLGLSLGVKRDYFREFFGENDSIMRLNYYPPCIKPDLTLGTGPHCDPTSLTILHQDHVNGLQVFVENQWRSIRPNPKAFVVNIGDTFMALSNDRYKSCLHRAVVNSESERKSLAFFLCPKKDRVVTPPRELLDSITSRRYPDFTWSMFLEFTQKHYRADMNTLQAFSDWLTKPI

SEQ ID NO: 24640 - DNA, 1161 bp, Ipomoea nil
  CDS (1)..(1161)
atggcgattgaatgtatgatcccaacaccaactcctaatcatgagcgccaagaaattgaaaataagcctgcagcagcggtggttttcgactcccccgtcctccgccacgagtccaacatcccaacggaattcctgtggccggaccacgagaaacccggcccctacgccgcccgagaattccaggtcccggtcatcgacatggctgccttccgttccggcgatcccgtggccgtggctgaaacttgcaagctggtggacgaagcctgcaaaaaacatggcttctttctggtagtgaatcacggagttgacacagagctcctctccgacggtgtccgtgaaatggaccgctactttgagttacctctgtccttcaaggaaaaagctctgagaaagctgggcgagcattgcggttatgccagcagtttcaccggcaggttcaacgccaagctgccatggaaggaaactctttcttttagattttccgctgagaaagaatgttcccacgtagtgggagagtacttcgagaaaacactgggccaagagtttgctgatcttggggagctttatcaaaagtactgcaatgcgatgaacacactggctctggagatcacggaattgctgggcatgggtttaggtgtagaccgaaagcatttcagtgaattctatcaagaaaacgactccgtattgcgactgaactactacccaccatgccagaaaccagagctcaccttagggaccggacctcattgtgatccaacatccttaaccatcctccaccaagacagcgtgagtgggcttcaagtatttgtggacaacgagtggcgtgcagttaaccccacccccaacgcttttgtcgttaacataggcgacaccttcatggcactttccaacggattatacaaaagttgcatgcacagggctgtggtgaacaacgagattcccaggaagtccatagctttcttcctgtgtcctcacaaggataaggtggtgacgccgccaccagaactggtggacgccactcatcctaaactatatccagacttcaaatggccggccctccttgagtacacccagctgcattacaggtctgacaccgacactcttctcaacttcgctacatggctccaacagaaccaaaccctccatgcaacccaggcctaa

SEQ ID NO: 24641 - protein, 386 aa, Ipomoea nil
MAIECMIPTPTPNHERQEIENKPAAAVVFDSPVLRHESNIPTEFLWPDHEKPGPYAAREFQVPVIDMAAFRSGDPVAVAETCKLVDEACKKHGFFLVVNHGVDTELLSDGVREMDRYFELPLSFKEKALRKLGEHCGYASSFTGRFNAKLPWKETLSFRFSAEKECSHVVGEYFEKTLGQEFADLGELYQKYCNAMNTLALEITELLGMGLGVDRKHFSEFYQENDSVLRLNYYPPCQKPELTLGTGPHCDPTSLTILHQDSVSGLQVFVDNEWRAVNPTPNAFVVNIGDTFMALSNGLYKSCMHRAVVNNEIPRKSIAFFLCPHKDKVVTPPPELVDATHPKLYPDFKWPALLEYTQLHYRSDTDTLLNFATWLQQNQTLHATQA

SEQ ID NO: 24642 - DNA, 1146 bp, Ipomoea nil
  CDS (1)..(1146)
atggcgattgaatgtgtgaccacaacaccaactcgtagtgatgatcctaaagcagcagcggtggttttcgactccagcgttctccgccacgagaccaacatcccaaccgaattcgtgtggccggagcacgagaagccgggcagctacgccgccccagaatgcccggtcccggtcatcgacctcgcagccttccgttccggcgatcccgcggccgtcgcggaaactcttaagctggtgaacgaagcctgcaaaaaacacggcttcttcctggtagtgaatcacggagttgacccagatcgcatctccgacgctatccgccacatggaccgcttctttgacttgcctctctcctccaaggaaaaagctctcagaaaggtcggcgagagttgcggttatgccagcagtttcaccggcaggttctccgccaagcttccatggaaggaaactctctcttttagatattccgcccagaaagaatgttcccacatagtggaagagtatttccaggaatcattgggtcaagattttgctcatatcgggctggtttatcaaaagtacagcaatgagatgagcaaactggctctggagatcatggaagtgctggggatgggtttaggcgtaaaccgaaagcatttcagtgacttcttccaagaaaacgactctgtaatgcgactgaactactgcccaccatgccagaaaccagagatcaccttggggaccggacctcattgtgatccaacatccttaacaatcctccaccaagacaacagcgtgaatgggcttcaagtatgcgtggacaacgaatggcgttccgtctcccccagccccaacgcttttgtcgttaacataggcgacaccttcatggcactttccaacggaatatacaaaagttgcctgcacagggcggtggtgaacagtacgattaccaggaagtccatggctttcttcctttgccctcacgaagataaggtggtgacgccgccaccagaactggtggactccactcatcctagactctatccagacttcaaatggccgaccctccttgagttcacccagaagcattacaggtctgacaccgacactctactcagcttctctgcatggctccaacaaaaccaaaccccccatgcaacccacccctaa

SEQ ID NO: 24643 - protein, 381 aa, Ipomoea nil
MAIECVTTTPTRSDDPKAAAVVFDSSVLRHETNIPTEFVWPEHEKPGSYAAPECPVPVIDLAAFRSGDPAAVAETLKLVNEACKKHGFFLVVNHGVDPDRISDAIRHMDRFFDLPLSSKEKALRKVGESCGYASSFTGRFSAKLPWKETLSFRYSAQKECSHIVEEYFQESLGQDFAHIGLVYQKYSNEMSKLALEIMEVLGMGLGVNRKHFSDFFQENDSVMRLNYCPPCQKPEITLGTGPHCDPTSLTILHQDNSVNGLQVCVDNEWRSVSPSPNAFVVNIGDTFMALSNGIYKSCLHRAVVNSTITRKSMAFFLCPHEDKVVTPPPELVDSTHPRLYPDFKWPTLLEFTQKHYRSDTDTLLSFSAWLQQNQTPHATHP

SEQ ID NO: 24644 - DNA, 1158 bp, Gossypium hirsutum
  CDS (1)..(1158)
atggtacattgtctgccaaaggtttctgtcattcaagacaagccgatgcttccaccaactgctgctgtcgcaaagaataagcatcgccctttagctttcgatgcatcaatccttggatctgagatatcctctcagttcatatggcctgacgacgacaagccatgcctggatgccccggaacttgtaattccaaccattgacttgggagctttcttgcttggggactctcttgctgtatcaaaagcggcagaggcggtgaatgaggcatgcaagaagcatgggttttttctggttgtaaaccatggggtggattcagggcttatagacaaagctcatcagtacatggaccgcttcttcagcctgcaactctctgagaagcaaaaggctaagagaaaagtaggagaaagctatgggtatgcaagcagtttcgttgggaggttttcctccaagttgccatggaaagaaacactgtcttttcggtactgtcctcacactcaaaacatcgtgcaacactatatggtgaattggatgggtgaagattttagagatttcgggaggctttaccaggaatattgtgaagccatgaacaaggtttcccaagagataatggggctgctagggataagtctaggacttgaccaagcctacttcaaagactttttcgacgaaaatgattcaatcctgagactgaatcactaccctccatgccaaaagcctgagttgactctggggactggtccccacaccgatcccacttccttgacaatccttcatcaggatcaagttggaggccttcaagtgtttgcagatgaaaagtggcactccgttgctcccatcccacgagctttcgttgtcaacattggcgacacattcatggctttgacaaacggtatttacaagagctgcttgcacagagcagtggtgaatactgaaacggtgagaaaatcacttgtattctttctatgtcccaagctggagagaccggtgacaccagcagctggcctagttaatgccgcaaattcgaggaagtacccagactttacttgggcagcactgcttgaatttacacagaaccattaccgtgctgacatgaaaacccttgttgcattctccaaatgggttcaagaacaagaatcgaacaacaaattaataccttag

SEQ ID NO: 24645 - protein, 385 aa, Gossypium hirsutum
MVHCLPKVSVIQDKPMLPPTAAVAKNKHRPLAFDASILGSEISSQFIWPDDDKPCLDAPELVIPTIDLGAFLLGDSLAVSKAAEAVNEACKKHGFFLVVNHGVDSGLIDKAHQYMDRFFSLQLSEKQKAKRKVGESYGYASSFVGRFSSKLPWKETLSFRYCPHTQNIVQHYMVNWMGEDFRDFGRLYQEYCEAMNKVSQEIMGLLGISLGLDQAYFKDFFDENDSILRLNHYPPCQKPELTLGTGPHTDPTSLTILHQDQVGGLQVFADEKWHSVAPIPRAFVVNIGDTFMALTNGIYKSCLHRAVVNTETVRKSLVFFLCPKLERPVTPAAGLVNAANSRKYPDFTWAALLEFTQNHYRADMKTLVAFSKWVQEQESNNKLIP

SEQ ID NO: 24646 - DNA, 1152 bp, Fragaria ananassa
  CDS (1)..(1152)
atggtgactgctgcatccattggttcaagagttgagagtttggccagcagcgggatctcaacgatcccgaaggagtacgtgagacccaaagaggagctcgttaacatcggtgacatattcgaggacgagaagagcaccgaagggcctcaagtacctaccattgatttgaaggagatagattccaatgacatcaaggtgagggagaaatgtagggaggatttgaaggaagcagccgtcgaatggggtgtcatgcaccttatcaaccacggcatctccgacgagctcatggaacgggtcaagaaggccggaaaagccttctttgatcttcccattgagcagaaggagaagtatgccaatgaccaggcctccggcaaaattcaaggctacggaagcaagcttgcaaacaatgcttccgggcaacttgagtgggaggactactttttccactgtgtttatcctgaggacaagcgtgacttgtccatttggcctcaaacaccttccgactatattgtggcaacaagtgagtatgctaaggaactgagggggctagcaaccaagatactgagcatactctcacttggcttgggattagaagaagggaggctggagaaggaggtcggtggactcgaagaactcctcctgcaaatgaagatcaactactacccaaaatgccctcagccggaacttgcactcggcgtggaagctcataccgacataagtgcactcaccttcatcctccacaacatggttcccggcctgcagctcttctacggcggcaaatgggtgacagcgaagtgcgtacccaactccatcgtcatgcacataggcgacaccttagagattctaagcaacggcaagtacaagagcattcttcacagggggctcgtcaacaaggagaaggtgaggatctcgtgggcggttttctgtgagccgcccaaggagaaaatcatccttaagccgctaccggaaactgtctccgaggaggagccggcgatgttcccaccacggactttcttcgagcatatccagcacaaactgttcaggcagagccaggaagctctcgtctctaccaaagaatctgctgccctcaaaagcactacagaatctgccctcaaaagcactaaagaagctgctctcatctctactaattag

SEQ ID NO: 24647 - protein, 383 aa, Fragaria ananassa
MVTAASIGSRVESLASSGISTIPKEYVRPKEELVNIGDIFEDEKSTEGPQVPTIDLKEIDSNDIKVREKCREDLKEAAVEWGVMHLINHGISDELMERVKKAGKAFFDLPIEQKEKYANDQASGKIQGYGSKLANNASGQLEWEDYFFHCVYPEDKRDLSIWPQTPSDYIVATSEYAKELRGLATKILSILSLGLGLEEGRLEKEVGGLEELLLQMKINYYPKCPQPELALGVEAHTDISALTFILHNMVPGLQLFYGGKWVTAKCVPNSIVMHIGDTLEILSNGKYKSILHRGLVNKEKVRISWAVFCEPPKEKIILKPLPETVSEEEPAMFPPRTFFEHIQHKLFRQSQEALVSTKESAALKSTTESALKSTKEAALISTN

SEQ ID NO: 24648 - DNA, 1152 bp, Fragaria ananassa
  CDS (1)..(1152)
atggtgactgctgcatccattggttcaagagtcgagagtttggccagcagcgggatctcaacgatcccaaaggagtacgtgagacccgaagaggagctcgttaacatcggtgacatcttcgaagacgagaagagcaccgaagggcctcaagtacctaccattgatttgaaggagatagattccgatgacatcaaggtgagggagaaatgtagggaggatttgaaggaagcagccgtcgaatggggtgtcatgcaccttatcaaccacggcatctccgacgagctcatggaacgggtcaagaaggccggaaaagccttctttgatcttcccattgagcagaaggagaagtatgccaatgaccaggcctccggcaaaattcaaggctacggaagcaagcttgcaaacaatgcttccggccaacttgagtgggaggactactttttccactgtgtttatcctgaggacaagcgtgacttgtccatttggcctcaaacaccttccgactatattgtggcaacaagtgagtatgctaaggaactgagggggctagcaaccaagatactgagcatactctcacttggcttgggattagaagaagggaggctggagaaggaggtcggtggactcgaagaactcctcctgcaaatgaagatcaactactacccaaaatgccctcagccggaacttgcactcggcgtggaagctcatacagacataagtgcactcaccttcatcctccacaacatggttcccggcctgcagctcttctacggcggcaaatgggtgacagcgaagtgcgtacccaactccatcgtcatgcacataggcgacaccttagagattctaagcaacggcaagtacaagagcattcttcacagggggctcgtcaacaaggagaaggtgaggatctcgtgggcggttttctgtgagccgcccaaggagaaaatcatccttaagccgctaccggaaactgtctccgaggaggagccggcgatcttcccaccacggactttcttcgagcatatccagcacaaactgttcaggcagagccaggaagctctcgtctctaccaaagaatctgctgccctcaaaagcactacagaatctgccctcaaaagcactaaagaagctgctctcatctctactaattag

SEQ ID NO: 24649 - protein, 383 aa, Fragaria ananassa
MVTAASIGSRVESLASSGISTIPKEYVRPEEELVNIGDIFEDEKSTEGPQVPTIDLKEIDSDDIKVREKCREDLKEAAVEWGVMHLINHGISDELMERVKKAGKAFFDLPIEQKEKYANDQASGKIQGYGSKLANNASGQLEWEDYFFHCVYPEDKRDLSIWPQTPSDYIVATSEYAKELRGLATKILSILSLGLGLEEGRLEKEVGGLEELLLQMKINYYPKCPQPELALGVEAHTDISALTFILHNMVPGLQLFYGGKWVTAKCVPNSIVMHIGDTLEILSNGKYKSILHRGLVNKEKVRISWAVFCEPPKEKIILKPLPETVSEEEPAIFPPRTFFEHIQHKLFRQSQEALVSTKESAALKSTTESALKSTKEAALISTN

SEQ ID NO: 24650 - DNA, 1158 bp, Populus tremula
  CDS (1)..(1158)
atggcaatagattgcatcaaaaccatgccatccataaccacccctcaccaccacccaaaagatcaggatcaatgcaaagatgatggcaagtcttttgtctttgatgcacaagttcttcgacaccagacaaacataccccagcagttcatttggccagaccatgaaaagcctaatattaatgcacctgaactccaagtcccgcttgtagacttgggtgatttcctctctggtaaccctgttgctgcagtggaagcttcaaggcttgttggtgaagcatgtaaaaaacatggtttctttctagttgttaatcatggagttgataaaacactcattgcccatgctcataattacgttgacaccttcttcaaattgccactttctgagaaacaaaaggcccagagaaagattggcgagccctgtggatatgctagcagctttactggcaggttttcctctaaacttccatggaaagaaacgctttcttttcgctacaaagctgaggagaattcaccaaaacacatcgaggaatactttcacaacagaatgggggaagatttcgctgagttcgggacggtgtatcaggactactgtgaggccatgagcactttgtcactagggatcatggagctattaggaatgagcctcggtgtgagcagagaacatttcagggaattctttaatgagaatgattcaataatgaggctcaactactaccctccatgccaaaaacccgaccttactttaggcaccggtcctcattgtgatccaacttccttaaccatcctccatcaggaccaagtgggcggtcttcaagtgtttgtggacaacgaatggcgttcgattaaccccaattttgacgcttttgttgttaacattggtgacaccttcatggctctatcgaatggtatatacaagagctgcttgcaccgagcagtggtgaacagccaaacaccaagaaaatctctcgctttctttctgtgtccaaagaatgacaagatggtaactccaccacatgaattagtggacacatgcaatccgagaatatatccagatttcacatggccgatgttgctcgaattcacacaaaagcattaccgagctgacatgaagacacttgaggtgttcacaaactggcttcatcaacgaagttttagctga

SEQ ID NO: 24651 - protein, 385 aa, Populus tremula
MAIDCIKTMPSITTPHHHPKDQDQCKDDGKSFVFDAQVLRHQTNIPQQFIWPDHEKPNINAPELQVPLVDLGDFLSGNPVAAVEASRLVGEACKKHGFFLVVNHGVDKTLIAHAHNYVDTFFKLPLSEKQKAQRKIGEPCGYASSFTGRFSSKLPWKETLSFRYKAEENSPKHIEEYFHNRMGEDFAEFGTVYQDYCEAMSTLSLGIMELLGMSLGVSREHFREFFNENDSIMRLNYYPPCQKPDLTLGTGPHCDPTSLTILHQDQVGGLQVFVDNEWRSINPNFDAFVVNIGDTFMALSNGIYKSCLHRAVVNSQTPRKSLAFFLCPKNDKMVTPPHELVDTCNPRIYPDFTWPMLLEFTQKHYRADMKTLEVFTNWLHQRSFS

SEQ ID NO: 24652 - DNA, 1158 bp, Populus tremula
  CDS (1)..(1158)
atggcaatagattgcatcaaaaccatgccatccataaccacccctcaccaccacccaaaagatcaggatcaatgcaaagatgatggcaagtcttttgtctttgatgcacaagttcttcgacaccagacaaacataccccagcagttcatttggccagacaatgaaaagcctaatattaatgcacctgaactccaagtcccgcttgtagacttgggtgatttcctctctggtaaccctgttgctgcagtggaagcttcaaggcttgttggtgaagcatgtaaaaaacatggtttctttctagttgttaatcatggagttgataaaacactcattgcccatgctcataattacgttgacaccttcttcaaattgccactttctgagaaacaaaaggcccagagaaagattggcgagtcctgtggatatgctagcagctttactggcaggttttcctctaaacttccatggaaagaaacgctttcttttcgctaccaagctgaggagaattcaccaaaacacatcgaggaatactttcacaacagaatgggggaagatttcgctgagttcgggacggtgtatcaggactactgtgaggccatgagcactttgtcactagggatcatggagctattaggaatgagcctcggtgtgagtagagaacatttcagggaattctttaatgagaatgattcaataatgaggctcaactactaccctccatgccaaaaacccgaccttactttaggcaccggtcctcattgtgatccaacttccttaaccatcctccatcaggaccaagtgggcggtcttcaagtgtttgtggacaacgaatggcgttcgattaaccccaattttgacgcttttgttgttaacattggtgacaccttcatggctctatcgaatggtatatacaagagctgcttgcaccgagcagtggtgaacagtcaaacaccaagaaaatctctcgctttctttctgtgtccaaagaatgacaagatggtaactccaccacatgaattagtggacacatgcaatccgagaatatatccagatttcacatggccgatgttgctcgaattcacacaaaagcattaccgagctgacatgaagacacttgaggtgttcacaaactggcttcatcaacgaagtcttagctga

SEQ ID NO: 24653 - protein, 385 aa, Populus tremula
MAIDCIKTMPSITTPHHHPKDQDQCKDDGKSFVFDAQVLRHQTNIPQQFIWPDNEKPNINAPELQVPLVDLGDFLSGNPVAAVEASRLVGEACKKHGFFLVVNHGVDKTLIAHAHNYVDTFFKLPLSEKQKAQRKIGESCGYASSFTGRFSSKLPWKETLSFRYQAEENSPKHIEEYFHNRMGEDFAEFGTVYQDYCEAMSTLSLGIMELLGMSLGVSREHFREFFNENDSIMRLNYYPPCQKPDLTLGTGPHCDPTSLTILHQDQVGGLQVFVDNEWRSINPNFDAFVVNIGDTFMALSNGIYKSCLHRAVVNSQTPRKSLAFFLCPKNDKMVTPPHELVDTCNPRIYPDFTWPMLLEFTQKHYRADMKTLEVFTNWLHQRSLS

SEQ ID NO: 24654 - DNA, 1158 bp, Populus tremula
  CDS (1)..(1158)
atggcaatagattgcatcaaaagcatgccatccataaccacccctcaccaccacccaaaagatcaggatcaatgcaaagatgatggcaagtcttttgtctttgatgcacaagttcttcgacaccagacaaacataccccagcagttcatttggccagaccatgaaaagcctaatattaatgcacctgaactccaagtcccgcttgtagacttgggtgatttcctctctggtaaccctgttgctgcagtggaagcttcaagacttgttggtgaagcatgtaaaaaacatggtttctttctagttgttaatcatggagtcgataaaacactcattgcccatgctcataattacgttgacaccttcttcaaatttccactttctgagaaacaaaaggcccagagaaagattggcgagtcctgtggatatgctagcagctttactggcaggttttcctctaaacttccatggaaagaaacgctttcttttcgctacaaagctgaggagaattcatcaaaacacatcgaggaatactttcacaacagaatgggggaagatttcgctgagttcgggacggtgtatcaggactactgtgaggccatgagcactttgtcactagggatcatggagctactaggaatgagcctcggtgtgagcagagaacatttcagggaattctttaatgagaatgattcaataatgaggctcaactactaccctccatgccaaaaacctgaccttactttaggcaccggtcctcattgtgatccaacttccttaaccatcctccatcaggaccaagtgggcggtcttcaagtgtttgtggacaacgaatggcgttcgattaaccccaattttgacgcttttgttgttaacattggtgacaccttcatggctctatcgaatggtatatacaagagctgtttgcaccgagcagtggtgaacagccaaacaccaagaaaatctctcgctttctttctgtgtccaaagaatgacaagatggtaactccaccacatgaattagtggacacatgcaatccgagaatatatccagatttcacatggccgatgttgctcgaattcacacaaaagcattaccgagctgacatgaagacacttgaggtgttcacaaactggcttcatcaacgaagtcttagctga

SEQ ID NO: 24655 - protein, 385 aa, Populus tremula
MAIDCIKSMPSITTPHHHPKDQDQCKDDGKSFVFDAQVLRHQTNIPQQFIWPDHEKPNINAPELQVPLVDLGDFLSGNPVAAVEASRLVGEACKKHGFFLVVNHGVDKTLIAHAHNYVDTFFKFPLSEKQKAQRKIGESCGYASSFTGRFSSKLPWKETLSFRYKAEENSSKHIEEYFHNRMGEDFAEFGTVYQDYCEAMSTLSLGIMELLGMSLGVSREHFREFFNENDSIMRLNYYPPCQKPDLTLGTGPHCDPTSLTILHQDQVGGLQVFVDNEWRSINPNFDAFVVNIGDTFMALSNGIYKSCLHRAVVNSQTPRKSLAFFLCPKNDKMVTPPHELVDTCNPRIYPDFTWPMLLEFTQKHYRADMKTLEVFTNWLHQRSLS

SEQ ID NO: 24656 - DNA, 1158 bp, Populus tremula
  CDS (1)..(1158)
atggcaatagattgcatcaaaaccatgccatccataaccacccctcaccaccacccaaaagatcaggatcaatgcaaagatgatggcaagtcttttgtctttgatgcacaagttcttcgacaccagacaaacataccccagcagttcatttggccagacaatgaaaagcctaatattaatgcacctgaactccaagtcccgcttgtagacttgggtgatttcctctctggtaaccctgttgctgcagtggaagcttcaagacttgttggtgaagcatgtaaaaaacatggtttctttctagttgttaatcatggagttgataaaacactcattgcccatgctcataattacgttgacaccttcttcaaattgccactttctgagaaacaaaaggcccagagaaagattggcgagtcctgtggatatgctagcagctttactggcaggttttcctctaaacttccatggaaagaaacgctttcttttcgctacaaagctgaggagaattcaccaaaacacatcgaggaatactttcacaacagaatgggggaagatttcgctgagttcgggacggtgtatcaggactactgtgaggccatgagcacttcgtcactagggatcatggagctattaggaatgagcctcggtgtgagcagagaacatttcagggaattctttaatgagaatgattcaataatgaggctcaactactaccctccatgccaaaaacccgaccttactttaggcaccggtcctcattgtgatccaacttccttaaccatcctccatcaggaccaagtgggcggtcttcaagtgtttgtggacaacgaatggcgttcgattaaccccaattttgacgcttttgttgttaacattggtgacaccttcatggctctatcgaatggtatatacaagagctgcttgcaccgagcagtggtgaacagtcaaacaccaagaaaatctctcgctttctttctgtgtccagagaatgacaagatggtaactccaccacatgaattagtggacacatgcaatccgagaatatatccagatttcacatggccgatgttgctcgaattcacacaaaagcattaccgagctgacatgaagacacttgaggtgttcacaaactggcttcatcaacgaagttttagctga

SEQ ID NO: 24657 - protein, 385 aa, Populus tremula
MAIDCIKTMPSITTPHHHPKDQDQCKDDGKSFVFDAQVLRHQTNIPQQFIWPDNEKPNINAPELQVPLVDLGDFLSGNPVAAVEASRLVGEACKKHGFFLVVNHGVDKTLIAHAHNYVDTFFKLPLSEKQKAQRKIGESCGYASSFTGRFSSKLPWKETLSFRYKAEENSPKHIEEYFHNRMGEDFAEFGTVYQDYCEAMSTSSLGIMELLGMSLGVSREHFREFFNENDSIMRLNYYPPCQKPDLTLGTGPHCDPTSLTILHQDQVGGLQVFVDNEWRSINPNFDAFVVNIGDTFMALSNGIYKSCLHRAVVNSQTPRKSLAFFLCPENDKMVTPPHELVDTCNPRIYPDFTWPMLLEFTQKHYRADMKTLEVFTNWLHQRSFS

SEQ ID NO: 24658 - DNA, 1158 bp, Populus tremula
  CDS (1)..(1158)
atggcaatagattgcatcaaaaccatgccatccataaccacccctcaccaccacccgaaagatcaggatcaatgcaaagatgatggcaagtcttttgtctttgatgcacaagttcttcgacaccagacaaacataccccagcagttcatttggccagacaatgaaaagcctaatattaatgcacctgaactccaagtcccgcttgtagacttgggtgatttcctctctggtaaccctgttgctgcagtggaagcttcaagacttgttggtgaagcatgtaaaaaacatggtttctttctagttgttaatcatggagttgataaaacactcattgcccatgctcataattacgttgacaccttcttcaaattgccactttctgagaaacaaaaggcccagagaaagattggcgagtcctgtggatatgctagcagctttactggcaggtttccctctaaacttccatggaaagaaacgctttcttttcgctaccaagctgaggagaattcaccaaaacacatcgaggaatactttcacaacagaatgggggaagatttcgctgagttcgggacggtgtatcaggactactgtgaggccatgagcactttgtcactagggatcatggagctattaggaatgagcctcggtgtgagcagagaacatttcagggaattctttaatgagaatgattcaataatgaggctcaactaccaccctccatgccaaaaacccgaccttactttaggcaccggtcctcattgtgatccaacttccttaaccatcctccatcaggaccaagtgggcggtcttcaagtgtttgtggacaacgaatggcgttcgattaaccccaattttgacgcttttgttgttaacattggtgacaccttcacggctctatcgaatggtatatacaagagctgcttgcaccgagcagtggtgaacagtcaaacaccaagaaaatctctcgctttctttctgtgtccaaagaatgacaagatggtaactccaccacatgaattagtggacacatgcaatccgagaatatatccagatttcacatggccgatgttgctcgaattcacacaaaagcattaccgagctgacatgaagacacttgaggtgttcacaaactggcttcatcaacgaagttttagctga

SEQ ID NO: 24659 - protein, 385 aa, Populus tremula
MAIDCIKTMPSITTPHHHPKDQDQCKDDGKSFVFDAQVLRHQTNIPQQFIWPDNEKPNINAPELQVPLVDLGDFLSGNPVAAVEASRLVGEACKKHGFFLVVNHGVDKTLIAHAHNYVDTFFKLPLSEKQKAQRKIGESCGYASSFTGRFPSKLPWKETLSFRYQAEENSPKHIEEYFHNRMGEDFAEFGTVYQDYCEAMSTLSLGIMELLGMSLGVSREHFREFFNENDSIMRLNYHPPCQKPDLTLGTGPHCDPTSLTILHQDQVGGLQVFVDNEWRSINPNFDAFVVNIGDTFTALSNGIYKSCLHRAVVNSQTPRKSLAFFLCPKNDKMVTPPHELVDTCNPRIYPDFTWPMLLEFTQKHYRADMKTLEVFTNWLHQRSFS

SEQ ID NO: 24660 - DNA, 1158 bp, Populus tremula
  CDS (1)..(1158)
atggcaatagattgcatcaaaaccatgccatccataaccacccctcaccaccacccaaaagatcaggatcaatgcaaagatgatggcaagtcttttgtctttgatgcacaagttcttcgacaccagacaaacataccccagcagttcatttggccagacaatgaaaagcctaatattaatgcacctgaactccaagtcccgcttgtagacttgggtgatttcctctctggtaaccctgttgctgcagtggaagcttcaagacttgttggtgaagcatgtaaaaaacatggtttctttctagttgttaatcatggagtcgataaaacactcattgcccatgctcataattacgttgacaccttcttcaaattgccactttctgagaaacaaaaggcccagagaaagattggcgagtcctgtggatatgctagcagctttactggcaggttttcctctaaacttccatggaaagaaacgctttcttttcgctacaaagctgaggagaattcatcaaaacacatcgaggaatactttcacaacagaatgggggaagatttcgctgagttcgggacggtgtatcaggactactgtgaggccataagcactttgtcactagggatcatggagctattaggaatgagcctcggtgtgagcagagaacatttcagggaattctttaatgagaatgattcaataatgaggctcaactactaccctccatgccaaaaacccgaccttactttaggcaccggtcctcattgtgatccaacttccttaaccatcctccatcaggaccaagtgggcggtcttcaagtgtttgtggacaacgaatggcgttcgattaaccccaattttgacgcttttgttgttaacattggtgacaccttcatggctctatcgaatggtatatacaagagctgtttgcaccgagcagtggtgaacagccaaacaccaagaaaatctctcgctttctttctgtgtccaaagaatgacaagatgataactccaccacatgaattagtggacacatgcaatccgagaatatatccagatttcacatggccgatgttgctcgaattcacacaaaagcattaccgagctgacatgaagacacttgaggtgttcacaaactggcttcatcaacgaagtcttagctga

SEQ ID NO: 24661 - protein, 385 aa, Populus tremula
MAIDCIKTMPSITTPHHHPKDQDQCKDDGKSFVFDAQVLRHQTNIPQQFIWPDNEKPNINAPELQVPLVDLGDFLSGNPVAAVEASRLVGEACKKHGFFLVVNHGVDKTLIAHAHNYVDTFFKLPLSEKQKAQRKIGESCGYASSFTGRFSSKLPWKETLSFRYKAEENSSKHIEEYFHNRMGEDFAEFGTVYQDYCEAISTLSLGIMELLGMSLGVSREHFREFFNENDSIMRLNYYPPCQKPDLTLGTGPHCDPTSLTILHQDQVGGLQVFVDNEWRSINPNFDAFVVNIGDTFMALSNGIYKSCLHRAVVNSQTPRKSLAFFLCPKNDKMITPPHELVDTCNPRIYPDFTWPMLLEFTQKHYRADMKTLEVFTNWLHQRSLS

SEQ ID NO: 24662 - DNA, 1158 bp, Populus tremula
  CDS (1)..(1158)
atggcaatagattgcatcaaaaccatgccatccataaccacccctcaccaccacccaaaagatcaggatcaatgcaaagatgatggcaagtcttttgtctttgatgcacaagttcttcgacaccagacaaacataccccagcagttcatttggccagacaatgaaaagcctaatattaatgcacctgaactccaagtcccgcttgtagacttgggtgatttcctctctggtaaccctgttgctgcagtggaagcttcaagacttgttggtgaagcatgtaaaaaacatggtttctttctagttgttaatcatggagttgataaaacactcattgcccatgctcataattacgttgacaccttcttcaaattgccactttctgagaaacaaaaggcccagagaaagattggcgagtcctgtggatatgctagcagctttactggcaggttttcctctaaacttccatggaaagaaacgctttcttttcgctaccaagctgaggagaattcaccaaaacacatcgaggaatactttcacaacagaatgggggaagatttcgctgagttcgggacggtgtatcaggactactgtgaggccatgagcactttgtcactagggatcatggagctattaggaatgagcctcggtgtgagcagagaacatttcagggaattctttaatgagaatgattcaataatgaggctcaactactaccctccatgccaaaaacccgaccttactttaggcaccggtcctcattgtgatccaacttccttaaccatcctccatcaggaccaagtgggcggtcttcaagtgtttgtggacaacgaatggcgttcgattaaccccaattttgacgcttttgttgttaacattggtgacaccttcatggctctatcgaatggtatatacaagagctgtttgcaccgagcagtggtgaacagccaaacaccaagaaaatctctcgctttctttctgtgtccaaagaatgacaagatggtaactccaccacatgaattagtggacacatgcaatccgagaatatatccagatttcacatggccgatgttgctcgaattcacacaagagcattaccgagctgacatgaagacacttgaggtgttcacaaactggcttcatcaacgaagttttagctga

SEQ ID NO: 24663 - protein, 385 aa, Populus tremula
MAIDCIKTMPSITTPHHHPKDQDQCKDDGKSFVFDAQVLRHQTNIPQQFIWPDNEKPNINAPELQVPLVDLGDFLSGNPVAAVEASRLVGEACKKHGFFLVVNHGVDKTLIAHAHNYVDTFFKLPLSEKQKAQRKIGESCGYASSFTGRFSSKLPWKETLSFRYQAEENSPKHIEEYFHNRMGEDFAEFGTVYQDYCEAMSTLSLGIMELLGMSLGVSREHFREFFNENDSIMRLNYYPPCQKPDLTLGTGPHCDPTSLTILHQDQVGGLQVFVDNEWRSINPNFDAFVVNIGDTFMALSNGIYKSCLHRAVVNSQTPRKSLAFFLCPKNDKMVTPPHELVDTCNPRIYPDFTWPMLLEFTQEHYRADMKTLEVFTNWLHQRSFS

SEQ ID NO: 24664 - DNA, 1110 bp, Hordeum vulgare
  CDS (1)..(1110)
atgccgacgccgtcgcacctgagcaaggacccgcactacttcgacttccgggcggcgcggcgggtgccggagacacacgcgtggccggggctgcacgaccacccggtggtggacggcggcggcgcgggcggagggccggacgcggtgccggtggtggacatgcgcgacccgtgcgccgcggaggcggtggcgctggccgcgcaggactggggcgccttcctcttgcagggccacggcgtcccgttggagctgctggcccgcgtggaggccgcgatagcgggcatgttcgcgctgccggcgtcggagaagatgcgcgccgtgcggcggcccggcgactcgtgcggctacgggtcgccgcccatctcctccttcttctccaagtgcatgtggtccgagggctacaccttctccccggccaacctccgctccgacctccgcaagctctggcccaaggccggccacgactaccgccacttctgtgccgtgatggaggagttccacagggagatgcgcgttctggccgacaagctgctggagctgttcctggtggccctcgggctcaccggcgagcaggtcgccgccgtcgagtcggagcacaagatcgccgagaccatgaccgccacaatgcacctcaactggtaccccaagtgcccggacccgaagcgagcgctgggcctgatcgcgcacacggactcgggcttcttcaccttcgtgctccagagcctggtgcccgggctgcagctgttccggcacggccccgaccgttgggtgacggtgcccgccgtgccgggcgccatggtcgtcaacgtcggcgacctcttccacatcctcaccaatggccgcttccacagcgtctaccaccgcgccgtcgtcaaccgcgacagcgaccggatatcgctggggtacttcctcggcccgcccgcccacgttaaggtggcgccgctcagggaggccctcgccggcacgcccgctgcctaccgcgccgtcacgtggcccgagtacatgggcgtgcgcaagaaggccttcaccaccggcgcctccgcgctcaagatggtcgccatctccaccgacgacgccgccgacgtcctccccgacgtcctctcgtcgtag

SEQ ID NO: 24665 - protein, 369 aa, Hordeum vulgare
MPTPSHLSKDPHYFDFRAARRVPETHAWPGLHDHPVVDGGGAGGGPDAVPVVDMRDPCAAEAVALAAQDWGAFLLQGHGVPLELLARVEAAIAGMFALPASEKMRAVRRPGDSCGYGSPPISSFFSKCMWSEGYTFSPANLRSDLRKLWPKAGHDYRHFCAVMEEFHREMRVLADKLLELFLVALGLTGEQVAAVESEHKIAETMTATMHLNWYPKCPDPKRALGLIAHTDSGFFTFVLQSLVPGLQLFRHGPDRWVTVPAVPGAMVVNVGDLFHILTNGRFHSVYHRAVVNRDSDRISLGYFLGPPAHVKVAPLREALAGTPAAYRAVTWPEYMGVRKKAFTTGASALKMVAISTDDAADVLPDVLSS

SEQ ID NO: 24666 - DNA, 1146 bp, Hordeum vulgare var
  CDS (1)..(1146)
atgccgtcgacgccgccgtcgcagctgaacaaggacccgcacaaccgctacttcgacttgggggccgcgcgggaggtgccagacacgcatgcgtgggacgggcagcacgagctcccggtggtggacggtggcgtcggggccggggacgacgccgtgccggtggtggacatgcgggatccacgggcggctgaggcggtggcccgtgcgtcggagcagtggggagcgttcctgctcgagggccacggcgtgccgaccgagctgctggcgcgcgtcgaggccgggatcgccggcatgttcgcgctgccgacgccggagaagatgcgcgcagcgcggcacgacggcgacctctacggctacgggccgccgctcatcgcctcctacgtctccaagaacatgtggtccgagggctacaccctgaccccggcgaacctccacgccgagttccgcaagatctggcccgacgccggccagcactaccgccacttctctggcgtgatggaggagttcctgaaggagatgcgttcgctggccaacaggctgatggagctgttcctcgtagcgcttgggctcaccgccgagcagatcgccggcgtcgaggcggagcacaacctcaccgagagcatgaccgagacaatgcacctcaactggtaccccaagtgccctgacccgacgcgagcgctgggcctgaaagggcacacggactcggggttcttcacgttcgtgctgcagagccaggtcccggggctacacctgttccggcacgggccgccggtggacaggtgggtggaggtgccggccgtgccgggagcgctcatcgtcaacatcggcgacctcttccagatcctcaccaacggccgcttccgaagcgtgtaccaccgcgtcgtcgtcaaccgtgagagggagcgcatttcggtcgcctacttcctcatcccacccgccgacgtcaaggtggcgccgctcaaggaagtcgtgggcggcggcaagcccgcctaccgcgccctcacctggtcggagtccatcgtcgtgcgcaaggaggccttcgccaaccatggcgccgacctcgagttcggcaaaggacgcaccgcgctcgacatgctctccatcagctccgacgaggacgatggcgccgagcaccaccgtgactga

SEQ ID NO: 24667 - protein, 381 aa, Hordeum vulgare var
MPSTPPSQLNKDPHNRYFDLGAAREVPDTHAWDGQHELPVVDGGVGAGDDAVPVVDMRDPRAAEAVARASEQWGAFLLEGHGVPTELLARVEAGIAGMFALPTPEKMRAARHDGDLYGYGPPLIASYVSKNMWSEGYTLTPANLHAEFRKIWPDAGQHYRHFSGVMEEFLKEMRSLANRLMELFLVALGLTAEQIAGVEAEHNLTESMTETMHLNWYPKCPDPTRALGLKGHTDSGFFTFVLQSQVPGLHLFRHGPPVDRWVEVPAVPGALIVNIGDLFQILTNGRFRSVYHRVVVNRERERISVAYFLIPPADVKVAPLKEVVGGGKPAYRALTWSESIVVRKEAFANHGADLEFGKGRTALDMLSISSDEDDGAEHHRD

SEQ ID NO: 24668 - DNA, 1068 bp, Hordeum vulgare var
  CDS (1)..(1068)
atggccagcctcgtgttcgacgcggcggtgctgagccggaaggaggacatcccgccgcagttcatctggccagccgacgaggccccgtccgtggacggcgtggaggagatcgtcgtcccggtcgtcgacctcgccgggttcctggccggcgacgacgctggcctcaatgagctcgtcgcggcgtgcgagaggcacgggttcttccaggtcgtgaaccacggcgtggacccggcgctgctcgccaaggcgtaccggtgctgcgacgccttctacgcgctgcccctcgccgagaagcagcgcgcgcagcggcgcctcggcgagaaccacggctacgccggcagcttcgtggggcggttcggcagcaagctcccctggaaggagaccatgtccttcaactgctccgccgcgccggagagcgcccgcaaggtcgtcgactacttcgtcggcgtcctcggcgaggagtaccgtcacatgggggatgtgtggcaggaatactgcaacgagatgacacgcctggcactggacgtcacggaggtcctggcggcgtgcctgggcctcgaccgcggcgcgctgcgcggcttctttgccggcgacgactccctgatgcggctgaaccactacccgccatgcaagaagcctcacctgacgctgggcacgggcccgcaccacgacccgacggcgctgacgctgctccaccaggacgacgtcggcgggctggaggtgttcaccggcggcgcgtggcgtgccgtgcggccccggagcgacgccttcgtcgtcaacatcggcgacaccttctccgcgctcaccaacgggcgccacgtcagctgcctccaccgcgccgtcgtcaacggcagcctggcccgcaggtcgctcaccttcttcctcaacccgcagctggaccgccccgtcacgccgccggccgagctgctcgccattgatggacgcccgcgcgtgtacccagacttcacttggcgtgagttcctcgagttcacgcagaagcactaccgctctgactcgaggaccctggatgccttcgtcgcttggatcaatcagggccacacaggctaa

SEQ ID NO: 24669 - protein, 355 aa, Hordeum vulgare var
MASLVFDAAVLSRKEDIPPQFIWPADEAPSVDGVEEIVVPVVDLAGFLAGDDAGLNELVAACERHGFFQVVNHGVDPALLAKAYRCCDAFYALPLAEKQRAQRRLGENHGYAGSFVGRFGSKLPWKETMSFNCSAAPESARKVVDYFVGVLGEEYRHMGDVWQEYCNEMTRLALDVTEVLAACLGLDRGALRGFFAGDDSLMRLNHYPPCKKPHLTLGTGPHHDPTALTLLHQDDVGGLEVFTGGAWRAVRPRSDAFVVNIGDTFSALTNGRHVSCLHRAVVNGSLARRSLTFFLNPQLDRPVTPPAELLAIDGRPRVYPDFTWREFLEFTQKHYRSDSRTLDAFVAWINQGHTG

SEQ ID NO: 24670 - DNA, 1083 bp, Hordeum vulgare var
  CDS (1)..(1083)
atggtgcagccggtgttcgacgcggcggtgctgagcgggcggacggacatcccgtcgcagttcatctggccggagggggagagcccgacaccggacgccaccgaggagatgcacgtcccgctcatcgacatcggcggcatgctctccggcgacccccgcgcggccgccgaggtgacgcgcctcgtcggcgaggcctgcgagcggcacggcttcttccaggtcgtcaaccacggcatcgacgcccagctgctggccgacgcgcaccgctgcgtggacgccttcttcaccatgcccctcccggagaagcagcgcgctctgcgccgccccggcgagtcgtgcggctacgccagcagcttcaccggccggttcgcgtccaagctgccctggaaggagaccctctccttccggtcctgcccctccgaccccgccctcgtcgtcgactacatcgtcgccaccctcggcgaggaccaccgccgcctcggggaggtgtacgctcgctactgctcggagatgagccggctgtcgctggagatcatggaggtgctcggggagagcctgggggtcggccgcgcccactaccggcgcttcttcgagggcaacgagtccatcatgcgcctcaactactacccgccgtgccagcggccgttggagacgctgggcacgggcccgcattgcgacccgacgtcgctgaccatcctccaccaggacgacgtgggcggcctgcaggtgcataccgacggccggtggcgctccatccggccgcgggccgacgccttcgtcgtcaacatcggcgacaccttcatggcgctctccaacgggcggtacaagagctgcctccaccgcgccgtcgtcaacagccgcgtcccacgcaagtcgctggccttcttcctgtgccccgagatggacaaggtggtggcgccgccggggacgttggtggacgccgccaacccgcgcgcctacccggacttcacgtggcggtcgctgctcgacttcacgcagaagcactaccgcgccgacatgaagacgctcgaggtcttctcctcgtgggtcgtccagcagcagcccgccagcgccaggacatga

SEQ ID NO: 24671 - protein, 360 aa, Hordeum vulgare var
MVQPVFDAAVLSGRTDIPSQFIWPEGESPTPDATEEMHVPLIDIGGMLSGDPRAAAEVTRLVGEACERHGFFQVVNHGIDAQLLADAHRCVDAFFTMPLPEKQRALRRPGESCGYASSFTGRFASKLPWKETLSFRSCPSDPALVVDYIVATLGEDHRRLGEVYARYCSEMSRLSLEIMEVLGESLGVGRAHYRRFFEGNESIMRLNYYPPCQRPLETLGTGPHCDPTSLTILHQDDVGGLQVHTDGRWRSIRPRADAFVVNIGDTFMALSNGRYKSCLHRAVVNSRVPRKSLAFFLCPEMDKVVAPPGTLVDAANPRAYPDFTWRSLLDFTQKHYRADMKTLEVFSSWVVQQQPASART

SEQ ID NO: 24672 - DNA, 1089 bp, Eustoma grandiflorum
  CDS (1)..(1089)
atgggaattccggttgtccccagagtagaaagcttggccagaagcggcacccaagaaattccaaaagaatacgtgaggactaaagaagagctaacaagcattgcagatgtttttgctgaagagaaaaacgacgaggggcctcaagtacccatgattgatataaaagacatcgagtcagaagacatcagtgttagagaaaggtgtcgtgatgtattgaacaaagctgcaatggagtggggagtgatgcaccttgtcaatcatggtatatcaagtgatctgattcgtcgcgtaaagtcggctggacaagccttctttgatcttccagttgaggagaaagaaaagtatgccaatgatcaggcttcagggaatgtccaaggatatggaagcaaacttgctaataatgcaagtgggcagctggaatgggaggactattttttccactgcattttccctgaagagaagcgtgacatgactatttggccaaagactccagaggattacataccatcaacaaatgagtatgcaaagcaattgagagcactggctagcaagattcttgctgtgttgtctcttggcctaggattagaaccaggcaggctagaaaaagaagttggtggcttggaagagctaattctacaaaggaaaatcaattactatcccaagtgtccccaaccagaactggctctaggcgtggaggcacacactgacattagcgcgcttactttcatcctccacaatatggttcctggcttgcaattgttctatgaaggcaaatggatcacagccaaatgtgtcccgaattcgattatcatgcatgtaggtgacaccattgagattcttagcaatggcaagtacaaaagtatccttcatagaggacttgtgaacaaagagaaagtaaggatttcttgggctgttttctgtgagccaccaaaggagaagatcgtcctcaagccactacctgagactgtgtctgaatccgagccggctcggttccctcctcgcacgtttgctgagcatatcaagcacaagctcttcaggaaaagtgaagaaactaatgaagataacaatttaccaaagggtagttcctag

SEQ ID NO: 24673 - protein, 362 aa, Eustoma grandiflorum
MGIPVVPRVESLARSGTQEIPKEYVRTKEELTSIADVFAEEKNDEGPQVPMIDIKDIESEDISVRERCRDVLNKAAMEWGVMHLVNHGISSDLIRRVKSAGQAFFDLPVEEKEKYANDQASGNVQGYGSKLANNASGQLEWEDYFFHCIFPEEKRDMTIWPKTPEDYIPSTNEYAKQLRALASKILAVLSLGLGLEPGRLEKEVGGLEELILQRKINYYPKCPQPELALGVEAHTDISALTFILHNMVPGLQLFYEGKWITAKCVPNSIIMHVGDTIEILSNGKYKSILHRGLVNKEKVRISWAVFCEPPKEKIVLKPLPETVSESEPARFPPRTFAEHIKHKLFRKSEETNEDNNLPKGSS

SEQ ID NO: 24674 - DNA, 1062 bp, Daucus carota
  CDS (1)..(1062)
atgccttcaagagtttcagattctctggcccttcaccctgtattccaacataaccacaaccaatatttggacttgaactccctcgaagagttgcctgattcgcatgcatggtcttctgagctagacaagctttcgtctagtccagatgatcatggcgagtccaacttacctgtaatcgacttaagtgactccataaatggccccaaacatcttgtccatgcatgcaaaacatggggagctttccaattaataaaccatggaatctctaaccaacttatagacagcatggaggctgctacaagaaagctcttctcactgcctattgaacagaagctcaaagctgagcgccaagaagggggttgtggctatggccctttccggatctcatctttctttcccaaacgcatgtggtctgaaggcttcaccattgttggctctcctcttcaacatgctcgactactttggccagaggattactctgttttctgtgatgtaacagaagaataccagaaggaaatgaaaaaactagctggaaagattatgtggataatgctggaggcactaggcataacaaaggaagacatcatatgggcagggccaaatggagaatttgaggcttctggagctgccttacagctgaactcatacccggtctgtcccgacccggatcgggccatgggtctagctgatcatactgattccactcttctctcaatcctgcaccaaagcaaccaaagtgggctacaagtgtttcaggaagaaatgggatgggtcactgtccctcctgtcgaaggagcattagtagtgaacattggtgatctgctccacatactaaccaacgggtcgtatccgtcagtgctccaccgggtcactgtcaaccgggagcgacaccgttattccatggcttacctgtatggtccaccacacagtgctgagatctcgcctctatccaaattagtggatcatcagcatccacctctatataggccggtgacttggagtgagtaccttggaatgaaagcaattcttttctataacgcactttcttctcttaggctttga

SEQ ID NO: 24675 - protein, 353 aa, Daucus carota
MPSRVSDSLALHPVFQHNHNQYLDLNSLEELPDSHAWSSELDKLSSSPDDHGESNLPVIDLSDSINGPKHLVHACKTWGAFQLINHGISNQLIDSMEAATRKLFSLPIEQKLKAERQEGGCGYGPFRISSFFPKRMWSEGFTIVGSPLQHARLLWPEDYSVFCDVTEEYQKEMKKLAGKIMWIMLEALGITKEDIIWAGPNGEFEASGAALQLNSYPVCPDPDRAMGLADHTDSTLLSILHQSNQSGLQVFQEEMGWVTVPPVEGALVVNIGDLLHILTNGSYPSVLHRVTVNRERHRYSMAYLYGPPHSAEISPLSKLVDHQHPPLYRPVTWSEYLGMKAILFYNALSSLRL

SEQ ID NO: 24676 - DNA, 1152 bp, Daucus carota
  CDS (1)..(1152)
atggcagcctcaacattcctatatcatcgtcatcaacaaccattctatcccaagtcactagttttcgatccctcgattattaaaaacgagctgaacatacctcaagagtttatatggcctgaccacgaaaaaccaagctcacatactccacaactcgatgttcctctcgtcgacgtaggaggctttctctctggtgatcctgttgcagctgagaaagcttcgaaactcgtgggacaagcatgccgagagcatggattcttcctcgtgacgaaccacggggttgatggaaacctaatatcggatgctcacaagtctatggacttgtttttcgagcttccgcttatggaaaaacaaaaggctcaaagaaagctgggcgaacattgtgggtatgctagtagcttcacagggaggttttcttccaagttgccgtggaaggaaacactttcattcgaacactctactaagaagacctcatccaccttggtcgaggattattttgcaagtgcactaggcaaagactatgctaaacttgggaaggtttaccaagattactgcaacgcgatgagcaggctttcgtttggcatcatggagttgctggcaatcagccttggcatagatcggtctcattttaagaacttttttgaggagaataactccataatgaggctcaattactatccaacttgccggagaccagagcttactctaggaactggacctcattgcgatcccacttcactaaccattcttcaccaagatgatgttggcggccttgaggttttcgtggacaaccaatggcagtctattcctcctaaccccagctcctttgttgttaacctaggcgacactttcatggctctatcaaatggaaaatacaaaagttgcttgcacagagcggtggtaaacaagcagaatcctagaagatctctggctttctttttgtgcccacaaaaagataaggtggtgaggccaccaacagagctggtggaccaagacaaccccagattatatcccgattttacgtggtcggctttgcttgaattcacacaaaaacattacagagctgacatgaacactctccaagctttttcctcatggctaactactttcaacaacaaagagcatctgggagagggacatgttataaattga

SEQ ID NO: 24677 - protein, 383 aa, Daucus carota
MAASTFLYHRHQQPFYPKSLVFDPSIIKNELNIPQEFIWPDHEKPSSHTPQLDVPLVDVGGFLSGDPVAAEKASKLVGQACREHGFFLVTNHGVDGNLISDAHKSMDLFFELPLMEKQKAQRKLGEHCGYASSFTGRFSSKLPWKETLSFEHSTKKTSSTLVEDYFASALGKDYAKLGKVYQDYCNAMSRLSFGIMELLAISLGIDRSHFKNFFEENNSIMRLNYYPTCRRPELTLGTGPHCDPTSLTILHQDDVGGLEVFVDNQWQSIPPNPSSFVVNLGDTFMALSNGKYKSCLHRAVVNKQNPRRSLAFFLCPQKDKVVRPPTELVDQDNPRLYPDFTWSALLEFTQKHYRADMNTLQAFSSWLTTFNNKEHLGEGHVIN

SEQ ID NO: 24678 - DNA, 1146 bp, Daucus carota
  CDS (1)..(1146)
atggccacttctcaatcatccaggcctccacataatttccaacactcctatgaagataataatcatcattctcaagtagtatttgacgcctcaattattcaaaaagaaacaactatacccaaagagtttatctggcctgaccatgagaaaccttcactaaatactcaagaactaaaggtccctctcatcgacttaggtgctttcctttcaggtgatccttcggcagcaaaggaatcatctattctcataggccaagcctgtcaagagcatggattctttatggtggttaatcatggggttgatacaaacttgatatctgatgcccataaattcatgaatttgtttttcgaccttcctctgtatgtaaaacaaaaggctcagagaaaacttggtgaaaattttggttatgctagtagcttcactggaaggtttgcctccaagttgccatggaaggaaacattttcatttcaatactgtgctgatgagaggatgtcctccaccacggttaaagattactttacaaacaaattgggacctgactttgcaaaactcgggaaagtatatcaagattatagtcatgccatgagtacactttcactcaagattatagacttgctggaaatcagcctcggtgtaagccgttctcacttcaagaatctctttgaggaccacgattccatcgtcagacttaattactatccaccctgccagaaaccggagcttactttaggaactggacctcattctgatccaacttctctaaccatccttcaccaagatcatgttgctgggcttgaagtgttagtcgatgatcaatggcggtgcattcttcctaacactagtgccttcgttatcaatataggcgacactttgatggctatgacgaatggaagatacaaaagttgcttgcacagagcagtagtaaacaacgaaaccgctaggaaatcaattgctttctttctgtgtccgaggaaagataaggtggttatcccacctgcagagttggtggaccaaaaaaacccaagattatatccggatttcacctgggcagagctactccagtttacgcagatgcactacagagctgacatgaacacccttgacgcattctctacttggcttctcaccaaaaacaacagagaatag

SEQ ID NO: 24679 - protein, 381 aa, Daucus carota
MATSQSSRPPHNFQHSYEDNNHHSQVVFDASIIQKETTIPKEFIWPDHEKPSLNTQELKVPLIDLGAFLSGDPSAAKESSILIGQACQEHGFFMVVNHGVDTNLISDAHKFMNLFFDLPLYVKQKAQRKLGENFGYASSFTGRFASKLPWKETFSFQYCADERMSSTTVKDYFTNKLGPDFAKLGKVYQDYSHAMSTLSLKIIDLLEISLGVSRSHFKNLFEDHDSIVRLNYYPPCQKPELTLGTGPHSDPTSLTILHQDHVAGLEVLVDDQWRCILPNTSAFVINIGDTLMAMTNGRYKSCLHRAVVNNETARKSIAFFLCPRKDKVVIPPAELVDQKNPRLYPDFTWAELLQFTQMHYRADMNTLDAFSTWLLTKNNRE

SEQ ID NO: 24680 - DNA, 1164 bp, Gossypium hirsutum
  CDS (1)..(1164)
atggtacattgtctgccaaaggtttttgtcattcaagacaagccgatgcttccatcaactgctgctgtcgcaaaggatgagcatcggcctttagctttcgatgcatcgatccttggatctgaatccaacataccctctcagttcatatggcctgacgacgagaagccatgcctggatgccccggcacttgtaattccaaccattgacttgggagctttcttgcttggggactctcttgctgtatcaaaagcggcagaggtggtgaatgaggcatgcaagaagcatgggttttttctggttgtaaaccatggggtggattcagggcttatagacaaagcccatcagtacatggaccgcttcttcagcctacaactctctgagaagcaaaaggctaagagaaaagtaggagaaagctatgggtatgcaagcagtttcgttggcaggttttcctccaagttgccatggaaagagacactgtcttttcggtactgtcctcacactcaaaatatcgtgcaacactatatggtgaattggatgggtgaagattttagagatttcgggaggctttaccaggaatattgtgaagccatgaacaaggtttcccaagagataatggggctgctagggataagtctaggacttgaccaagcctacttcaaagactttttcgaacaaaatgattcaatcctgagactgaatcactatcccccatgccaaaagcctgagttgactctgggaaccggtccccacaccgatcccacttccttgacaatccttcatcaggatcaagttggaggccttcaggtgtttgcagatgaaaagtggcactccgttgctcccatcccaggagcttttgttgtcaacgttggcgacacattcatggctttgacaaacggtttttacaagagctgcttgcacagagcagtggtgaatactgaaacggtgagaaaatcacttgcattctttctatgtcccaagctggagagaccggtgacaccagcagctggcttagttactgccgaaaatccgaggaaatacccagacttcacttgggcagcactgctgaagttcacacagaaccattaccgtgctgacatgaaaacccttgttgcattctccaaatgggttcaagaacaagaatcgaactacaaattaataccttag

SEQ ID NO: 24681 - protein, 387 aa, Gossypium hirsutum
MVHCLPKVFVIQDKPMLPSTAAVAKDEHRPLAFDASILGSESNIPSQFIWPDDEKPCLDAPALVIPTIDLGAFLLGDSLAVSKAAEVVNEACKKHGFFLVVNHGVDSGLIDKAHQYMDRFFSLQLSEKQKAKRKVGESYGYASSFVGRFSSKLPWKETLSFRYCPHTQNIVQHYMVNWMGEDFRDFGRLYQEYCEAMNKVSQEIMGLLGISLGLDQAYFKDFFEQNDSILRLNHYPPCQKPELTLGTGPHTDPTSLTILHQDQVGGLQVFADEKWHSVAPIPGAFVVNVGDTFMALTNGFYKSCLHRAVVNTETVRKSLAFFLCPKLERPVTPAAGLVTAENPRKYPDFTWAALLKFTQNHYRADMKTLVAFSKWVQEQESNYKLIP

SEQ ID NO: 24682 - DNA, 1155 bp, Solanum demissum
  CDS (1)..(1155)
atggcaattgattgtatgatcacaagaaataacaacatgacatccaaagaaggtcaagaatatgatatcatcaaaacaaataagtcattgagttttgatgcatctttgatgaaaaatgagtcaaacataccaagccaattcatatggccagaccatgagaagccaaattgtgctagtgttactagagaactacaagtcccacttatagacttaagtggggtactttcaaatgaccctattgaaatcaagaaagcaactagacttgttaatgaagcatgtacaaaacatggttttttcttagtaactaatcatggggttgacacaaatctcataaaaaaagcccatgtttacatagacaagttctttgaattgccactttgtgagaagcaaaaagcacaaaggagggttggtgaacattgtggttatgctagtagctttattggaaggttttcatctaagttgccttggaaagaaacactctcttttcagtactctgatgagaagggctcatcacacatagttgaacaatattttcaaaggacattgggtgaaaaatttagtcatattggaaagatttatcaagaatattgcaatgccatgagcaccctttctctagggatcatggagcttttgggattgagccttggtgtgagcaagaaccacttcaaagaattctttcaagaaaatgagtccataatgagactaaattactatccaacatgtcaaaaaccagaactcactttaggaacagggcctcattgtgatcccacatcattaactattctccatcaagatagtgttggtgggcttcaagtttttgtggacaatgagtggcactccatcactccaaatttcaatgcttttgttgttaacataggcgacacattcatggcactatcaaatggaagatataaaagttgcttgcatagagcgctggtaaacaacaaagtacctagaaaatcacttactttttttctttgtcccaagaaagataaggtggtgaccccaccaattgaattggtggattccaacaatccaagaatttatccagatttcacatggccaacattattagaatttacacaaaagcaatatagagctgatatgaacactctacaaactttctcaaattggcttaaaaaaacacatccttaa

SEQ ID NO: 24683 - protein, 384 aa, Solanum demissum
MAIDCMITRNNNMTSKEGQEYDIIKTNKSLSFDASLMKNESNIPSQFIWPDHEKPNCASVTRELQVPLIDLSGVLSNDPIEIKKATRLVNEACTKHGFFLVTNHGVDTNLIKKAHVYIDKFFELPLCEKQKAQRRVGEHCGYASSFIGRFSSKLPWKETLSFQYSDEKGSSHIVEQYFQRTLGEKFSHIGKIYQEYCNAMSTLSLGIMELLGLSLGVSKNHFKEFFQENESIMRLNYYPTCQKPELTLGTGPHCDPTSLTILHQDSVGGLQVFVDNEWHSITPNFNAFVVNIGDTFMALSNGRYKSCLHRALVNNKVPRKSLTFFLCPKKDKVVTPPIELVDSNNPRIYPDFTWPTLLEFTQKQYRADMNTLQTFSNWLKKTHP

SEQ ID NO: 24684 - DNA, 1158 bp, Populus tomentosa
  CDS (1)..(1158)
atggcaatagattgcatcaaaaccatgccatccataaccacccctcaacaccacccaaaagatcaggatcaatgcaaagatgatggcaagtcttttgtttttgatgcacaaattcttcgacaccagacaaacataccccaacagttcgtttggcctgaccatgaaaagcctaatattaatgcacctgaactccaagtcccgcttgtagacttgggtgatttcctctctggcaaccctgttgctgcagtggaagcttcaagacttgttggtgaagcatgtaaaaaacatggtttctttctagttgttaatcatggagttgataaaacactcattgcccatgctcacaattacgttgacaccttcttcaaattgccactttctgagaaacaaaaggcccagagaaagattggcgagtcctgtggatatgctagcagctttactggcaggttttcctctaaacttccatggaaagaaacgctttcttttcgctacacagctgaggagaattcatcaaaacacatcgaggaatactttcataacagaatgggggaagatttcgctgaattcgggacggtgtatcaggactactgtgaggccatgagcactttgtcactagggatcatggagctattaggaatgagcctcggcgtgagcagagaacattttagggaattctttaacgagaatgattcaataatgaggctcaactactaccctccatgccaaaaacctgaccttactttaggcaccggtcctcattgtgatccaacttccttaaccatcctccatcaagaccaagtgggtggtcttcaagtgtttgtggacaacgaatggcgttcgattaaccccaattttgacgcttttgttgttaacattggtgacaccttcatggctctatcgaatggtatatacaagagctgtttgcaccgagcagtggtgaacggccaaacaccaagaaaatctctcgctttctttctgtgtccaaagaatgacaagatggtaactccaccacatgaattagtggacacatgcaatccgagaatatatccagatttcacatggcctatgttgctcgaattcacacaaaagcattaccgagctgacatgaagacacttgaggtgttcacaaactggcttcatcaacgaagttttacctga

SEQ ID NO: 24685 - protein, 385 aa, Populus tomentosa
MAIDCIKTMPSITTPQHHPKDQDQCKDDGKSFVFDAQILRHQTNIPQQFVWPDHEKPNINAPELQVPLVDLGDFLSGNPVAAVEASRLVGEACKKHGFFLVVNHGVDKTLIAHAHNYVDTFFKLPLSEKQKAQRKIGESCGYASSFTGRFSSKLPWKETLSFRYTAEENSSKHIEEYFHNRMGEDFAEFGTVYQDYCEAMSTLSLGIMELLGMSLGVSREHFREFFNENDSIMRLNYYPPCQKPDLTLGTGPHCDPTSLTILHQDQVGGLQVFVDNEWRSINPNFDAFVVNIGDTFMALSNGIYKSCLHRAVVNGQTPRKSLAFFLCPKNDKMVTPPHELVDTCNPRIYPDFTWPMLLEFTQKHYRADMKTLEVFTNWLHQRSFT

SEQ ID NO: 24686 - DNA, 1059 bp, Allium cepa
  CDS (1)..(1059)
atgcccatagaaagcgtgataattgcaccaccagctccaagagtagagaccctctcgaaatccaacctccactccattcctttggaatacatccggcccgagcacgagcgggcctgcctaggcgatgcattagaacagcttcacaactccaactccggcccacaaattccgataatcgacctcgactcacgcgactgcattgagaaagtgaccaaagcagccaaagaatggggagtcatgcacattgtgaaccatggaatctctagcgagttgatggagaaagtgcgtgcagctggcatggcttttttcaatctcccactcgaggctaaagaggaatatgctaacgatcaatctaaagggaagatccaagggtatggaagtaaactggcaaataatgcaagcgggcaactcgagtgggaggactacttttttcatctcatttttcctgatgacaaggtcgatctctccgtttggcctaaacagccttccgactacattgaaattatgcaagagtttggaagtcagctgagaatattagccagcaaaatgctatccatactttcattgggcttacaactaccaaccaaggacaggctagaacaagaactaaaaggaccagaagacttacttctccagctgaaaataaactactacccaaaatgcccccagccacatctggcattaggagtggaagcccacacggacgtgagtgccttatcgttcatactgcacaacaacgttccaggccttcaagtgttctacgagggtgaatgggtaactgcgaaactcgttccagattccttgattgtccatgttggggattcgcttgaaattttgagtaatgggatttacaaaagtgtgttgcatcgcggtttggttaataaggagaaggtgaggatttcttgggctgtgttctgtgaaccgccaaaggatgctgttgtgcttaagccattggatgaggttgtgacagacgatgcgcccgcaaggtacactcctcgcacgtttgcacagcatctggaacggaagttgtttaaaaagaaaggttggagatttggatga

SEQ ID NO: 24687 - protein, 352 aa, Allium cepa
MPIESVIIAPPAPRVETLSKSNLHSIPLEYIRPEHERACLGDALEQLHNSNSGPQIPIIDLDSRDCIEKVTKAAKEWGVMHIVNHGISSELMEKVRAAGMAFFNLPLEAKEEYANDQSKGKIQGYGSKLANNASGQLEWEDYFFHLIFPDDKVDLSVWPKQPSDYIEIMQEFGSQLRILASKMLSILSLGLQLPTKDRLEQELKGPEDLLLQLKINYYPKCPQPHLALGVEAHTDVSALSFILHNNVPGLQVFYEGEWVTAKLVPDSLIVHVGDSLEILSNGIYKSVLHRGLVNKEKVRISWAVFCEPPKDAVVLKPLDEVVTDDAPARYTPRTFAQHLERKLFKKKGWRFG

SEQ ID NO: 24688 - DNA, 1074 bp, Citrus sinensis
  CDS (1)..(1074)
atggtgactccaacagcccgaagagttgagagcttggctagaagtgggattcaagcaatcccaaaagagtatgtacgaccaaaggaagagctaatgggcattggcaatatttttgaagaagaggaaaaagatgaagggcctcaagttcccacaattgatctcaaggaaattgactctgaggacagagttgaacgcgagaaatgtcgcgaggagctcaagaaagctgccatggattggggtgttatgcaccttgttaaccatgggatttcggatgatctcactgaacgcgtcaagagagccggtcaggcctttttcgatcagccggttgaggagaaagagaagtatgccaatgagcaggcttcgggaaagattcagggttacggaagcaagctagctaataatgctagtggccagcttgagtgggaggactatttcttccaccttatttatcctgaagataaaagggatatgtccatttggcctaagactccaagcgactatacagaggctaccagtgaatacgcaaggcaactgagaagcctagcgacgaaaattctggcagtgttgtcacttggcttgggactggaagaggggaggctggaaaaggaagttggtggcctagaagagctccttcttcagatgaagatcaattactatcccaaatgccctcaaccagaactggctcttggtgttgaagctcacacagatgtgagtgcactcactttcattcttcacaacatggttccgggcctgcagctcttctacaaagacaaatgggtgactgctaaatgtgttccaaattcgatcatcttgcacattggtgacaccattgaaattctgagcaatggcgagtacaagagtattcttcacaggggacttgttaacaaggaaaaggttaggatctcatgggctgttttctgtgagccaccgaaggacaagattatcctcaagcctctcccggaaactgtctctgagcaaaagccggcaatgttccctcctcgcacctttcaacagcacattgagcacaagctgtttaggaggacgcaggatgctctcctctccgatgaagaataa

SEQ ID NO: 24689 - protein, 357 aa, Citrus sinensis
MVTPTARRVESLARSGIQAIPKEYVRPKEELMGIGNIFEEEEKDEGPQVPTIDLKEIDSEDRVEREKCREELKKAAMDWGVMHLVNHGISDDLTERVKRAGQAFFDQPVEEKEKYANEQASGKIQGYGSKLANNASGQLEWEDYFFHLIYPEDKRDMSIWPKTPSDYTEATSEYARQLRSLATKILAVLSLGLGLEEGRLEKEVGGLEELLLQMKINYYPKCPQPELALGVEAHTDVSALTFILHNMVPGLQLFYKDKWVTAKCVPNSIILHIGDTIEILSNGEYKSILHRGLVNKEKVRISWAVFCEPPKDKIILKPLPETVSEQKPAMFPPRTFQQHIEHKLFRRTQDALLSDEE

SEQ ID NO: 24690 - DNA, 1170 bp, Oryza rufipogon
  CDS (1)..(1170)
atggtggccgagcaccccacgccaccacagccgcaccaaccaccgcccatggactccaccgccggctctggcattgccgccccggcggcggcggcggtgtgcgacctgaggatggagcccaagatcccggagccattcgtgtggccgaacggcgacgcgaggccggcgtcggcggcggagctggacatgcccgtggtcgacgtgggcgtgctccgcgacggcgacgccgaggggctgcgccgcgccgcggcgcaggtggccgccgcgtgcgccacgcacgggttcttccaggtgtccgggcacggcgtcgacgccgctctggcgcgcgccgcgctcgacggcgccagcgacttcttccgcctcccgctcgccgagaagcgccgcgcgcgccgcgtcccgggcaccgtgtccggctacaccagcgcccacgccgaccgcttcgcctccaagctcccatggaaggagaccctctccttcggcttccacgaccgcgccgccgcccccgtcgtcgccgactacttctccagcaccctcggccccgacttcgcgccaatggggagggtgtaccagaagtactgcgaggagatgaaggagctgtcgctgacgatcatggaactcctggagctgagcctgggcgtggagcgaggctactacagggagttcttcgcggacagcagctcaatcatgcggtgcaactactacccgccatgcccggagccggagcggacgctcggcacgggcccgcactgcgaccccaccgccctcaccatcctcctccaggacgacgtcggcggcctcgaggtcctcgtcgacggcgaatggcgccccgtcagccccgtccccggcgccatggtcatcaacatcggcgacaccttcatggcgctgtcgaacgggaggtataagagctgcctgcacagggcggtggtgaaccagcggcgggagcggcggtcgctggcgttcttcctgtgcccgcgggaggacagggtggtgcggccgccgccgagcgccgccacgccgcggcactacccggacttcacctgggccgacctcatgcgcttcacgcagcgccactaccgcgccgacacccgcacgctcgacgccttcacgcgctggctcgcgccgccggccgccgacgccgccgcgacggcgcaggtcgaggcggccagctga

SEQ ID NO: 24691 - protein, 389 aa, Oryza rufipogon
MVAEHPTPPQPHQPPPMDSTAGSGIAAPAAAAVCDLRMEPKIPEPFVWPNGDARPASAAELDMPVVDVGVLRDGDAEGLRRAAAQVAAACATHGFFQVSGHGVDAALARAALDGASDFFRLPLAEKRRARRVPGTVSGYTSAHADRFASKLPWKETLSFGFHDRAAAPVVADYFSSTLGPDFAPMGRVYQKYCEEMKELSLTIMELLELSLGVERGYYREFFADSSSIMRCNYYPPCPEPERTLGTGPHCDPTALTILLQDDVGGLEVLVDGEWRPVSPVPGAMVINIGDTFMALSNGRYKSCLHRAVVNQRRERRSLAFFLCPREDRVVRPPPSAATPRHYPDFTWADLMRFTQRHYRADTRTLDAFTRWLAPPAADAAATAQVEAAS

SEQ ID NO: 24692 - DNA, 1158 bp, Populus alba
  CDS (1)..(1158)
atggcaatagattgcatcaaaaccatgccatccataaccacccctcaccaccacccaaaagatcaggatcaatgcaaagatgatggcaagtcttttgtctttgatgcacaagttcttcgacaccagacaaacataccccagcagttcatttggcctgaccatgaaaagcctaatactaatgcacctgaactccaagtcccgcttgtagacttgggtgatttcctctctggtaaccctgttgctgcagtggaagcttcaagacttgttggtgaagcatgtaaaaaacatggtttctttctagttgttaatcatggagttgataaaacactcattgcccatgctcataattacgttgacaccttcttcaaattgccactttctgagaaacaaaaggcccagagaaagattggcgagtcctgtggatatgctagcagctttactggcaggttttcctctaaacttccatggaaagaaacgctttcttttcgctacaaagctgaggagagttcatcaaaacacatcgaggaatactttcacaacagaatgggggaagattttgctgaattcgggacggtgtatcaggactactgtgaggccatgagcactttgtcactagggatcatggagctattaggaatgagcctcggtgtgagcagagaacatttcagggagttctttaatgagaatgattcaataatgaggctcaactactaccctccatgccaaaaacctgaccttactttaggcaccggtcctcattgtgatccaacttccttaaccatcctccatcaggaccaagtgggtggtcttcaagtgtttgtggacaacgaatggcgttcgattaaccccaattttgacgcttttgttgttaacattggtgacaccttcatggctctatcgaatggtatatacaggagctgtttgcaccgagcagtggtgaacagccaaacaccaagaaaatctctcgctttctttctgtgtccaaagaatgacaagatggtaactccaccacatgaattggtggacacatgcaatccgagaatatatccagatttcacatggcctatgttgctcgaattcacacaaaagcattaccgagctgacatgaagacacttgaggtgttcacaaactggcttcatcaacgaagtcttagctga

SEQ ID NO: 24693 - protein, 385 aa, Populus alba
MAIDCIKTMPSITTPHHHPKDQDQCKDDGKSFVFDAQVLRHQTNIPQQFIWPDHEKPNTNAPELQVPLVDLGDFLSGNPVAAVEASRLVGEACKKHGFFLVVNHGVDKTLIAHAHNYVDTFFKLPLSEKQKAQRKIGESCGYASSFTGRFSSKLPWKETLSFRYKAEESSSKHIEEYFHNRMGEDFAEFGTVYQDYCEAMSTLSLGIMELLGMSLGVSREHFREFFNENDSIMRLNYYPPCQKPDLTLGTGPHCDPTSLTILHQDQVGGLQVFVDNEWRSINPNFDAFVVNIGDTFMALSNGIYRSCLHRAVVNSQTPRKSLAFFLCPKNDKMVTPPHELVDTCNPRIYPDFTWPMLLEFTQKHYRADMKTLEVFTNWLHQRSLS

SEQ ID NO: 24694 - DNA, 1158 bp, Populus alba
  CDS (1)..(1158)
atggcaatagattgcatcaaaaccatgccatccataaccacccctcaccaccacccaaaagatcaggatcaatgcaaggatgatggcaagtcttttgtctttgatgcacaagttcttcgacaccagacgaacataccccagcagttcatttggcctgaccatgaaaagcctaatattaatgcacctgaactccaagtcccgcttgtagacttgggtgatttcctctctggcaaccctgttgctgcagtggaagcttcaagacttgttggtgaagcatgtaaaaaacatggtttctttctagttgttaatcatggagttgataaaacactcattgcccatgctcataattacgttgacaccttcttcaaattgccactttctgagaaacaaaaggcccagagaaagattggcgagtcctgtggatatgctagcagctttactggcaggttttcctctaaacttccatggaaagaaacgctttcttttcgctacaaagctgaggagaattcatcaaaacacatcgaggaatactttcacaacagaatgggggaagatttcgctgaattcgggacggtgtatcaggactactgtgaggccatgagcactttgtcactagggatcatggagctattaggaatgagcctcggtgtgagcagagaacatttcagggaattctttaatgagaatgattcaataatgaggctcaactactaccctccatgccaaaaacctgaccttactttaggcaccggtcctcattgtgatccaacttccttaaccatcctccatcaggaccaagtgggtggtcttcaagtgtttgtggacaacgaatggcgttcgattaaccccaattttgacgcttttgttgttaacattggtgacaccttcatggctctatcgaatggtatatacaagagctgtttgcaccgagcagtggtgaacagccaaacaccaagaaaatctctcgctttctttctgtgtccaaagaatgacaagatggtaactccaccacatgaattagtggacacatgcaatccgagaatatatccagatttcacatggcctatgttgctcgaattcacacaaaagcattaccgagctgacatgaagacacttgaggtgttcacaaactggcttcatcaacgaagtcttagctga

SEQ ID NO: 24695 - protein, 385 aa, Populus alba
MAIDCIKTMPSITTPHHHPKDQDQCKDDGKSFVFDAQVLRHQTNIPQQFIWPDHEKPNINAPELQVPLVDLGDFLSGNPVAAVEASRLVGEACKKHGFFLVVNHGVDKTLIAHAHNYVDTFFKLPLSEKQKAQRKIGESCGYASSFTGRFSSKLPWKETLSFRYKAEENSSKHIEEYFHNRMGEDFAEFGTVYQDYCEAMSTLSLGIMELLGMSLGVSREHFREFFNENDSIMRLNYYPPCQKPDLTLGTGPHCDPTSLTILHQDQVGGLQVFVDNEWRSINPNFDAFVVNIGDTFMALSNGIYKSCLHRAVVNSQTPRKSLAFFLCPKNDKMVTPPHELVDTCNPRIYPDFTWPMLLEFTQKHYRADMKTLEVFTNWLHQRSLS

SEQ ID NO: 24696 - DNA, 1071 bp, Arabidopsis thaliana
  CDS (1)..(1071)
atggttgcggttgaaagagttgagagtctagcaaaaagcggaatcatatcgattccaaaagaatatattcgtccaaaagaagagctcgagagcatcaacgatgttttcctagaagagaagaaagaagacggtcctcaagttcccacaatcgatctaaagaacatcgagtcagacgatgaaaagatccgtgagaattgtattgaggagctgaaaaaggcatctttggattggggagtgatgcatttgatcaaccatggaataccagctgatctaatggagcgtgtcaagaaagccggagaagagtttttcagtttgtctgtggaagagaaggagaagtatgcaaacgatcaagccactggaaagattcaaggctatggaagtaaattggctaacaacgcgagtggacaattggaatgggaagattacttctttcatcttgcgtatcctgaagagaagagagatctatcaatttggcctaagacaccaagtgattacatagaagcaacgagtgagtacgcgaagtgtcttcgtttgctagcgactaaagtcttcaaggctctctctgtcggtctaggtttagagcctgaccgtctagagaaagaagttggtggtttagaagagcttcttctacaaatgaagataaattactatccaaaatgtcctcagcctgagctagcactcgatgtggaagctcacaccgatgtaagcgctttaactttcattctacacaacatggttccgggtttgcagcttttctacgagggcaaatgggtcactgcaaaatgtgttcctgattcgattgtgatgcacattggggatactttggagattcttagtaatgggaagtataagagtatacttcatcgtgggttggtgaataaggagaaggttaggatttcttgggctgtgttttgtgaacccccaaaggataagattgttcttaagccgttgccggagatggtgagtgttgagtctccggctaagtttcctccacggacttttgctcaacatattgagcataagttgtttgggaaggaacaagaggaattggtatccgagaaaaatgattaa

SEQ ID NO: 24697 - protein, 356 aa, Arabidopsis thaliana
MVAVERVESLAKSGIISIPKEYIRPKEELESINDVFLEEKKEDGPQVPTIDLKNIESDDEKIRENCIEELKKASLDWGVMHLINHGIPADLMERVKKAGEEFFSLSVEEKEKYANDQATGKIQGYGSKLANNASGQLEWEDYFFHLAYPEEKRDLSIWPKTPSDYIEATSEYAKCLRLLATKVFKALSVGLGLEPDRLEKEVGGLEELLLQMKINYYPKCPQPELALDVEAHTDVSALTFILHNMVPGLQLFYEGKWVTAKCVPDSIVMHIGDTLEILSNGKYKSILHRGLVNKEKVRISWAVFCEPPKDKIVLKPLPEMVSVESPAKFPPRTFAQHIEHKLFGKEQEELVSEKND

SEQ ID NO: 24698 - DNA, 1158 bp, Populus nigra
  CDS (1)..(1158)
atggcaatagattgcatcaaaaccatgccatccataaccacccctcatcaccacccaaaagatcaggatcaatgcaaagatgatggcaagtcttttgtttttgatgcacaagttcttcgacaccagacaaacataccccagcagttcatttggcctgaccatgaaaagcctaatattaatgcacctgaactccaagtcccacttgtagacttgggtgatttcctctctggtaaccctgttgctgcggtggaagcttcaagacttgttggtgaagcatgtcaaaaacatggtttctttctagttgttaatcatggagttgataaaacactcattgcccatgctcataattacatggacaccttcttcgaattgccactttctgagaaacaaaaggcccaaagaaagattggcgagtcttgtggatatgctagcagctttactggcaggttttcctctaaacttccatggaaagaaacgctttcttttcgctacacagctgagaagaattcatcaaaacacatcgaggaatactttcataacagaatgggggaagatttcgctgaattcgggagggtgtatcaggactactgtgaggccatgagcactttgtcgctagggatcatggagctattaggcatgagccttggtgtgagcagagaacatttcagggaattctttaatgagaatgattcaataatgaggctcaactactaccctccatgccaaaaacctgaccttactttaggcaccggtcctcattgtgatccaacttctttaaccatccttcatcaagaccaagtgggtggtcttcaagtgtttgtagacaacgaatggcgttcgattagccccaattttgacgcttttgttgttaacattggtgacaccttcatggctctatcgaatggtatatacaagagctgtttgcaccgagcagtggtgaacagccaaacaccaagaaaatccctcgctttctttttgtgtccaaagaatgacaagatggtaactccaccacatgaattagtggacacatgcaatccgagaatatatccagatttcacatggcctatgttgctcgaattcacacaaaagcattaccgagctgacatgaagacacttgaggtgttcacaaactggcttcatcaacaaagttttagctga

SEQ ID NO: 24699 - protein, 385 aa, Populus nigra
MAIDCIKTMPSITTPHHHPKDQDQCKDDGKSFVFDAQVLRHQTNIPQQFIWPDHEKPNINAPELQVPLVDLGDFLSGNPVAAVEASRLVGEACQKHGFFLVVNHGVDKTLIAHAHNYMDTFFELPLSEKQKAQRKIGESCGYASSFTGRFSSKLPWKETLSFRYTAEKNSSKHIEEYFHNRMGEDFAEFGRVYQDYCEAMSTLSLGIMELLGMSLGVSREHFREFFNENDSIMRLNYYPPCQKPDLTLGTGPHCDPTSLTILHQDQVGGLQVFVDNEWRSISPNFDAFVVNIGDTFMALSNGIYKSCLHRAVVNSQTPRKSLAFFLCPKNDKMVTPPHELVDTCNPRIYPDFTWPMLLEFTQKHYRADMKTLEVFTNWLHQQSFS

SEQ ID NO: 24700 - DNA, 1140 bp, Nicotiana tabacum
  CDS (1)..(1140)
atggcaattgattgtatgatcacgaatgtgaattcacccatgctacggatattagaagatgacaaaaagccattgatttttgatgcatctcagatgaaacgcgagtacaacattccaacacaattcatatggccagacgacgagaagcctcgtgctgtagcacgagaacttccggttccacttatcgacttaggaggtttcctttctggagaccccgtcgcggcccaacaagcatctagacttgttggtgaagcatgccgtaatcatggtttctttcttgtagttaaccacggagttaacgctaatctcatctccaacgcccatcgttacatggacatgttttttgacttgccactttctgaaaagcaaaaggctcagaggaaacttgaagagcattgtggttatgccagtagctttactggaaggttttcctctaagctaccttggaaagagacactctcttttcgatactccgctgaagaagactcatctcacatagttgaagaatacttccaaaatacaatgggtgaaagttttagccatcttgggaatgtttatcaagaatattgcaattcaatgagcacactttctctagggataatggaacttttgggaatgagcctaggcgtagggagggaacacttcaaagagttttttgaagaaaatgaatccataatgagactcaactattatccaccatgccagaaaccagacctcactttagggacagggccacattgtgatccaacatcattaacaattctacatcaagatagtgttggcgggcttcaagtttttgtggacaacgaatggcgctccgtcagtccaaatttcaacgctttcgtggttaacataggcgatacatttatggctctttcaaatggaagatacaaaagttgcttgcacagagcagtggtaaacaacaaaactcctaggaaatcacttgctttctttctttgtccaaagaaggataaggtagtgagcccaccaaatgaattggtggacaccaacaaccctagaatatatcccgacttcacatggcctactctccttgagtttacacagaagcattacagagctgatatgaacactcttcaaactttctcaaattggcttaaacagaaaactgcacaagtttaa

SEQ ID NO: 24701 - protein, 379 aa, Nicotiana tabacum
MAIDCMITNVNSPMLRILEDDKKPLIFDASQMKREYNIPTQFIWPDDEKPRAVARELPVPLIDLGGFLSGDPVAAQQASRLVGEACRNHGFFLVVNHGVNANLISNAHRYMDMFFDLPLSEKQKAQRKLEEHCGYASSFTGRFSSKLPWKETLSFRYSAEEDSSHIVEEYFQNTMGESFSHLGNVYQEYCNSMSTLSLGIMELLGMSLGVGREHFKEFFEENESIMRLNYYPPCQKPDLTLGTGPHCDPTSLTILHQDSVGGLQVFVDNEWRSVSPNFNAFVVNIGDTFMALSNGRYKSCLHRAVVNNKTPRKSLAFFLCPKKDKVVSPPNELVDTNNPRIYPDFTWPTLLEFTQKHYRADMNTLQTFSNWLKQKTAQV

SEQ ID NO: 24702 - DNA, 1083 bp, Gypsophila elegans
  CDS (1)..(1083)
atggttattgccacgaaagtcgctccctctagggttgagaccctagcaagtagtggaatcgagtgcattcctaaggagtatgtgaggcctgaggaggagctaacctcaatcggggatgttttcgaggaagaaaagaaggatggcggacctcaagtcccgactatggacctcaaagacatagcgtctgaggatccagaggttcgagacaaggcgatccaagaactgaaaaaggccgctatggagtggggtgtcatgcacattgtcaatcatggcatctcggaggagctaattacccgcgttaaggtggctggagagacgttcttcgagttccctatcgaggagaaggagaagtatgctaatgaccaggactcgggcaatgttcaagggtatgggagtaagttggctaataatgctagcggccaactcgagtgggaggactacttcttccaccttgctttccccgaggccaagagagacatgtcgatttggcccaaagctcccgctgattacatccctgcagtatcagactactctaaggaactaagaggcttggcaacaaggatactctcggcattgtcggtggggctagggttggaagaaggaaggctagagaaggaagtaggagggctagaagacctcaacctccaaatgaagatcaattactacccgaaatgtcctcaaccagaactagccctaggagtcgaggcacacacagatgtaagcgccttaacttttatcctacacaacatggtccccggcttacaactcttctacgagggcaaatgggtcaccgcaaaatgtgtcccaaactcaattataatgcacattggtgacacgatcgaaatcctgagcaacggaaagtacaagagtatcctccacagaggccttgttaataaggagaaggtcaggatttcttgggctgtattttgtgagccgcctaaggagaagatcattctaaagcccctgcccgacctcgtgagtgattccgaccctgctcgctacccgccccgaacctttgctcagcacattcaacataagctctttagaaaggctcaagacgttcaatctcccgtgactaattaa

SEQ ID NO: 24703 - protein, 360 aa, Gypsophila elegans
MVIATKVAPSRVETLASSGIECIPKEYVRPEEELTSIGDVFEEEKKDGGPQVPTMDLKDIASEDPEVRDKAIQELKKAAMEWGVMHIVNHGISEELITRVKVAGETFFEFPIEEKEKYANDQDSGNVQGYGSKLANNASGQLEWEDYFFHLAFPEAKRDMSIWPKAPADYIPAVSDYSKELRGLATRILSALSVGLGLEEGRLEKEVGGLEDLNLQMKINYYPKCPQPELALGVEAHTDVSALTFILHNMVPGLQLFYEGKWVTAKCVPNSIIMHIGDTIEILSNGKYKSILHRGLVNKEKVRISWAVFCEPPKEKIILKPLPDLVSDSDPARYPPRTFAQHIQHKLFRKAQDVQSPVTN

SEQ ID NO: 24704 - DNA, 1077 bp, Brassica oleracea
  CDS (1)..(1077)
atggtggcagttgaaagagttgagagcttagcaaaaagcggaatcaactccatcccaaaagaatacatccgtccaaaagaagagctcgagagcatcaacgacgtgttccaagaagagaagaaagaagacggtccacaagtccccaccatcgatctccaagacatcgagtcagaagacgaaaccatccgtgagaaatgcatagaggagctcaagaaggcggctatggattggggagtaatgcatttgatcaaccatggtgtaccggttgaactaatggagcgtgtgaagaagtcaggagaagagttcttcggtttgcccgttgaagagaaggagaagtatgcaaacgatcaagccaagggaaagattcaagggtatggaagcaagttggctaacaacgcgagtggacagcttgagtgggaagattacttcttccatcttgtttatcctgaagacaagagagatctatcactttggcctaagacaccaactgattacattgaagctacgagtgagtacgctaagtgtcttcgtttgctagcaacaaaagtcttcaaggctctctctatcgccctaggcttagagcctgaccgtctagagaatgaagtgggcggtatagaagagcttctgctccaaatgaagatcaattactacccaaaatgccctcagcctgagctagcacttggcgtggaagctcacaccgatgtaagcgctttgaccttcattctacacaacatggttccgggtttgcagcttttttacgagggtaaatgggtcattgcaaaatgtgttcctgattcgattgtgatgcacattggagatacgttggagattcttagcaatgggaagtttaagagtatacttcaccgtggattggtgaacaaggagaaggtaaggatttcttgggctgtgttttgtgaaccaccaaaggaaaagattgtgcttaagccattgccggagatggtgagtgttgagtctccggctaagtttcctccaaggacgtttgctcagcatattgagcataagttgttcaggaatgagcaagaggagttggtaactgagaaaaaggatgaagtctga

SEQ ID NO: 24705 - protein, 358 aa, Brassica oleracea
MVAVERVESLAKSGINSIPKEYIRPKEELESINDVFQEEKKEDGPQVPTIDLQDIESEDETIREKCIEELKKAAMDWGVMHLINHGVPVELMERVKKSGEEFFGLPVEEKEKYANDQAKGKIQGYGSKLANNASGQLEWEDYFFHLVYPEDKRDLSLWPKTPTDYIEATSEYAKCLRLLATKVFKALSIALGLEPDRLENEVGGIEELLLQMKINYYPKCPQPELALGVEAHTDVSALTFILHNMVPGLQLFYEGKWVIAKCVPDSIVMHIGDTLEILSNGKFKSILHRGLVNKEKVRISWAVFCEPPKEKIVLKPLPEMVSVESPAKFPPRTFAQHIEHKLFRNEQEELVTEKKDEV

SEQ ID NO: 24706 - DNA, 1149 bp, Spinacia oleracea
  CDS (1)..(1149)
atgccatctaggccatctcgagttgttaaggaacaacatcccacaaaaaaaagtttcctagacttggaatctttaaatgagttgcccgattcatttgcatggggttcatttgaagatccgtgttcaattgataacccgagtggttatgggcctgattctgtacccgttatcaatcttcaagatccgcaagcccaacaacttgttgggcttgcatgcagatcatggggagtctttcaagtgactaaccatggaatacaaaagagtttattggatgacattgaagcggccggtaaaagccttttcgctttgccggttaaccaaaagctcaaagcggcccgttcttcctgtggtgttacgggttatggcccggccgggatctcatccttctttcccaagaggatgtggtccgaggggttcactattttgggctctcctcttgaccatgctcgtcaactttggcctaataattacaacaaattctgtgatattattgagaaatatcaaaaggaaatgaaccaattagctaagaagcttatgcaactagttgttggttcattgggtatatccaatcaagatattatgaattgggctgatctacttgaaggggcaaatggagccatgcaactaaattcttacccgattcgtccggacccaaaccgggctatgggcttggcggcccacacggactcaaccctcctcacgatcctccaccaaagcaatacgacggggctccaagtgtttagagaacggtccgggtgggtcacggtcccacccatttcgggcgggcttgttataaacataggtgacctattgcacattttatcaaatgggcggtacccgagtgtttatcaccgggccatggttaatcgggtccaacatcgtctctcggttgcctatctgtacgggcccgcttccggggtccgggtccaacccctcccaaagctcattgatgccacacatcctcctctatataggccggttacttggagtgaatatctaggtatcaagagtgagcatctcactaaagccctctcactaattcggattaatcataacactaatccatcattaacgggtctaattggaaatgatgagccaaaaagcattaatgttgactcggataagacaatccttgctgtatttggttaa

SEQ ID NO: 24707 - protein, 382 aa, Spinacia oleracea
MPSRPSRVVKEQHPTKKSFLDLESLNELPDSFAWGSFEDPCSIDNPSGYGPDSVPVINLQDPQAQQLVGLACRSWGVFQVTNHGIQKSLLDDIEAAGKSLFALPVNQKLKAARSSCGVTGYGPAGISSFFPKRMWSEGFTILGSPLDHARQLWPNNYNKFCDIIEKYQKEMNQLAKKLMQLVVGSLGISNQDIMNWADLLEGANGAMQLNSYPIRPDPNRAMGLAAHTDSTLLTILHQSNTTGLQVFRERSGWVTVPPISGGLVINIGDLLHILSNGRYPSVYHRAMVNRVQHRLSVAYLYGPASGVRVQPLPKLIDATHPPLYRPVTWSEYLGIKSEHLTKALSLIRINHNTNPSLTGLIGNDEPKSINVDSDKTILAVFG

SEQ ID NO: 24708 - DNA, 1137 bp, Cucurbita maxima
  CDS (1)..(1137)
atgcatgtcgtgacatccacgccggaagcccgacacgacggcgctccattagtgttcgacgcatcggttctccgacaccaacacaacattccgaagcagttcatatggcccgatgaggagaagccggctgccacctgcccggagctggaagtgccattgatcgacttgtcgggatttctctccggcgagaaagatgcggcggcggaggctgttcgacttgtcggcgaggcttgtgagaaacatgggttttttctggtggtgaaccatggggtggacaggaaattgatcggtgaggctcataagtacatggatgagttctttgaattgccgctttcccaaaaacagagcgctcagaggaaggccggtgagcattgtgggtatgccagcagctttaccggtcgtttctcttccaaattgccttggaaagagaccctttcctttcgattcgccgccgatgaatccctcaataatcttgttcttcattaccttaatgacaagctcggtgaccaattcgccaaatttggtagggtttaccaagactattgtgaagcaatgagtgggctgtccttgggcataatggagctattggggaagagccttggagtagaagaacaatgcttcaaaaacttcttcaaagacaatgattccataatgagattgaacttctacccgccatgccaaaagccccatctcaccttaggcactggccctcactgcgacccaacgtccttgaccatcctccaccaagaccaagttggtggcttacaagtgttcgtcgacaaccaatggagactcatcacccccaacttcgacgctttcgtcgtcaacatcggcgacacattcatggcactatcgaatgggagatacaagagctgcttgcatagagcggtggtgaatagcgaaagaacaagaaaatctttggcgttctttttatgtccaagaaatgataaagtggtgaggccaccaagggagttggtggacactcagaacccacgaagatatccagattttacgtggtcgatgctcctccggttcactcagacccattaccgagccgatatgaaaaccctcgaagctttctcggcttggcttcaacaagaacaacaagaacaacaagaacaacaatttaatatttaa

SEQ ID NO: 24709 - protein, 378 aa, Cucurbita maxima
MHVVTSTPEARHDGAPLVFDASVLRHQHNIPKQFIWPDEEKPAATCPELEVPLIDLSGFLSGEKDAAAEAVRLVGEACEKHGFFLVVNHGVDRKLIGEAHKYMDEFFELPLSQKQSAQRKAGEHCGYASSFTGRFSSKLPWKETLSFRFAADESLNNLVLHYLNDKLGDQFAKFGRVYQDYCEAMSGLSLGIMELLGKSLGVEEQCFKNFFKDNDSIMRLNFYPPCQKPHLTLGTGPHCDPTSLTILHQDQVGGLQVFVDNQWRLITPNFDAFVVNIGDTFMALSNGRYKSCLHRAVVNSERTRKSLAFFLCPRNDKVVRPPRELVDTQNPRRYPDFTWSMLLRFTQTHYRADMKTLEAFSAWLQQEQQEQQEQQFNI

SEQ ID NO: 24710 - DNA, 1134 bp, Cucurbita maxima
  CDS (1)..(1134)
atggccaccacaatagccgacgtcttcaaatccttccccgtccacatccccgcccacaaaaacctcgactttgactctctccatgagctccccgactcctatgcatggattcaacccgactccttcccctcccccacccataaacatcataattccattctcgactctgactccgactccgtcccattaattgacctttctctacccaacgcggcggccctcatcggcaacgcgttccgctcgtggggggcattccaggtcattaaccacggcgtccccatttccctcctccaatccattgaatcctccgctgacaccctcttctctctcccgccttcccacaagctcaaggccgcacgtacccccgatggcatctccggctacggcctcgtccgtatctcctccttcttccctaaacgtatgtggtccgaaggcttcaccattgtcggctctcccctcgaccactttcgccaactctggcctcacgattaccacaaacactgtgagattgtagaggagtatgaccgagaaatgaggagtctatgtgggaggctgatgtggcttgggttaggcgaattggggataacccgggatgacatgaaatgggccgggccggatggtgatttcaagacgagtccagcagcgacccagttcaattcgtacccggtctgcccggatccggaccgagctatgggactggggccccacaccgacaccagcctgttaaccatcgtgtaccaaagcaacacgagggggttacaagttttgcgagaagggaagcggtgggtgacggtggagccagtagccggtggactagtggttcaagtgggagacttgcttcacattctgacaaacgggttgtacccgagtgcactccatcaagccgtggtgaaccggacccggaaacgactctcggtggcttacgtttttgggccacccgaaagcgcagaaatttcaccgcttaagaagcttttgggcccaactcagccgccactttaccgcccggtaacttggacagagtacctcggtaaaaaagcggagcatttcaacaacgcactgtcgactgttcgtctttgcgctcctattactggactgttagacgtcaacgatcacagccgggtcaaagtaggctaa

SEQ ID NO: 24711 - protein, 377 aa, Cucurbita maxima
MATTIADVFKSFPVHIPAHKNLDFDSLHELPDSYAWIQPDSFPSPTHKHHNSILDSDSDSVPLIDLSLPNAAALIGNAFRSWGAFQVINHGVPISLLQSIESSADTLFSLPPSHKLKAARTPDGISGYGLVRISSFFPKRMWSEGFTIVGSPLDHFRQLWPHDYHKHCEIVEEYDREMRSLCGRLMWLGLGELGITRDDMKWAGPDGDFKTSPAATQFNSYPVCPDPDRAMGLGPHTDTSLLTIVYQSNTRGLQVLREGKRWVTVEPVAGGLVVQVGDLLHILTNGLYPSALHQAVVNRTRKRLSVAYVFGPPESAEISPLKKLLGPTQPPLYRPVTWTEYLGKKAEHFNNALSTVRLCAPITGLLDVNDHSRVKVG

SEQ ID NO: 24712 - DNA, 1170 bp, Beta vulgaris
  CDS (1)..(1170)
atggctattgattgcatgagaaatttatcttctaccccaaaatcctaccaaaactctaaacaagagcaaaacaatccacttatttttgatgcctcatttcttaaccatcaatcacatatacctcaacaatttatatggccagatggtgaaaaacccgatttcattgaacccgaagaattagcagtaccccttatcgatctccaaggttttctatcagatgatcctgagaaaaccttaaaggcctcgaaactcataggcgaagcatgtcttaaacatggcttcttcttggtagttaatcatggtgttgaaagagatttaatcaaagatgcccataatttaatggatgacttttttgaagaacctttgtctctaaagcaaaaagctctaaggaagcttggagaacattgtggttatgctagtagttttactggtagattctcttgtaatttaccttggaaagaaactctttcctttaactactctcctcaggagagttcatcttctaaaactcatgtccaagattacttcaacaataaatttggtgattctttcaatcacttggggacaacgtaccaacaatactgcgaagcgatgagcacactttcacttagaatcatggaattacttggtctaagcctaggagtaggaagaagacattttagagaattttttgaaggacatgaatcagtgatgcgactgaattactatccaccatgtcaaagacctgacctcaccctcggaactggccctcattgtgacccaacttcattaaccatccttcaccaagaccaagttggtggtcttcaagtgtttgctgatggaaaatggcgttccatttctcccaatttcaacgcttttgtcgtcaacattggtgacactttcatggcgttatcaaatggaagatacaagagttgcttgcatagagctgtggtgaatagtgaaaagccaaggaaatcattagcatttttcctatgcccaaacaaggataaggtggtaaaaccaccaagagaacttgtagacgaagagaataacccaagggtgtatcctgattttacatggcctctgttgctggaattcacacaaaagcactatagagctgatatgaatactttgaaggttttctctcaatgggttcaacaacaaagatcaactcaacaagtggaaaagtga

SEQ ID NO: 24713 - protein, 389 aa, Beta vulgaris
MAIDCMRNLSSTPKSYQNSKQEQNNPLIFDASFLNHQSHIPQQFIWPDGEKPDFIEPEELAVPLIDLQGFLSDDPEKTLKASKLIGEACLKHGFFLVVNHGVERDLIKDAHNLMDDFFEEPLSLKQKALRKLGEHCGYASSFTGRFSCNLPWKETLSFNYSPQESSSSKTHVQDYFNNKFGDSFNHLGTTYQQYCEAMSTLSLRIMELLGLSLGVGRRHFREFFEGHESVMRLNYYPPCQRPDLTLGTGPHCDPTSLTILHQDQVGGLQVFADGKWRSISPNFNAFVVNIGDTFMALSNGRYKSCLHRAVVNSEKPRKSLAFFLCPNKDKVVKPPRELVDEENNPRVYPDFTWPLLLEFTQKHYRADMNTLKVFSQWVQQQRSTQQVEK

SEQ ID NO: 24714 - DNA, 1050 bp, Arabidopsis thaliana
  CDS (1)..(1050)
atggaggatcttgatccaacctacatccaagcaccagagcatagatcagattcgaatttcatccctaaccaaccagaagaaatacccgtgattgatctctcgcgcctcgatgaccccgaagatgtccaaaacgttatctcagagatcggtgatgcttgtgaaaaatggggattttttcaggtgcttaatcatggtgtgccttctgacgcaaggcaacgtgtggagaagactgtgaagatgtttttcgatttgcctatggaagagaagataaaggtgaagagagacgatgtgaatcctgtagggtatcatgatggagaacacaccaagaacgttaaagattggaaagaagtgtttgatatttatttcaaagatccaatggtcattccttcaaccactgatcctgaagatgaaggcttaagacttgtttacaacaagtggcctcaatctccttctgatttcagggaagcatgtgaagtatatgcgagacacgctgaaaaattagcgttcaagctcttggaactgatttcgttaagcttaggcttgccaaaagagcgttttcatgactacttcaaagaacaaatgagttttttcaggataaatcgttatccaccatgtccaagacctgacctagctttaggtgttggtcaccacaaagatgccgacgttattagtctattggctcaagatgatgttggaggattacaagttagtcgtagatcggacggtgtttggtttccgattagacccgtccctaatgctcttgtcatcaatataggcaattgtatggagatatggacgaatgacaagtattggagtgctgaacatagagtggtggtgaacacaacaagagagagatactcgataccattcttcttgttgccttcacacgatgtggaagtgaagccattagaagaacttgtgagtcctgaaaaccctccaagatacaaaggctataaatggggtaagttctacgtcagtaggaatagaagcgattttcgaaaactggaaatcgaaaacatccaaatcgatgacttcaaagttaaaacttaa

SEQ ID NO: 24715 - protein, 349 aa, Arabidopsis thaliana
MEDLDPTYIQAPEHRSDSNFIPNQPEEIPVIDLSRLDDPEDVQNVISEIGDACEKWGFFQVLNHGVPSDARQRVEKTVKMFFDLPMEEKIKVKRDDVNPVGYHDGEHTKNVKDWKEVFDIYFKDPMVIPSTTDPEDEGLRLVYNKWPQSPSDFREACEVYARHAEKLAFKLLELISLSLGLPKERFHDYFKEQMSFFRINRYPPCPRPDLALGVGHHKDADVISLLAQDDVGGLQVSRRSDGVWFPIRPVPNALVINIGNCMEIWTNDKYWSAEHRVVVNTTRERYSIPFFLLPSHDVEVKPLEELVSPENPPRYKGYKWGKFYVSRNRSDFRKLEIENIQIDDFKVKT

SEQ ID NO: 24716 - DNA, 1026 bp, Arabidopsis thaliana
  CDS (1)..(1026)
atggcggcaaagctgatatccaccggtttccgtcatactactttgccggaaaactatgtccggccaatctccgaccgtccacgtctctctgaagtctctcaactcgaagatttccctctcatcgatctctcttccactgatcgatcttttctcatccaacaaatccaccaagcttgtgcccgattcggattttttcaggtcaaaaatcacggagttaacaaacaaataatagatgagatggtgagtgttgcgcgtgagttctttagcatgtctatggaagaaaaaatgaagctatattcagacgatccaacgaagacaacaagattatcgacgagcttcaatgtgaagaaagaagaagtcaacaattggagagactatctaagactccattgttatcctatccacaagtatgtcaatgagtggccgtcaaaccctccttctttcaaggaaatagtaagtaaatacagtagagaagtaagagaagtgggatttaaaatagaggaattaatatcagagagcttaggtttagaaaaagattacatgaagaaagtgcttggtgaacaaggtcaacacatggcagtaaactattatcctccatgtcctgaacctgagctcacttacggtttacctgctcataccgacccaaacgccctaaccattcttcttcaagacactactgtttgcggtctccagatcttgatcgacggtcagtggttcgccgttaatccacatcctgatgcttttgtcatcaacataggtgaccagttacaggcattaagtaatggagtatacaaaagtgtttggcgtcgcgctgtaacaaacacagaaaatccgagactatcggtcgcatcgtttctgtgcccagctgactgtgctgtcatgagcccggccaagcccttgtgggaagctgaggacgatgaaacgaaaccagtctacaaagatttcacttatgcagagtattacaagaagttttggagtaggaatctggaccaagaacatttcctcgagaattttctaaacaactaa

SEQ ID NO: 24717 - protein, 341 aa, Arabidopsis thaliana
MAAKLISTGFRHTTLPENYVRPISDRPRLSEVSQLEDFPLIDLSSTDRSFLIQQIHQACARFGFFQVKNHGVNKQIIDEMVSVAREFFSMSMEEKMKLYSDDPTKTTRLSTSFNVKKEEVNNWRDYLRLHCYPIHKYVNEWPSNPPSFKEIVSKYSREVREVGFKIEELISESLGLEKDYMKKVLGEQGQHMAVNYYPPCPEPELTYGLPAHTDPNALTILLQDTTVCGLQILIDGQWFAVNPHPDAFVINIGDQLQALSNGVYKSVWRRAVTNTENPRLSVASFLCPADCAVMSPAKPLWEAEDDETKPVYKDFTYAEYYKKFWSRNLDQEHFLENFLNN

SEQ ID NO: 24718 - DNA, 1068 bp, Arabidopsis thaliana
  CDS (1)..(1068)
  misc_feature (288)..(288): s is g or c
atggatgagtggcctgagccaatcgtccgagtccagtccttagccgagagcaacctctcctctctccccgaccgttacatcaaaccagcgtctctacgccccaccacgaccgaagacgctcctaccgcgaccaacatcccaatcatagaccttgaaggactcttctcggaagaagggttgtctgatgacgtcatcatggctcggatatcggaggcttgccgtgggtgggggttcttccaggtggtgaaccacggggtcaaaccggagctgatggacgcggctagggasaattggagagagtttttccatatgccggttaatgccaaagagacttactcaaactcaccaagaacctacgaaggctatggaagtagactaggtgttgagaaaggagcaagtcttgattggagtgattattactttctccatcttcttcctcatcatttgaaagacttcaacaagtggccttcttttcctcccaccataagagaagtgatcgatgaatacggcgaagagctagtgaagctaagtgggagaattatgagggtattatcgacaaacttgggactaaaagaggataagtttcaagaagcatttggaggtgaaaacattggggcgtgtttgagggttaattattacccaaaatgccctcgaccggtgctggctcttggtctctctccacactccgatcctggcggtatgaccattctcttaccggacgatcaagtcttcggtctccaggttcgtaaagatgacacgtggatcaccgtcaagcctcatccccatgctttcatcgtcaatattggtgatcaaatacagatactaagcaactcaacatacaagagtgtggagcatagagtgatagtgaactcggacaaggagagagtttcacttgccttcttctacaatcctaaaagcgatattccgatccaaccattacaagaacttgtatcaactcataatcctcctttataccctcccatgacctttgatcagtatagactctttatcagaactcaaggtccacaaggcaaatcccatgttgaatctcatatttctcctcgttga

SEQ ID NO: 24719 - protein, 355 aa, Arabidopsis thaliana
  misc_feature (96)..(96): The Xaa at location 96 stands for Asp, or Glu.
MDEWPEPIVRVQSLAESNLSSLPDRYIKPASLRPTTTEDAPTATNIPIIDLEGLFSEEGLSDDVIMARISEACRGWGFFQVVNHGVKPELMDAARXNWREFFHMPVNAKETYSNSPRTYEGYGSRLGVEKGASLDWSDYYFLHLLPHHLKDFNKWPSFPPTIREVIDEYGEELVKLSGRIMRVLSTNLGLKEDKFQEAFGGENIGACLRVNYYPKCPRPVLALGLSPHSDPGGMTILLPDDQVFGLQVRKDDTWITVKPHPHAFIVNIGDQIQILSNSTYKSVEHRVIVNSDKERVSLAFFYNPKSDIPIQPLQELVSTHNPPLYPPMTFDQYRLFIRTQGPQGKSHVESHISPR

SEQ ID NO: 24720 - DNA, 1083 bp, Nicotiana sylvestris
  CDS (1)..(1083)
  misc_feature (581)..(581): n is a, g, c or t
atgccttcaagaatctccgacgatgttcatcaaaaacaacttgacttgtacacaataaaagaattacccgaatcccatgcatggcgatcatcattagatcatgattaccaatgcaatgactcattagagtctattccagtgatcgatctaaacgacgagaaattcgcaatagaaaatattggccatgcatgcaaaacatggggtgcattccaaatcataaaccataatatatctcagagactactggacaatatggaggaagctggaaaacgacttttttcccttccgatgcagcaaaaattgaaggctgctcgttctgcagatggtattgctggttatggcgtggctcgcatatcgtcttttttctcaaagctcatgtggtctgaaggtttcacaattgttggttccccatttgaccacgcccgccaactttggccacatgattacaagaaattctgtgacgtaatcgaagaatacgaaaaggagatggaaaaactagccggaagactgatgtggctgatgcttgggtcacttggaataagtaaggacgatatgaaatgggcttgttgcggcccaagagnagaatgctcggccctacaactaaattcttacccggcatgtccggatccggatcgggccatgggtcttgctgcacatacggattctaccatattaaccatccttcaccaaaacaacacaagtggtttacaagtgtttaaagaaggaaatggttgggtcacggttcctccgctttcgggtgcattagttatcaacgtaggtgacttgttacacatactgtcaaacgggttatacccgagtgttctacatcgggcggtagtgaaccgaacccgacaccgtttatcggtggcctatttatatggaccaccgtcgggggtgaaaatttcaccgctttctaaattggtagatcaagggcaccctccattatataggtcagtgacgtggagtgagtatttagggactaaggcaaagcatttcgacaaagcactttcgtcttttcagctttgcgctcctcgtattggatttgccaatcccaaagatcgtaatagcgtccaagttggctaa

SEQ ID NO: 24721 - protein, 360 aa, Nicotiana sylvestris
  misc_feature (194)..(194): The Xaa at location 194 stands for Ala, Glu, Gly, or Val.
MPSRISDDVHQKQLDLYTIKELPESHAWRSSLDHDYQCNDSLESIPVIDLNDEKFAIENIGHACKTWGAFQIINHNISQRLLDNMEEAGKRLFSLPMQQKLKAARSADGIAGYGVARISSFFSKLMWSEGFTIVGSPFDHARQLWPHDYKKFCDVIEEYEKEMEKLAGRLMWLMLGSLGISKDDMKWACCGPRXECSALQLNSYPACPDPDRAMGLAAHTDSTILTILHQNNTSGLQVFKEGNGWVTVPPLSGALVINVGDLLHILSNGLYPSVLHRAVVNRTRHRLSVAYLYGPPSGVKISPLSKLVDQGHPPLYRSVTWSEYLGTKAKHFDKALSSFQLCAPRIGFANPKDRNSVQVG

SEQ ID NO: 24722 - DNA, 1140 bp, Nicotiana sylvestris
  CDS (1)..(1140)
atgacaattgattgtatgatcacgaatgtgaaatcacccatgctacggatattagaagatgagaaaaggccattgatttttgatgcatctcagatgaaacgtgagtacaacattccaacacagttcatatggccagacgacgagaagcctcgtgctacagcacgagaacttcccgttccacttatcgacttaggaggtttcctttctggagaccccgtcgcggcccaacaagcatctagacttgttggtgaagcatgtcgtaatcatggtttctttcttgtagttaaccacggtgttaacgctaatctcatctgcaacgcccatcgtttcatggacatgttttttgacttgccactttccgaaaagcaaaaggctcaaagaaagctaggagagcattgtggttatgccagtagctttactgggagattttcctctaagctaccctggaaagagacactctcttttcgatactccgctcaagaagactcatctcgcatagttaaagagtacttccaaaacacaatgggtgaaagttttagccatcttgggaatgtttatcaagaatattgcaattcaatgagcatactttctctagggataatggaacttttgggaatgagcttgggcgtagggagggaacacttcaaagaattttttgaagaaaatgaatctataatgagactcaactattatccaccgtgccagaaaccagacctcactttaggaacagggccacattgtgatccaacatcattaacaattctacatcaagattgtgttggcgggcttcaagtttttgtggacaacgaatggcgctccatcagtccaaatttcaatgcttttgttgttaacataggcgatacatttatggcgctttcaaatggaagatacaaaagttgcttgcacagagcagtggtaaacaacaaaactcctaggaaatcacttgctttctttctttgtccaaagaaggataaggtagtgagcccaccaactgaattggtggactccaacaaccctagaatatatcccaacttcacatggcctactctccttgagtttacacaaaagcattacagagctgatatgaacactcttcaatctttctcaaattggcttcaacagacaactgcacaagtttaa

SEQ ID NO: 24723 - protein, 379 aa, Nicotiana sylvestris
MTIDCMITNVKSPMLRILEDEKRPLIFDASQMKREYNIPTQFIWPDDEKPRATARELPVPLIDLGGFLSGDPVAAQQASRLVGEACRNHGFFLVVNHGVNANLICNAHRFMDMFFDLPLSEKQKAQRKLGEHCGYASSFTGRFSSKLPWKETLSFRYSAQEDSSRIVKEYFQNTMGESFSHLGNVYQEYCNSMSILSLGIMELLGMSLGVGREHFKEFFEENESIMRLNYYPPCQKPDLTLGTGPHCDPTSLTILHQDCVGGLQVFVDNEWRSISPNFNAFVVNIGDTFMALSNGRYKSCLHRAVVNNKTPRKSLAFFLCPKKDKVVSPPTELVDSNNPRIYPNFTWPTLLEFTQKHYRADMNTLQSFSNWLQQTTAQV

SEQ ID NO: 24724 - DNA, 1113 bp, Nicotiana sylvestris
  CDS (1)..(1113)
atgccttttaggatctcagattcttttagaactcactctcaaaaacacttggatttgaactcaataaaagaattgccagaatcccatgcatggacatcatcaaatgattatccttcagaaaattcatgtaatttcgagtctattccagttatcgacctcaacaacaacaaccacaataatattaatgttcttgaacatataggtcaagcatgcaaaaaatggggtgcattccaaatcataaaccacaatatatcagagaggctacttcaagatattgaattggcaggaaaaaatctcttttctctcccaatgcagcaaaagcttaaggctgctcgttctcctgatggtgtcactggctatggcgtggctcgcatttcttctttcttttcaaagcttatgtggtctgaaggattcaccattgttggctccccacttgaacacgctcgtcaaatttggcctcaagattacaagaagttctgtgacgcgatagaagaatacgaaagggaaatggaaaagctagctggaagattgatgtggctcatgcttgggtcattggggataactaaggaagacgtgaattgggccgtaggcccaaaaggagaatccaaaggaggaagtgcggccctacaactgaattcttacccggcatgtccggatccggatcgggccatgggtttagcggcacatacggattctaccatattaacaatccttcaccaaaataacacaagtggtttacaagttttcaaagaagggagtggttgggtcactgtccctccatttcttggcgcattagtagttaatgtaggtgaccttttacacatactatcaaacgggtcgtatccgagtgtactacatcgggcggttgtgaaccggacccgacatcgcctttctgtagcctatttatatggtccaccgtcaggggtgaaaatttcacccctcgcaaagttggtggaccaaaggcaccctccattatatagggcaataacatggagtgagtacttaggcactaaagccaagcattttgacaaggcactttcatctgtacggctttgtgcccctctgactggatttgccgatgccaaagatcataatggcgtgcaagttggctaa

SEQ ID NO: 24725 - protein, 370 aa, Nicotiana sylvestris
MPFRISDSFRTHSQKHLDLNSIKELPESHAWTSSNDYPSENSCNFESIPVIDLNNNNHNNINVLEHIGQACKKWGAFQIINHNISERLLQDIELAGKNLFSLPMQQKLKAARSPDGVTGYGVARISSFFSKLMWSEGFTIVGSPLEHARQIWPQDYKKFCDAIEEYEREMEKLAGRLMWLMLGSLGITKEDVNWAVGPKGESKGGSAALQLNSYPACPDPDRAMGLAAHTDSTILTILHQNNTSGLQVFKEGSGWVTVPPFLGALVVNVGDLLHILSNGSYPSVLHRAVVNRTRHRLSVAYLYGPPSGVKISPLAKLVDQRHPPLYRAITWSEYLGTKAKHFDKALSSVRLCAPLTGFADAKDHNGVQVG

SEQ ID NO: 24726 - DNA, 1134 bp, Nicotiana sylvestris
  CDS (1)..(1134)
atgaccgttgattgtatgatcacaagaaataagtttactatgcaacgaacatcaaaagagccattgatttttgatgcctcagtaatgaaaaatgagtcgaatataccaagccaattcatatggccagacaacgagaaaccttgtgctaatgctcgagaacttcatgtaccacatattgacttaggaggagtactttcaggtgatccttttgcaacaaaacaagcagctacccttgttaatgaagcatgtcaaaaacatggtttttttctagttattaaccatggaattgacactaatctcatttctaatgcacatcgttacatggatttgttctttgaattgccacttaatgagaagcaaaaagctcaaaggaaaattggtgagcactgtggttatgctagtagctttactggaagattttcttctaagttaccttggaaagaaacactttcttttcaatattctgctgaggaaggatcgtcccacatagttgaagattattttcaaaggacaatgggtgaaaatttttgccatcttgggaaggtttaccaagattatagcattgccatgagcacactttctctagggataatggaactattgggtttgagccttggtgtgagcaggaaccacttcaaagaattctttcaagaaaatgaatcaataatgagactaaactattatccaccatgtcaaaaaccagagctcacttttggaacaggacctcattgtgatcccacatcatttactattctacatcaagatagtgttggaggacttcaagtttttgtggacaacgagtggcgctccatcactccaaatttcaatgcttttgtggttaacattggcgacacatttatggcactatcaaatggaagatacaaaagtggcttgcacagagcagtggtaaacaccaaaatacctaggaaatctcttgctttctttctttgtcccaagaaggataaggtggtgagcccaccaattgaattggtcgactccaacaatccaagaatatatccagagttcacatggccagccctcctagaatttacacagaagcaatacagagttgacatgaacactctccaaactttctccaattgggttcagcaaacaactacacaagcactttaa

SEQ ID NO: 24727 - protein, 377 aa, Nicotiana sylvestris
MTVDCMITRNKFTMQRTSKEPLIFDASVMKNESNIPSQFIWPDNEKPCANARELHVPHIDLGGVLSGDPFATKQAATLVNEACQKHGFFLVINHGIDTNLISNAHRYMDLFFELPLNEKQKAQRKIGEHCGYASSFTGRFSSKLPWKETLSFQYSAEEGSSHIVEDYFQRTMGENFCHLGKVYQDYSIAMSTLSLGIMELLGLSLGVSRNHFKEFFQENESIMRLNYYPPCQKPELTFGTGPHCDPTSFTILHQDSVGGLQVFVDNEWRSITPNFNAFVVNIGDTFMALSNGRYKSGLHRAVVNTKIPRKSLAFFLCPKKDKVVSPPIELVDSNNPRIYPEFTWPALLEFTQKQYRVDMNTLQTFSNWVQQTTTQAL

SEQ ID NO: 24728 - DNA, 1059 bp, Arabidopsis thaliana
  CDS (1)..(1059)
atgagtttgcttgatgattcttttacaagtgcaatgacacttaccaattcaggtgtgcctcaagtccctgatcgctacgttcttcctccttcgcaaaggccagctcttggttcaagcttaggcaccagcgagactacacttcctgtcattgatctctctcttttgcaccaacctttccttcgatccctcgcaatccacgagattagcatggcctgcaaggagtttggtttctttcaggttataaaccatggaataccatcatcagtggttaacgatgccttagatgcagcaacacagttcttcgacttacctgtggaagagaagatgcttctggtgtctgcaaacgttcatgagccagtcaggtatggcacaagccttaaccattcaacagacagagttcactactggagagatttcatcaagcattactctcatccactctcaaagtggatcgatatgtggccatcaaatcctccatgctacaaggataaagtgggcaagtatgcagaggcaacacatttgctacacaagcagttaatagaagctatctcagaaagcctgggactggagaaaaattacttacaagaagagatagaagaaggctcacaagtcatggcagtgaattgttatccagcatgcccggaacctgaaatggccttgggaatgccaccacactcagacttcagctcactgaccatcttacttcagagtagcaagggactccagataatggactgcaacaaaaactgggtttgtgtgccgtatatagaaggagctttgatagttcagctgggagatcaggtagaggtgatgagcaacggcatatacaagagcgtcattcatcgtgtaacagtgaacaaagaagtcaaaaggctatcttttgcaagtcttcacagtctacctctgcacaagaaaataagtccagcaccaaaactcgtcaacccaaacaatgcaccagcctatggagagtttagtttcaacgattttctgaactacatctcaagcaacgattttatacaagaaagattcattgacacaataaagaaaagcagttcctaa

SEQ ID NO: 24729 - protein, 352 aa, Arabidopsis thaliana
MSLLDDSFTSAMTLTNSGVPQVPDRYVLPPSQRPALGSSLGTSETTLPVIDLSLLHQPFLRSLAIHEISMACKEFGFFQVINHGIPSSVVNDALDAATQFFDLPVEEKMLLVSANVHEPVRYGTSLNHSTDRVHYWRDFIKHYSHPLSKWIDMWPSNPPCYKDKVGKYAEATHLLHKQLIEAISESLGLEKNYLQEEIEEGSQVMAVNCYPACPEPEMALGMPPHSDFSSLTILLQSSKGLQIMDCNKNWVCVPYIEGALIVQLGDQVEVMSNGIYKSVIHRVTVNKEVKRLSFASLHSLPLHKKISPAPKLVNPNNAPAYGEFSFNDFLNYISSNDFIQERFIDTIKKSSS

SEQ ID NO: 24730 - DNA, 1140 bp, Fagus sylvatica
  CDS (1)..(1140)
atggctattgactgcatcacaaacataacctccatgcctcaccctccaaaagaagagcacaaagaccaccaaaaacaacttgtttttgatgcctcagtgctcagacaccaaacaaacataccacagcagttcatatggccagacgaggaaaagcctcgtgccaatgcaccagagcttcaagttccccttattgacttaagaggcttcctctctggtgacccaactgctgcaaatgaagcctcaagtcttgttggcaaggcatgccaaaagcatggctttttccttgttgtcaatcatggtgtggatgataaacttattgctcatgctcaccaatatatagactacttctttgagttacccatgtcagcaaagcagagggcacagaggaaagttggtgagcactgtgggtatgctagtagcttcactggcagattctctttcaagttaccttggaaagaaacactttcttttcgctcttcagctcaaccagactcatccaatattgtccaagactatttatgtaacacaatgggtgaagatttcaagccatttgggaaggtttaccaggactattgcgacgccatgagcactctttctctagggatcatggaactcctaggaatgagcctaggtgtaagccaaggccattatagggagttttttgaagagaacgaatcgataatgaggctcaactactatcccccatgtcaaaaacctgaccttactttaggtacagggcctcattgtgatccaacatctttaacaatccttcaccaagaccaagtaggtggccttcaagtgtttgtagacgaggaatggcgatctattaccccaaatttcaatgcttttgttgttaacatcggagacaccttcatggcactttcaaatggaagatacaagagttgcttgcatcgggcagtggtgaacagcaaaactccaaggaaatcactagctttctttttgtgtccaaaaaatgataaggtggtaagcccaccaagtgaattagtggacagtttgtgtccaagggtatatccagatttcacatggcctatgctgcttgaattcacacaaaagcattacagggctgacgtgaagacccttgaagtcttttccaactggcttcaacagaaaaacagctga

SEQ ID NO: 24731 - protein, 379 aa, Fagus sylvatica
MAIDCITNITSMPHPPKEEHKDHQKQLVFDASVLRHQTNIPQQFIWPDEEKPRANAPELQVPLIDLRGFLSGDPTAANEASSLVGKACQKHGFFLVVNHGVDDKLIAHAHQYIDYFFELPMSAKQRAQRKVGEHCGYASSFTGRFSFKLPWKETLSFRSSAQPDSSNIVQDYLCNTMGEDFKPFGKVYQDYCDAMSTLSLGIMELLGMSLGVSQGHYREFFEENESIMRLNYYPPCQKPDLTLGTGPHCDPTSLTILHQDQVGGLQVFVDEEWRSITPNFNAFVVNIGDTFMALSNGRYKSCLHRAVVNSKTPRKSLAFFLCPKNDKVVSPPSELVDSLCPRVYPDFTWPMLLEFTQKHYRADVKTLEVFSNWLQQKNS

SEQ ID NO: 24732 - DNA, 1122 bp, Solanum tuberosum
  CDS (1)..(1122)
atgccttcaagaatctcagattcttgtagacctcatcactctcaaaaacactttgacttgaactcaattaaagaattaccagaatcccatgcatggacatcatcaaatgatcattatactcaagaaaattcatgtaatttcgagtctattccagtgatcgacctcgataacaacaataacaataataataataatattcttgatcatataggtcatgcatgcaagaaatggggtgcatttcaaattataaaccatagtatatcagagaaattactacaagatattgaagtggctggaaaaaccctattttcacttcctatgcaacaaaaattaaaggctgctcgctctcctgatggtgtcactggctatggcgcagctcgaatttcgtcttttttctcgaagctcatgtggtttgaagggttcaccattgttggttccccaattgaacatgctcgacaactttggcttaaagattacaacaaattctgtgaagtaatagaagaatatgaaaaggaaatggaaaagctagcaggaagattaatgtggcttatacttgggtcattaggaataacaaaagatgatgtaaaatgggccgtaggcccaaaaggtgaaaccaaagaaggatgtgctgccttacaactaaattcatacccggcatgtccggatccgggtcgggccatgggtcttgcagcacatacggattctaccatattaacaatccttcaccaaaacaacacaagtggtttacaagtttaccaagaaggaaatgggtggatcactgtccctccaatacccggggcattagtagttaatataggtgacttattacacatactctcaaacgggtcatacccgagtgttttacatcgggcggtcgtaaaccgaacacgatatcgactttctgtagcttatttatatggtccaccgtcgggggtgagagtctcacccctatcgaaattggtggaccataggcacccacccttgtatagggcagtgacatggagtgagtatttaggtactaaggccaaatattttgacaaggcactttcatccgtacggctttgtgtccctttaaatggatttactgatgccaaagatcataaaggggtacaagttggataa

SEQ ID NO: 24733 - protein, 373 aa, Solanum tuberosum
MPSRISDSCRPHHSQKHFDLNSIKELPESHAWTSSNDHYTQENSCNFESIPVIDLDNNNNNNNNNILDHIGHACKKWGAFQIINHSISEKLLQDIEVAGKTLFSLPMQQKLKAARSPDGVTGYGAARISSFFSKLMWFEGFTIVGSPIEHARQLWLKDYNKFCEVIEEYEKEMEKLAGRLMWLILGSLGITKDDVKWAVGPKGETKEGCAALQLNSYPACPDPGRAMGLAAHTDSTILTILHQNNTSGLQVYQEGNGWITVPPIPGALVVNIGDLLHILSNGSYPSVLHRAVVNRTRYRLSVAYLYGPPSGVRVSPLSKLVDHRHPPLYRAVTWSEYLGTKAKYFDKALSSVRLCVPLNGFTDAKDHKGVQVG

SEQ ID NO: 24734 - DNA, 1068 bp, Solanum tuberosum
  CDS (1)..(1068)
atgccttcaattatctcatcacaactcgatttgtactcgataaaagaattacccgaatcacatgcatggaaatcctcattggacgacgatggatcgcgtaatattaatgcggagtccattccagtaatcgatctaaaccatgatcataaatttgtcatggatacaattggccatgcatgcaaaacatggggtgccttccaaatagtaaaccacaatatatcgcaccgattacttaaccatatggaaacacacgggacgagattattttcccttccgatgcaacaaaaattaaaagcagctcgatcgtccgatggcatcgctggctatggagtcgctcgaatttcttcttttttcgataagctcatgtggtccgaaggattcacaatttttggatcccctctggaacatgcccgccaactttggccatacgattacaataaattctgtgacgtcatcgaagagtacgaaaatgaaatggaaaagctagcgggaagattaatgggtttaatgcttgggtcccttggaatagcaaaagaagatgttaaatgggccgttggcccaagaagcggtagttcggccctacaactaaattcttacccggcttgtccggatccggatcgggctatgggtcttgctgcacatacggattctaccctattaacaattcttcaccaaaacaatacaagtggtttacaggtatttaaagaaggaaacgggtgggtaacggttcttccgcttcgcggggcattagttttaaacgtgggtgatttggtacacatattgtcaaacgggttgtacccgagtgttctacatcgggcgatagtgaacaggactcgacatcgtctttcagtggcctatctatatgggccaccgtcaggggtgaaaatttcacccctatcgaaattggtagaccaaaggaaccctcaaatgtataggccagtgacgtggagtgagtatttgggaactaaggcaaaacatttcgataaagcactttcatctgttcggctttgtgctcctcgtattgggtttgccaattccaaggatcaaagtggcgtccaagtaggttaa

SEQ ID NO: 24735 - protein, 355 aa, Solanum tuberosum
MPSIISSQLDLYSIKELPESHAWKSSLDDDGSRNINAESIPVIDLNHDHKFVMDTIGHACKTWGAFQIVNHNISHRLLNHMETHGTRLFSLPMQQKLKAARSSDGIAGYGVARISSFFDKLMWSEGFTIFGSPLEHARQLWPYDYNKFCDVIEEYENEMEKLAGRLMGLMLGSLGIAKEDVKWAVGPRSGSSALQLNSYPACPDPDRAMGLAAHTDSTLLTILHQNNTSGLQVFKEGNGWVTVLPLRGALVLNVGDLVHILSNGLYPSVLHRAIVNRTRHRLSVAYLYGPPSGVKISPLSKLVDQRNPQMYRPVTWSEYLGTKAKHFDKALSSVRLCAPRIGFANSKDQSGVQVG

SEQ ID NO: 24736 - DNA, 1122 bp, Oryza sativa
  CDS (1)..(1122)
atgccgacgccgtcgcacttgaagaacccgctctgcttcgacttccgggcggcgaggcgggtgccggagacgcacgcgtggccggggctggacgaccacccggtggtggacggcggcggcggcggcggcgaggacgcggtgccggtggtggacgtcagggcgggcgacgcggcggcgcgggtggcgcgggcggcggagcagtggggcgcgttccttctggtcgggcacggcgtgccggcggcgctgctgtcgcgcgtcgaggagcgcgtcgcccgcgtgttctccctgccggcgtcggagaagatgcgcgccgtccgcggccccggcgagccctgcggctacggctcgccgcccatctcctccttcttctccaagctcatgtggtccgagggctacaccttctccccttcctccctccgctccgagctccgccgcctctggcccaagtccggcgacgactacctcctcttctgtgacgtgatggaggagtttcacaaggagatgcggcggctagccgacgagttgctgaggttgttcttgagggcgctggggctcaccggcgaggaggtcgccggagtcgaggcggagaggaggatcggcgagaggatgacggcgacggtgcacctcaactggtacccgaggtgcccggagccgcggcgagcgctggggctcatcgcgcacacggactcgggcttcttcaccttcgtgctccagagcctcgtcccggggctgcagctgttccgtcgagggcccgaccggtgggtggcggtgccggcggtggcgggggccttcgtcgtcaacgtcggcgacctcttccacatcctcaccaacggccgcttccacagcgtctaccaccgcgccgtcgtgaaccgcgaccgcgaccgggtctcgctcggctacttcctcggcccgccgccggacgccgaggtggcgccgctgccggaggccgtgccggccggccggagccccgcctaccgcgctgtcacgtggccggagtacatggccgtccgcaagaaggccttcgccaccggcggctccgccctcaagatggtctccaccgacgccgccgccgccgccgacgaacacgacgacgtcgccgccgccgccgacgtccacgcataa

SEQ ID NO: 24737 - protein, 373 aa, Oryza sativa
MPTPSHLKNPLCFDFRAARRVPETHAWPGLDDHPVVDGGGGGGEDAVPVVDVRAGDAAARVARAAEQWGAFLLVGHGVPAALLSRVEERVARVFSLPASEKMRAVRGPGEPCGYGSPPISSFFSKLMWSEGYTFSPSSLRSELRRLWPKSGDDYLLFCDVMEEFHKEMRRLADELLRLFLRALGLTGEEVAGVEAERRIGERMTATVHLNWYPRCPEPRRALGLIAHTDSGFFTFVLQSLVPGLQLFRRGPDRWVAVPAVAGAFVVNVGDLFHILTNGRFHSVYHRAVVNRDRDRVSLGYFLGPPPDAEVAPLPEAVPAGRSPAYRAVTWPEYMAVRKKAFATGGSALKMVSTDAAAAADEHDDVAAAADVHA

SEQ ID NO: 24738 - DNA, 1140 bp, Marah macrocarpus
  CDS (1)..(1140)
atggcgatcacatgcatgatggcaaccgaatcctctccggcggaagaggtgaaaagggagcaccaagtggcattcggcggcgccggcgagtcatcggtgccggagaatttcatttggccggacgagttcaaggcgacggcggatgcgccggagctgcatgttccacacatagacttgaagaaggttttgagtggggatgagaaggatgttgaggaggcgactaggctggtggatgaggcttgtaggaaacatgggttctttgtggtggtgaaccatggagtggacaaggaattgatgaacaaggttcatgagtgtatgaatgagttctttactttgcctttggatgtgaagcagaaggctcataggaaggttggtgagaattttggatatgctaatagcttcattggtagattctccactaagcttccttggaaggaaaccttttcccttcgatatcttgctcatgaaaactcctccactgctcgtgactacgtttctcaagttttgggaccagaattttcccatcatggggaggtgtatcaggaatgtgggaaagcactgagcgatctgagtttgaggatagtggagctgttggggttgagccttgggatttcaagagaaaccttcaggaagttctacgaggacaacgattcaattatgaggatgaactattacccaagatgcgagaagccagaactgaccttgggaactgggcctcactgtgatcccacctccataaccatccttcaccaagacgatgtcagtggccttcaagtctacgtcgatgatcaatggcactcaattcccccaaccgaagattcctttgtcgtcaacgttggtgacactttcatgtctctgacaaatggggtttacaagagctgcttccaccgagctgtggtgaactgcaaggaagcaaggaaatcaatggcgttctttctatgtccagcggttgagaaagtggtgagggcaccggaggaattggtggagaagtatccaccaagaaagtttccagattacacatggccaatgttgcttgaaatgacccaaaagtattacagggctgattccaacactttcaacgccttcacaacttggattcagcaacaaaacttggacagtactgcctcccctgctgtttaa

SEQ ID NO: 24739 - protein, 379 aa, Marah macrocarpus
MAITCMMATESSPAEEVKREHQVAFGGAGESSVPENFIWPDEFKATADAPELHVPHIDLKKVLSGDEKDVEEATRLVDEACRKHGFFVVVNHGVDKELMNKVHECMNEFFTLPLDVKQKAHRKVGENFGYANSFIGRFSTKLPWKETFSLRYLAHENSSTARDYVSQVLGPEFSHHGEVYQECGKALSDLSLRIVELLGLSLGISRETFRKFYEDNDSIMRMNYYPRCEKPELTLGTGPHCDPTSITILHQDDVSGLQVYVDDQWHSIPPTEDSFVVNVGDTFMSLTNGVYKSCFHRAVVNCKEARKSMAFFLCPAVEKVVRAPEELVEKYPPRKFPDYTWPMLLEMTQKYYRADSNTFNAFTTWIQQQNLDSTASPAV

SEQ ID NO: 24740 - DNA, 1089 bp, Lolium perenne
  CDS (1)..(1089)
atggtgcagccggtgttcgacgctgcgttgctgtctgcgcagtcagacatcccgtcgcagttcatctggccggcggacgagagcccgaccccggacgccaccgaggagctgcacgtcccgctcatcgacatcgggggcctcctctccggcgaccgtgaggcggccgccgaggtgacacgcctcgtcggcgacgcctgcgagcgccacggtttcttccaggtcgtcaaccacggcatcgacgccgagctccttggccacgcccgctgcgtggacgccttcttcacgatgtcgctccaggacaagcagcgcgcgctgcgccggcccggcgagtcctgcggctacgccagcagcttcaccggccggttcgcgtccaagctaccgtggaaagaaacgctgtcgttccgttcctgtccgtcggaaccggacctcgtcgtcgactacatcgtcgccaccctcggcgaggaccaccgccgccttggggaggtgtacgctcggtactgctcggagatgagccgactgtcgctggagatcatggaggtgctgggcgagagcctgggcgtggggcgggcgcactaccggcgcttcttcgagggcaacgaatccataatgcggctcaactactacccgccctgccagcggcccaacgaaaccctgggcaccggcccgcactgcgacccgacgtcgctcaccatcctccaccaggacgacgtcggcgggctgcaggtgcacgccgacggccgctggctctccatccggcccagggccgacgctttcgtcgtcaacatcggcgacaccttcatggcgctctccaacggccgctacaagagctgcctccaccgcgccgtcgtcaacagccgtgtgcccaggaagtcgctggccttcttcctgtgcccggagatggacaaggtggtggcgccgccggggacgctcgtcgacgaggccaacccgcgggcgtacccggacttcacgtggcgggcgctgctggacttcacgcagaagcactaccgggccgacatgaagacgctcgaggtgttctccgactggatccagcagggccaccagccagccgccacgacgacgacgacataa

SEQ ID NO: 24741 - protein, 362 aa, Lolium perenne
MVQPVFDAALLSAQSDIPSQFIWPADESPTPDATEELHVPLIDIGGLLSGDREAAAEVTRLVGDACERHGFFQVVNHGIDAELLGHARCVDAFFTMSLQDKQRALRRPGESCGYASSFTGRFASKLPWKETLSFRSCPSEPDLVVDYIVATLGEDHRRLGEVYARYCSEMSRLSLEIMEVLGESLGVGRAHYRRFFEGNESIMRLNYYPPCQRPNETLGTGPHCDPTSLTILHQDDVGGLQVHADGRWLSIRPRADAFVVNIGDTFMALSNGRYKSCLHRAVVNSRVPRKSLAFFLCPEMDKVVAPPGTLVDEANPRAYPDFTWRALLDFTQKHYRADMKTLEVFSDWIQQGHQPAATTTTT

SEQ ID NO: 24742 - DNA, 1092 bp, Lolium perenne
  CDS (1)..(1092)
atggtgcagccggtgttcgacgctgcgttgctgtctgggcagtcggacatcccgtcgcagttcatctggccggcggacgagagcccgtccccggacgccaccgaggagctgcacgtcccgctcatcgacatcgggggcctcctctccggcgaccgcgccgcggccgccgaggtgacgcgcctcgtcggcgacgcctgcgagcgccacggcttcttccaggtcgtcaaccacggcatcgacgccgagctcctggccgacgcgcaccgctgcgtggacgccttcttcacgatgtcgctccagggcaagcagcgcgcgctccgccggcccggcgagtcgtgcggctacgccagcagcttcaccggccggttcgcgtccaagctaccgtggaaagagacgctgtcgttccgctcctgcccgtcggagccggacctcgtcgtcgagtacatcgtcgccaccctcggcgaggaccaccgccgcctcggggaggcgtacgctcggtactgctcagagatgagccgactgtcgctggagatcatggaggtgctgggtgagagcctcggtgtggggcgggcccactaccggcgcttcttcgagggcaacgaatccataatgcggctcaactactacccgccctgccagcggcccaacgaaaccctgggcaccggcccgcactgcgacccgacgtcgctcaccatcctccaccaggacgacgtgggcggactgcaggtgcacgccgatggccgctggctatccatccggcccagggccgacgccttcgtcgtcaacatcggcgacaccttcatggcgctctccaacggccgctacaagagctgcctccaccgcgccgtcgtcaacagccgtgtgcccaggaagtcgctggccttcttcctgtgcccggagatggacaaggtggtggcgccgccggagacgctcgtcgacgaggccaacccgcgggcgtacccggacttcacgtggcgggcgctgctggacttcacgcagaagcactaccgggccgacatgaagacgctcgaggtgttctccgactggatccagcagggccaccagccagccgccacgacgacgacgacataa

SEQ ID NO: 24743 - protein, 363 aa, Lolium perenne
MVQPVFDAALLSGQSDIPSQFIWPADESPSPDATEELHVPLIDIGGLLSGDRAAAAEVTRLVGDACERHGFFQVVNHGIDAELLADAHRCVDAFFTMSLQGKQRALRRPGESCGYASSFTGRFASKLPWKETLSFRSCPSEPDLVVEYIVATLGEDHRRLGEAYARYCSEMSRLSLEIMEVLGESLGVGRAHYRRFFEGNESIMRLNYYPPCQRPNETLGTGPHCDPTSLTILHQDDVGGLQVHADGRWLSIRPRADAFVVNIGDTFMALSNGRYKSCLHRAVVNSRVPRKSLAFFLCPEMDKVVAPPETLVDEANPRAYPDFTWRALLDFTQKHYRADMKTLEVFSDWIQQGHQPAATTTTT

SEQ ID NO: 24744 - DNA, 1149 bp, Lolium perenne
  CDS (1)..(1149)
atggtgcagccggtgttcgacgctgcgttgctgtctgggcagtcggacatcccgtcgcagttcatctggccggcggacgagagcccgtccccggacgccaccgaggagctgcacgtcccgctcatcgacatcgggggcctcctctccggcgaccgtgaggcggccgccgaggtgacacgcctcgtcggcgacgcctgcgagcgccacggtttcttccaggtcgtcaaccacggcatcgacgccgagctcctggccgacgcgcaccgctgcgtggacgccttcttcacgatgtcgctccaggacaagcagcgcgcgctgcgccggcccggcgagtcctgcggctacgccagcagcttcaccggccggttcgcgtccaagctaccgtggaaagaaacgctgtcgttccgttcctgtccgtcggaaccggacctcgtcgtcgactacatcgtcgccaccctcggcgaggaccaccgccgcctgggggaggtgtacgctcggtactgctcggagatgagccgactgtcgctggagatcatggaggtgctgggcgagagtctgggcgtggggcgggcgcactaccggcgcttcttcgagggcaacgaatccataatgcggctcaactactacccgccctgccagcggcccaacggaaccctgggcaccggcccgcactgcgacccgacgtcgctgaccatcctccaccaggacgacgtgggcggactgcaggtgcacgccgatggccgctggctatccatccggcccagggccgacgccttcgtcgtcaacatcggcgacaccttcatggcgctctccaacggccgctacaagagctgcctccaccgcgccgtcgtcaacagccgtgtgcccaggaagtcgctggccttcttcctgtgcccggagatggacaaggtggtggcgccccccgggacgtccgtcgacgaggccaacccgcgggcgtacccggacttcacgtggcgggcgctgctggacttcacgcagaagcactaccgggccgacatgaagacgctcgaggtgttctccgactggatccagcagggccaccagccagccgccacgacgacgacgacacaagatcagaggacgtacactgcttctgcttctctgcatctgctagcttgttgtacgtag

SEQ ID NO: 24745 - protein, 382 aa, Lolium perenne
MVQPVFDAALLSGQSDIPSQFIWPADESPSPDATEELHVPLIDIGGLLSGDREAAAEVTRLVGDACERHGFFQVVNHGIDAELLADAHRCVDAFFTMSLQDKQRALRRPGESCGYASSFTGRFASKLPWKETLSFRSCPSEPDLVVDYIVATLGEDHRRLGEVYARYCSEMSRLSLEIMEVLGESLGVGRAHYRRFFEGNESIMRLNYYPPCQRPNGTLGTGPHCDPTSLTILHQDDVGGLQVHADGRWLSIRPRADAFVVNIGDTFMALSNGRYKSCLHRAVVNSRVPRKSLAFFLCPEMDKVVAPPGTSVDEANPRAYPDFTWRALLDFTQKHYRADMKTLEVFSDWIQQGHQPAATTTTTQDQRTYTASASLHLLACCT

SEQ ID NO: 24746 - DNA, 1080 bp, Arabidopsis thaliana
  CDS (1)..(1080)
atgaattcctccgacgtcaacttctccctactccagagccaaccaaatgttccggctgaattcttctggccggagaaagacgttgccccttcagaaggcgacctcgatctcccaatcatcgacttgagtgggttcttgaatggcaatgaggccgagacgcaacttgcagctaaggcagtgaaaaaagcgtgcatggctcacggtacttttctagtggtcaatcatggcttcaagtcgggcttggctgaaaaggcgcttgagatatcgagtttgttctttgggctatccaaggatgagaagctaagggcttataggatcccggggaatatctctggctataccgcaggtcatagccaaagattttcctccaatcttccgtggaatgagactttgactttggccttcaaaaaggggccaccccatgttgttgaagactttctaacctcaaggctaggcaaccatcgtcaagagatcggtcaagtgtttcaagaattttgtgatgcaatgaatggactggttatggatttgatggagctattgggtataagtatgggtttaaaagacaggacatactaccggagattcttcgaagatggaagtggcatcttcagatgcaactattatccgccgtgcaagcagccagagaaagcccttggtgttggcccccataatgacccaacggctataaccgttttgcttcaagacgatgttgtgggcttagaggtctttgccgcaggtagttggcagaccgttcgccctcgtcctggtgctcttgtcgtcaacgttggagacaccttcatggcattgtcaaatggaaactacaggagttgttaccacagggcagtggtaaacaaggagaaagtgagaaggtcattagtattcttctcttgtcctagagaagataaaatcatcgtacctcctcctgaacttgtggaaggtgaagaagcttctagaaagtaccctgactttacttgggctcagcttcagaaatttacccagtccggctatcgagtcgataacaccactctccataacttctcttcgtggctcgtctctaactccgacaagaaatcaacttga

SEQ ID NO: 24747 - protein, 359 aa, Arabidopsis thaliana
MNSSDVNFSLLQSQPNVPAEFFWPEKDVAPSEGDLDLPIIDLSGFLNGNEAETQLAAKAVKKACMAHGTFLVVNHGFKSGLAEKALEISSLFFGLSKDEKLRAYRIPGNISGYTAGHSQRFSSNLPWNETLTLAFKKGPPHVVEDFLTSRLGNHRQEIGQVFQEFCDAMNGLVMDLMELLGISMGLKDRTYYRRFFEDGSGIFRCNYYPPCKQPEKALGVGPHNDPTAITVLLQDDVVGLEVFAAGSWQTVRPRPGALVVNVGDTFMALSNGNYRSCYHRAVVNKEKVRRSLVFFSCPREDKIIVPPPELVEGEEASRKYPDFTWAQLQKFTQSGYRVDNTTLHNFSSWLVSNSDKKST

SEQ ID NO: 24748 - DNA, 1179 bp, Malus domestica
  CDS (1)..(1179)
atggctgttgagtgcatgatcaaacccagcagcttgcaaaccatgacacaacctccctccccaaaaacccagcaaacccagcagcacaaagaggatgaccaaaagccattggtttttgatgcctcagttttcaggtatcaaactgaaattccgagtcagttcatctggcccgatcacgaaaagccttgcaaaaacactcccgagctccaagtcgcactcatagacttgggaggctttctctccggtgacaaagaagccgtcgcgaaagcctctcaacttgtaggagaggcatgccagaagcatggatttttcctcatcgtgaatcatggcgtcgacaataagctcatcgcggacgctcactgctacatggatgacttttttggaatgccactctccgagaaacagagagctgaaaggaaagcaggggagagctgtggctatgccagcagcttcactggcagattctcctcaaaactcccgtggaaagagactctttctttcagctactccgccgaaaaaggctcaacaaattttatccaagattatttttgcgacaaaatgggggaagaattcaaggaattcgggagggtttaccaagattattgcaaggctatgagcacactttctattgggatcatggaacttctgggactgagccttggagtggacagagcttacttcaaggagtttttcgaagacaacaattcgataatgaggcttaactactacccaccatgccagagacctgagcagactttaggcactggccctcattgtgatccaacagctttgaccattcttcacgaagaccaagttggaggccttgaagtctttgttgatgatcaatggcactccgttacccctaatttaaatgcctttgtcgtcaacattggtgacaccttcatggcactttcaaatgggaagtacaaaagcgggctgcacagggcggtggtgaatagtgaaacaccaaggaagtctcttgcattcttcttgtgtccgagagacgataaagttgtgaagccaccgagcgggttggtggatacttcgagtccgagaaaatacccagatttcacatggtcgatgctgttggagttcacaatgaagcattacagagccgacatgaaaaccctgcaggtcttttcaaactgggttcaacagaaaagcaaccaaaaactgtga

SEQ ID NO: 24749 - protein, 392 aa, Malus domestica
MAVECMIKPSSLQTMTQPPSPKTQQTQQHKEDDQKPLVFDASVFRYQTEIPSQFIWPDHEKPCKNTPELQVALIDLGGFLSGDKEAVAKASQLVGEACQKHGFFLIVNHGVDNKLIADAHCYMDDFFGMPLSEKQRAERKAGESCGYASSFTGRFSSKLPWKETLSFSYSAEKGSTNFIQDYFCDKMGEEFKEFGRVYQDYCKAMSTLSIGIMELLGLSLGVDRAYFKEFFEDNNSIMRLNYYPPCQRPEQTLGTGPHCDPTALTILHEDQVGGLEVFVDDQWHSVTPNLNAFVVNIGDTFMALSNGKYKSGLHRAVVNSETPRKSLAFFLCPRDDKVVKPPSGLVDTSSPRKYPDFTWSMLLEFTMKHYRADMKTLQVFSNWVQQKSNQKL

SEQ ID NO: 24750 - DNA, 1128 bp, Solanum tuberosum
  CDS (1)..(1128)
atggccattgattgtatggtcatgcctatgatacaaacatcgtccgatgagaaaaacccactcattttcgattcgtccgtgcttaaacatgagtccaacattcctagacaatttatatggccggaccacgagaagcctagtggtggtgttcctgaacttgatgttccacttatcgatttaggggcgttcctttctggtgatccaattgcagctaagcgagaatctaggctcgttgatgaagcatgtaagaaccacggtttctttcttgtgggaaatcatggtgttgacactaatcttatctcacttgcacatcgttatatgaacatgttctttgagttaccactttccaataagcaaatgattcaaaggaagagaggagatcattgtggttatgctagtagctttactgaaagattttcgtctaagttaccttggaaagaaacactttctttttcatattctgccctacaaggctcgtcccacatggttgatcaatattttctaaagacaatgggtgaagactttagccatatcggaaagttttaccaagaatactgcaatgcgatgagcactctctcttctgggatcatggaactcttgggtgaaagcctgggcgtgagcaagaaccatttcaaacaattctttgaagaaaatgaatcgattatgagactcaactattacccaacatgtcaaaaaccagatcttgcgttgggaactggaccacattgtgacccaacatcattaaccatcctccatcaagacagcgtctcagggcttcaagttttcatggacaatcagtggcgctccatcagtccaaatcttagtgcttttgtcgttaacataggcgacacatttatggcgctttcaaatggaaggtataaaagttgtttgcacagagctgtagtaaacaacaagacacctagaaaatctcttgctttttttctttgtcctaagaaggataaggtggtgaggccaccagcagaattggtggactccaataatcctagaatatatccagatttcacatggccaactctccttgagtttacacaaaagcattatagagctgataccaacactctacaattcttctccaattggcttcaacagagaactacagaggtttaa

SEQ ID NO: 24751 - protein, 375 aa, Solanum tuberosum
MAIDCMVMPMIQTSSDEKNPLIFDSSVLKHESNIPRQFIWPDHEKPSGGVPELDVPLIDLGAFLSGDPIAAKRESRLVDEACKNHGFFLVGNHGVDTNLISLAHRYMNMFFELPLSNKQMIQRKRGDHCGYASSFTERFSSKLPWKETLSFSYSALQGSSHMVDQYFLKTMGEDFSHIGKFYQEYCNAMSTLSSGIMELLGESLGVSKNHFKQFFEENESIMRLNYYPTCQKPDLALGTGPHCDPTSLTILHQDSVSGLQVFMDNQWRSISPNLSAFVVNIGDTFMALSNGRYKSCLHRAVVNNKTPRKSLAFFLCPKKDKVVRPPAELVDSNNPRIYPDFTWPTLLEFTQKHYRADTNTLQFFSNWLQQRTTEV

SEQ ID NO: 24752 - DNA, 1137 bp, Solanum tuberosum
  CDS (1)..(1137)
atggctattgattgtatgatcacaaatgcaaaatctccaatgatagatgaaacaaaacaatttatttttgatgcatcgcatatgaaacgtgagtctaatattcccacacaattcatatggcccgaccacgagaagccttgtgccgtagtacaagaacttcacgtaccccttattgacttaaggggttttctttctggtgactctgacgcggcccaacaagcatctaagcttgttggagaagcgtgtcggagtcatggcttttttcttgtggtgaaccatggagttgatgctaatcttatttctaatgctcatcgttatatggatacgttctttgacttgccgcttttggaaaagcaaaaggctcagaggaaaattggtgagcattgtggttatgctagtagctttactggaaggttttcgtcaaagctaccttggaaagagacactctcttttcgttactctgctgaagaagaatcatctcacatagttgaagatattttcaaaggacattgggtgaaaattttaaccatcttggggaatgtttatcaagaatattgcaattccaagaacacactttctcttgggatcatggaactcttagggatgagcctaggcgtagagaagagccacttcaaagaatttttcgaagaaaatgattcgataatgagactcaactactatccaccatgtcagaaaccggagctcaccttaggaacggggcctcattgtgacccaacatcattaacaattctccatcaagattgtgttggcggacttcaagtttttgtggacgatgaatggcgttccatcagtccaaatttcaatgcatttgtggttaacataggcgacacatttatggcgctatcaaatggaagatacaaaagttgcctgcacagagcagtagtaaacaacaagactcctaggaaatcacttgctttctttctttgtccaaacaaagataaggtggtgagcccaccaaatgaattggtggactccaacaaccctcgaatatatcctgatttcacatggcctactctccttgaatttactcaaaaacattatagagctgatatgaacactcttcaaacattctcaaattgggttcatgatcaacacaatactaaaacacaagtttaa

SEQ ID NO: 24753 - protein, 378 aa, Solanum tuberosum
MAIDCMITNAKSPMIDETKQFIFDASHMKRESNIPTQFIWPDHEKPCAVVQELHVPLIDLRGFLSGDSDAAQQASKLVGEACRSHGFFLVVNHGVDANLISNAHRYMDTFFDLPLLEKQKAQRKIGEHCGYASSFTGRFSSKLPWKETLSFRYSAEEESSHIVEDIFKGHWVKILTILGNVYQEYCNSKNTLSLGIMELLGMSLGVEKSHFKEFFEENDSIMRLNYYPPCQKPELTLGTGPHCDPTSLTILHQDCVGGLQVFVDDEWRSISPNFNAFVVNIGDTFMALSNGRYKSCLHRAVVNNKTPRKSLAFFLCPNKDKVVSPPNELVDSNNPRIYPDFTWPTLLEFTQKHYRADMNTLQTFSNWVHDQHNTKTQV

SEQ ID NO: 24754 - DNA, 1140 bp, Lactuca sativa
  CDS (1)..(1140)
atgcctcctttccttcttccttcaccatcacgtttacccaaaaaagaaacaaactttagaaataatccatttatctttgatgcatcgtttcttcaaaatgaaactagcataccccaacaattcatgtggcctgaggacgaaaagccccaccttgatctaccactaccacaacttcgtgttcctccgattgacctaaatgatttcctcaccggtgactcccttgcagtgtgcaatgcggctcagctagttgatgctgcttgtcgagaacatgggttctttcaagttgttaaccatggtattgatcagaggttgataaatgaagctcacaagatcatggatcttttctttggaatgccacttttagagaagcaaaaggctcaacgaaaagttggtgagtactgtggatacgctagtagcttcactaatagattctcctccaagcttccatggaaagaaacactttctgttcgatattctgcggatccactatcctcaaatttggttcaagattacttcttgaaagtaatgggggaagattttagttatctcgggagagtttgtcaagaatactgtgaagctatgagcaaactttctcttagtatcatagagctactaggaatgagccttgggatcggtcaatcctattttagggatttctatgaagaaaatgattcgataatgagattaaactactacccgccttgccaaaaaccagatcaaacacttggaaccggtccccattgtgatccaacatctctaaccattcttcaccaagataatgttggtgggcttgaagtttttgtagacgaaaaatggcactccattgctccatgttccgaagcctttgttgtcaatatcggagatacattcatggcattatcaaacggattgtacaagagttgcttacatagagcagttgtgaacaatcacacaccaagaaagtctcttgcgttctttctgtctcctagaatggacaaagtcgtgtgcccaccaaaaccattggttgaagatgttgataagcagagaagatatccagattttacatggtcgactttcctcgagttcactcagaaacattatagagcagacaagaatacccttgacgccttctcaaactggcttaagaatggaagaaaatga

SEQ ID NO: 24755 - protein, 379 aa, Lactuca sativa
MPPFLLPSPSRLPKKETNFRNNPFIFDASFLQNETSIPQQFMWPEDEKPHLDLPLPQLRVPPIDLNDFLTGDSLAVCNAAQLVDAACREHGFFQVVNHGIDQRLINEAHKIMDLFFGMPLLEKQKAQRKVGEYCGYASSFTNRFSSKLPWKETLSVRYSADPLSSNLVQDYFLKVMGEDFSYLGRVCQEYCEAMSKLSLSIIELLGMSLGIGQSYFRDFYEENDSIMRLNYYPPCQKPDQTLGTGPHCDPTSLTILHQDNVGGLEVFVDEKWHSIAPCSEAFVVNIGDTFMALSNGLYKSCLHRAVVNNHTPRKSLAFFLSPRMDKVVCPPKPLVEDVDKQRRYPDFTWSTFLEFTQKHYRADKNTLDAFSNWLKNGRK

SEQ ID NO: 24756 - DNA, 1143 bp, Pisum sativum
  CDS (1)..(1143)
atggctatagaatgcataacaagtagtgcaaaactcatgactcaaaagagtgataaaaatgaaaatgaagggtcatcaaaattagtttttgatgcttcatttctaaaaaaccaactcaaccttccaaaacaattcatttggccagatgatgaaaagccatgcatgaatgtgccggaacttgatgttccactcattgatttcaaaaacttcctttctggtgacccttttgcggcaatggaagcttctaaaaccattggtgaagcatgtgagaaacatgggttttttcttgtggttaatcatggaattgatacaaagttaattgaacatgctcatagttacatgaatgatttctttgaggttcccctgtctcagaaacagaggtgtcagagaaaaacaggggaacattgtggttatgctagtagtttcactgggagattctcctcaaatcttccatggaaagaaactctttcttttcaattttcagatgagaaaaactcttcaaatattgttaaagattacctttccaacacattaggggaagattttcaacaatttggggaggtttaccaagaatattgtgaagcaatgagcaaactttcactagggataatggagctacttggaatgagtcttggagttgggaaagaatgttttagagatttttttgaagagaataaatcaattatgagacttaattattaccctccatgtcaaaaacctgatctcactttaggaactggccctcattgtgatccaacatctttaactattcttcaccaagatcaagttggtggcttgcaagtttttgttgataatgagtggcattccattaggccaaatttcaatgcttttgttgtcaatattggtgacaccttcatggctctttcaaatgggagatacaagagttgtttacatagggcagtggtgaacaacaagacaacaagaaaatctctagctttctttttgtgtccaaaaggtgataaagtggttagcccaccaagtgaattggtgaatgatttgacaccaaggatctatccagattttacatggccaatgcttcttgagtttactcaaaaacattatagagctgatatgaggacacttgaggcatttacaaaatggattcaacaaaaacaaaactag

SEQ ID NO: 24757 - protein, 380 aa, Pisum sativum
MAIECITSSAKLMTQKSDKNENEGSSKLVFDASFLKNQLNLPKQFIWPDDEKPCMNVPELDVPLIDFKNFLSGDPFAAMEASKTIGEACEKHGFFLVVNHGIDTKLIEHAHSYMNDFFEVPLSQKQRCQRKTGEHCGYASSFTGRFSSNLPWKETLSFQFSDEKNSSNIVKDYLSNTLGEDFQQFGEVYQEYCEAMSKLSLGIMELLGMSLGVGKECFRDFFEENKSIMRLNYYPPCQKPDLTLGTGPHCDPTSLTILHQDQVGGLQVFVDNEWHSIRPNFNAFVVNIGDTFMALSNGRYKSCLHRAVVNNKTTRKSLAFFLCPKGDKVVSPPSELVNDLTPRIYPDFTWPMLLEFTQKHYRADMRTLEAFTKWIQQKQN

SEQ ID NO: 24758 - DNA, 1158 bp, Populus tremula x Populus tremuloides
  CDS (1)..(1158)
atggcaatagattgcatcaaaaccatgccatccataaccacccctcaccaccacccaaaagatcaggatcaatgcaaagatgatggcaagtcttttgtctttgatgcacaagttcttcgacaccagacaaacataccccagcagttcatttggccagacaatgaaaagcctaatattaatgcacctgaactccaagtcccgcttgtagacttgggtgatttcctctctggtaaccctgttgctgcagtggaagcttcaaggcttgttggtgaagcatgtaaaaaacatggtttctttctagttgttaatcatggagttgataaaacactcattgcccatgctcataattacgttgacaccttcttcaaattgccactttctgagaaacaaaaggcccagagaaagattggcgagtcctgtggatatgctagcagctttactggcaggttttcctctaaacttccatggaaagaaacgctttcttttcgctacaaagctgaggagaattcatcaaaacacatcgaggaatactttcacaacagaatgggggaagatttcgctgagttcgggacggtgtatcaggactactgtgaggccatgagcactttgtcactagggatcatggagctattaggaatgagcctcggtgtgagcagagaacatttcagggaattctttaacgagaatgattcaataatgaggctcaactactaccctccatgccaaaaacctgaccttactttaggcaccggtcctcattgtgatccaacttccttaaccatcctccatcaggaccaagtgggcggtcttcaagtgtttgtggacaacgaatggcgttcgattaaccccaattttgacgcttttgttgttaacattggtgacaccttcatggctctatcgaatggtatatacaagagctgtttgcaccgagcagtggtgaacagccaaacaccaagaaaatctctcgctttctttctgtgtccaaagaatgacaagatggtaactccaccacatgaattagtggacacatgcaatccgagaatatatccagatttcacatggccgatgttgctcgaattcacacaaaagcattaccgagctgacatgaagacacttgaggtgttcacaaactggcttcatcaacgaagttttagctga

SEQ ID NO: 24759 - protein, 385 aa, Populus tremula x Populus tremuloides
MAIDCIKTMPSITTPHHHPKDQDQCKDDGKSFVFDAQVLRHQTNIPQQFIWPDNEKPNINAPELQVPLVDLGDFLSGNPVAAVEASRLVGEACKKHGFFLVVNHGVDKTLIAHAHNYVDTFFKLPLSEKQKAQRKIGESCGYASSFTGRFSSKLPWKETLSFRYKAEENSSKHIEEYFHNRMGEDFAEFGTVYQDYCEAMSTLSLGIMELLGMSLGVSREHFREFFNENDSIMRLNYYPPCQKPDLTLGTGPHCDPTSLTILHQDQVGGLQVFVDNEWRSINPNFDAFVVNIGDTFMALSNGIYKSCLHRAVVNSQTPRKSLAFFLCPKNDKMVTPPHELVDTCNPRIYPDFTWPMLLEFTQKHYRADMKTLEVFTNWLHQRSFS

SEQ ID NO: 24760 - DNA, 1152 bp, Citrus sinensis x Poncirus trifoliata
  CDS (1)..(1152)
atggcaatagactgcataaaaaatatacccaccatgcttcatcaaccaaaagaagaatacaaagatgaacaaaagccactagtttttgatgcctcagtgcttaaacaccaaacccaaataccaaagcagttcatatggcctgatgatgaaaagccttgtgttaatgcaccggagcttcaagtaccacttatcgacttgggtgggttcctttccgatgaccctgttgctgctaaagaagcttcaaggctcgtaggtgaggcttgccgaaagcacgggttctttcttgttgttaatcatggagttgattcaagcctaatcgctgatgctcaccgttacatggaccatttctttgagttgccacttaatgaaaagcaaagggctcggaggaaacttggtgagcactgcggttatgctagtagcttcactggtaggttttcctccaagcttccatggaaagagacgttgtcgtttcgttattcagctgagaagagcttatcaaataacattgttgaagattatttgcttaacacaatgggagatgaattcaagcaattcggaagggtttatcaggactactgcgagtcgatgagcagactttcactagggattatggagcttttagcaataagtcttggtgtaggcagggcccactttaaagaattttttgaagagaatgattcgataatgaggctaaattactatccgccgtgccaaaaaccagagcttactttagggacaggacctcactgcgatccaacttctttaacaatccttcaccaagaccaagtgggtggtcttcaggtgtttgtagacaatgaatggcgctcaattagcccaaatttcgaagcatttgtcgttaacattggcgacaccttcatggcgctttcaaatgggagatacaagagttgtttgcaccgggcggttgtgaatagccaaacaacaagaaaatcactcgctttctttttgtgtccaaagaatgataaagtggtatccccaccaagtgagttagtggacacatacagcagcccaagaatatacccagattttacgtggcctatgcttctcgaattcacacagaagcattatagagctgacatgaagactcttgaagcattcacaaactggcttcaacagaaaaaacagctgaaatga

SEQ ID NO: 24761 - protein, 383 aa, Citrus sinensis x Poncirus trifoliata
MAIDCIKNIPTMLHQPKEEYKDEQKPLVFDASVLKHQTQIPKQFIWPDDEKPCVNAPELQVPLIDLGGFLSDDPVAAKEASRLVGEACRKHGFFLVVNHGVDSSLIADAHRYMDHFFELPLNEKQRARRKLGEHCGYASSFTGRFSSKLPWKETLSFRYSAEKSLSNNIVEDYLLNTMGDEFKQFGRVYQDYCESMSRLSLGIMELLAISLGVGRAHFKEFFEENDSIMRLNYYPPCQKPELTLGTGPHCDPTSLTILHQDQVGGLQVFVDNEWRSISPNFEAFVVNIGDTFMALSNGRYKSCLHRAVVNSQTTRKSLAFFLCPKNDKVVSPPSELVDTYSSPRIYPDFTWPMLLEFTQKHYRADMKTLEAFTNWLQQKKQLK

SEQ ID NO: 24762 - DNA, 1131 bp, Solanum dulcamara
  CDS (1)..(1131)
atggctattgattgtatgatcacaaatggaaaatcacccatgctagatgagaaaaaaacattgatttttgatgcatcccatatgaaacgtgagtctaacattcccacacaattcatatggcccgaccacgagaagccttgtgccgtagcacaacaacttgccgtaccccttattgatttaagaggtttcctttctggtgactccgacgcggcccaacaagcatctaaacttgttggggaagcatgccggagtcacggtttctttcttgtagtcaaccacggagttgaagctaatctcatttctaatgcacatcgttacatggacacgttctttgacttgccactttcggaaaagcaaaaagctcagaggaaaattggtgagcattgtggttatgctagtagctttaccggaaggttttcgtcaaagctaccttggaaagaaacactctcttttcgatactctgctgaggaaaattcatctcacatagttgaagagtattttcaaaggacattgggtgaaagttttaaccatcttgggaatgtttatcaagaatattgtaattccatgaacacactttctcttgggatcatggaactcttagggatgagcctaggtgtagagaagagccacttcaaagaatttttcgaagaaaatgactcgataatgagactcaactactatccaccatgccagaaaccagagctcaccttaggaacggggcctcattgtgatccaacatcattaaccattctccatcaagattgtgttgggggacttcaagtttttgtggacgatgaatggcgttccattactccaactttcaatgcatttgtggttaacataggcgacacatttatggcactatcaaatggaagatacaaaagttgcctgcacagagcagtagtaaacaacaagactcctaggaaatcacttgctttctttctttgtccaaacaaagataaggtggtgagcccaccaaatgaattggtggactccaacaaccctcgaatatatcccgatttcacatggcctacactccttgaatttactcaaaagcattatagagctgatatgaacactcttcaaactttctcaaattggcttcaacacaatactactgcacaactttaa

SEQ ID NO: 24763 - protein, 376 aa, Solanum dulcamara
MAIDCMITNGKSPMLDEKKTLIFDASHMKRESNIPTQFIWPDHEKPCAVAQQLAVPLIDLRGFLSGDSDAAQQASKLVGEACRSHGFFLVVNHGVEANLISNAHRYMDTFFDLPLSEKQKAQRKIGEHCGYASSFTGRFSSKLPWKETLSFRYSAEENSSHIVEEYFQRTLGESFNHLGNVYQEYCNSMNTLSLGIMELLGMSLGVEKSHFKEFFEENDSIMRLNYYPPCQKPELTLGTGPHCDPTSLTILHQDCVGGLQVFVDDEWRSITPTFNAFVVNIGDTFMALSNGRYKSCLHRAVVNNKTPRKSLAFFLCPNKDKVVSPPNELVDSNNPRIYPDFTWPTLLEFTQKHYRADMNTLQTFSNWLQHNTTAQL

SEQ ID NO: 24764 - DNA, 1116 bp, Nicotiana tabacum
  CDS (1)..(1116)
atgccttctaggatctcagattcttttagagctcactctcaaaaacacttggatttgaactcaataaaagaattgccagaatcccatgcatggacatcatcaaatgattatccttcagaaaattcctgtaacttcgagtctattccagttatcgacctcgacaactacatcaacaacaataatattaatgttcttgaacatataggtcaagcatgcaagaaatggggtgcattccaaatcataaaccataatatatcagaaaggctactccaagatattgaattggcaggaaaaagccttttttcgcttccaatgcagcaaaagcttaaggctgctcgttctcctgaaggtgtcactggctatggcgtggctcgcatttcttctttcttttcaaagcttatgtggtctgaaggattcaccattgttggctcccctcttgaacacgctcgccaaatttggcctcacgattaccaaaagttctgtgacgtaatagaagaatacgaaagggaaatggaaaagctagctggaagactgatgtggctcatgcttgggtcattggggataactaaggaagaagtgaaatgggccgtatgcccaaaaggagaatccaaaggaggaagtgcggccctacaactgaattcttacccggcatgtccggatccggatcgggccatgggtttagccgcacatacggattctaccatattaacaatccttcaccaaaacaacacaagtggtttacaagttttcaaagaagggagtggttgggtcactgtccctccattccctggtgcattagtagttaacgtaggtgaccttttacacatactatcaaacgggttgtacccgagtgtcctacatcgggcggttgtgaaccggacgcgacatcgcctttctgtagcctatttatatggtccaccgtcgagggtgaaagtttcacccctcgcaaaattggtggaccaaaggcaccctccattgtatagggcagtaacatggagtgagtacttgggcactaaagccaggcattttgataaggcactttcatctgtacggctttgtgcccctctaagtggatttaccgatgccaaagatcataatggtgtgcaagttggctaa

SEQ ID NO: 24765 - protein, 371 aa, Nicotiana tabacum
MPSRISDSFRAHSQKHLDLNSIKELPESHAWTSSNDYPSENSCNFESIPVIDLDNYINNNNINVLEHIGQACKKWGAFQIINHNISERLLQDIELAGKSLFSLPMQQKLKAARSPEGVTGYGVARISSFFSKLMWSEGFTIVGSPLEHARQIWPHDYQKFCDVIEEYEREMEKLAGRLMWLMLGSLGITKEEVKWAVCPKGESKGGSAALQLNSYPACPDPDRAMGLAAHTDSTILTILHQNNTSGLQVFKEGSGWVTVPPFPGALVVNVGDLLHILSNGLYPSVLHRAVVNRTRHRLSVAYLYGPPSRVKVSPLAKLVDQRHPPLYRAVTWSEYLGTKARHFDKALSSVRLCAPLSGFTDAKDHNGVQVG

SEQ ID NO: 24766 - DNA, 1170 bp, Daucus carota
  CDS (1)..(1170)
atggtggcaactaccttagaatctccgagagtagagaccctggctgggagtggcattcagctaatccccaaagaatacgtgaggccgaaagatgaactcatcagcatcaccaacattttcgaggaggaaaagagtgatgaaggccctcaggtgcccacagtcgacatagctgatattctgtctgatgacaaagcggttagggagaaatgctatgaaagaatcaaggatgctgccgtggactggggagtcatgcacctcgttaaccacgggatctcaaacgagctcatggatcgtgttagagtggctggacaggcgttttttgctgaaccgattggtgagaaggagaagtatgcaaatgatccaggcaccggtatgattcaggggtatggaagcaagctagcaaacaatgctagcggccagcttgagtgggaagactatttcttccaccttgtttaccctgaggagaaagccgatttgtctatttggcctaagagaccacaggactacattccagcaacaagggagtacgcgaaggagttaagaggcctcgcgacaaagttactatctgcattatctttcggactgggacttgaagaaggaaggctagaaaaagaagttggcggaatggaagagctaatactccagatgaagatcaattactacccgaagtgtcctcaacctgaactggctcttggtgttgaagctcacactgatgtgagtgcactcagtttcatactccataatatggtgcctggtctacaactgttttatggaggcaagtgggtgaccgcaaaatgtgttccagactctattatagtacacattggggatacactagaaattttaagcaatggcaagtataaaagcattcttcacaggggacttgtgaacaaggaaaaagttagaatttcgtgggctgttttctgtgagcctccgaaagagaagatcattctaaagccactgccagagacagtaactgaggctgagccaccgctctttccaccccgtacctttgctcagcatatggcacacaagctgttcaggaagagccaggaagctattgatgactcgaaaaaggttcagccgcaggaacaaaataatgctgaaactgatattcctcagccaaccgaacaacaaaaaactgaagaaagtaatcctcagaaaatttaa

SEQ ID NO: 24767 - protein, 389 aa, Daucus carota
MVATTLESPRVETLAGSGIQLIPKEYVRPKDELISITNIFEEEKSDEGPQVPTVDIADILSDDKAVREKCYERIKDAAVDWGVMHLVNHGISNELMDRVRVAGQAFFAEPIGEKEKYANDPGTGMIQGYGSKLANNASGQLEWEDYFFHLVYPEEKADLSIWPKRPQDYIPATREYAKELRGLATKLLSALSFGLGLEEGRLEKEVGGMEELILQMKINYYPKCPQPELALGVEAHTDVSALSFILHNMVPGLQLFYGGKWVTAKCVPDSIIVHIGDTLEILSNGKYKSILHRGLVNKEKVRISWAVFCEPPKEKIILKPLPETVTEAEPPLFPPRTFAQHMAHKLFRKSQEAIDDSKKVQPQEQNNAETDIPQPTEQQKTEESNPQKI

SEQ ID NO: 24768 - DNA, 1209 bp, Daucus carota
  CDS (1)..(1209)
atggtggcaactaccttagaatctccaagagttgagaccctggctgggagtggcattcagctaatcccaaaagaatacgtgaggcctaaagatgaacttatcagcatcaccaacattttcgaggaggaaaagagtgatgaaggccctcaggtgcccacagtcgacatagctgatattctttctgaggacaaagctgttagggagaaatgctatgaaagaatcaaggatgctgctgtggaatggggagtcatgcacctagttaaccacgggatttcaaatgagctcatggaccgtgttagagtggctggacaggcgttttttgctgaaccaattggcgagaaggagaagtatgcaaatgatccaggcaccggaatgattcaagggtatggaagtaagctagccaacaatgctagcggccagcttgagtgggaagactatttcttccaccttgtttaccccgaggagaaagctgatttgtctatctggcctaagagaccacaggactacattccagcaacaagggagtacgcgaaggagttaagaggcctagcgacaaagttactgtctgcattatctttcggactgggacttgaagaaggaaggctagaaaaagaagttggtggaatggaagagctgatactccaaatgaagatcaattactaccccaagtgtcctcaacctgaactggctcttggagttgaagctcacactgatgtgagtgcactcagtttcatactccataatacggtgcctgggctacaactcttctatggaggcaagtgggtgaccgctaaatgtgttccagactctattatagtacacattggggacacacttgaaattttaagcaatggcaagtataaaagcattcttcacaggggacttgtgaacaaggaaaaagttagaatttcgtgggctgttttctgtgagcctccgaaagagaagattattctaaagccgctgccagagacggtaactgaggctgagccaccgctctttccaccccgtacctttgctcagcatatggcacacaagctgttcaggaagagccaggaagctattgatgactcgaaaaaggttcagccacaggaacagaataatgctgaaactgatattcctcagccagaagaacaacaaaagaccgaagaaagtaatcctcagaaaattgaaatattaaagcctggagaagaggcatctagttctccataa

SEQ ID NO: 24769 - protein, 402 aa, Daucus carota
MVATTLESPRVETLAGSGIQLIPKEYVRPKDELISITNIFEEEKSDEGPQVPTVDIADILSEDKAVREKCYERIKDAAVEWGVMHLVNHGISNELMDRVRVAGQAFFAEPIGEKEKYANDPGTGMIQGYGSKLANNASGQLEWEDYFFHLVYPEEKADLSIWPKRPQDYIPATREYAKELRGLATKLLSALSFGLGLEEGRLEKEVGGMEELILQMKINYYPKCPQPELALGVEAHTDVSALSFILHNTVPGLQLFYGGKWVTAKCVPDSIIVHIGDTLEILSNGKYKSILHRGLVNKEKVRISWAVFCEPPKEKIILKPLPETVTEAEPPLFPPRTFAQHMAHKLFRKSQEAIDDSKKVQPQEQNNAETDIPQPEEQQKTEESNPQKIEILKPGEEASSSP

SEQ ID NO: 24770 - DNA, 1140 bp, Citrullus lanatus
  CDS (1)..(1140)
atggcgatgaaatgcatgatgagtacaggcgaatcaaaggagatgaaaagcaagcttcaccgtgtggaattcgggtgttcggaggagtcaatggtgccggagaatttcgtgtggccggacgagtttaaagcaaaagacggggcgccggagctgcatgttccacatattgacttgcataagtttttaaatggaaatgaaagtgatattgaagaggcaaccaggctggtggatgaagcgtgtagaaaacatggattctttgtgttggtgaaccatggagttgatatggaattgataaaaggggttcatgagtgtatggatgagtttttcacattgccttttgatgtgaaacaaaaatctcaaaggaaatttggtgaaaattatgggtatgctaatagcttcattggaagattctccaataatcttccatggaaggaaaccctttcccttccttatgttgctaatcataattccacctctgttcaggatttcgtttctaaatgtgttggcccagaattatcccatcaagggaaggtgtatcaagaatgtggaaaagcattgagtgatctgagtttgaagatagtggagctattggggttgagcctaggggttccaaaagagaagttcaaaaaattctatgaggacaatgattcaataataaggctgaattattacccaccatgcgagaagccagagctgacattgggaactgggcctcactgtgatccaacctccataacaattcttcaccaagaccacgtcagtggccttcaagtctacgtggatgatgagtggcactcaattcctccaaccaaggactcctttgtcatcaatatcggtgacactttcatggctctgacaaatggggtttacaagagctgcttccaccgagctgtagtgaactgcaaggaagtaagaaaatcaatggccttctttctatgtccagcggctgacaaagtggtgagagcaccggacgaagtggtggagaagaatccaccaaggaagtttccagattacacatggccaatgctgcttgaacttacccaaaaattttatagggctgattccaacacttttcaggccttcataccttggcttgaaaaacaaaagtcggctaatactattgcaccaccggctctttaa

SEQ ID NO: 24771 - protein, 379 aa, Citrullus lanatus
MAMKCMMSTGESKEMKSKLHRVEFGCSEESMVPENFVWPDEFKAKDGAPELHVPHIDLHKFLNGNESDIEEATRLVDEACRKHGFFVLVNHGVDMELIKGVHECMDEFFTLPFDVKQKSQRKFGENYGYANSFIGRFSNNLPWKETLSLPYVANHNSTSVQDFVSKCVGPELSHQGKVYQECGKALSDLSLKIVELLGLSLGVPKEKFKKFYEDNDSIIRLNYYPPCEKPELTLGTGPHCDPTSITILHQDHVSGLQVYVDDEWHSIPPTKDSFVINIGDTFMALTNGVYKSCFHRAVVNCKEVRKSMAFFLCPAADKVVRAPDEVVEKNPPRKFPDYTWPMLLELTQKFYRADSNTFQAFIPWLEKQKSANTIAPPAL

SEQ ID NO: 24772 - DNA, 1140 bp, Solanum lycopersicum
  CDS (1)..(1140)
atggcaattgattatatgatcacgagaaataacaacatgatatccaaagaagatcaagtatcaaataagtcgttgagttttaatgcatcattgatgaaaaacgagtcaaatataccaagccaattcatatggccggaccatgagaagccaaattatgctagtgttactagagaactacaagttccactaatagacttaagtggggtactttcaaatgaccctattgaaatcaagaaagcaactagacttgttaatgaagcatgtacaaaacatggttttttcttagtggttaaccatggggttgacacaaatctcataaaaaatgcacatgtttacatagacaagttctttcaattgccactttgtgagaagcaaaaagcacaaagaaaagttggtgaacattgtggttatgctagtagctttgttggaaggttttcatctaagttgccttggaaagaaacactctcgtttcaatactctgatcagaaaggctcatcacacatagttgaagattattttcaaaggacactcggtgaaaaatttagttatattgggaaggtttatcaagaatattgcaatgccgtgagcaccctttctctagggatcatggaacttttgggattgagcctaggtgtgagcaagaaccacttcaaagaattctttcaaggaaatgagtccataatgagactaaattattatccaacatgtcaaaaacctgaactcactttagggacagggcctcattgtgatcccacatcattaaccattctccatcaagatagtgttggtgggcttcaagtttttgtggataatgagtggcacaccatcactccaaatttcaacgcttttgttgttaacataggcgacacgtttatggcactatcaaacggaagatacaaaagttgcttgcatagagcagtggtaaacaacaaaatacctaggaaatcacttgctttttttctttgtcccaagaaagataaggtgattactccaccaaatgaattagtggattctaacaatccaagaatttatccagatttcacatggccaaccttattagaatttacacaaaaacaatatagagctgatatgaacaccctacaaactttctcaaattggcttaaaaaaacacagtcttaa

SEQ ID NO: 24773 - protein, 379 aa, Solanum lycopersicum
MAIDYMITRNNNMISKEDQVSNKSLSFNASLMKNESNIPSQFIWPDHEKPNYASVTRELQVPLIDLSGVLSNDPIEIKKATRLVNEACTKHGFFLVVNHGVDTNLIKNAHVYIDKFFQLPLCEKQKAQRKVGEHCGYASSFVGRFSSKLPWKETLSFQYSDQKGSSHIVEDYFQRTLGEKFSYIGKVYQEYCNAVSTLSLGIMELLGLSLGVSKNHFKEFFQGNESIMRLNYYPTCQKPELTLGTGPHCDPTSLTILHQDSVGGLQVFVDNEWHTITPNFNAFVVNIGDTFMALSNGRYKSCLHRAVVNNKIPRKSLAFFLCPKKDKVITPPNELVDSNNPRIYPDFTWPTLLEFTQKQYRADMNTLQTFSNWLKKTQS

SEQ ID NO: 24774 - DNA, 1119 bp, Solanum lycopersicum
  CDS (1)..(1119)
atggccattgattgcatggtgatgcctatgatacaagatgagaaaaagtcactcattttcgactcatctgtacttaaaaatgaatcgaacattcctagacaatttatatggccggaccacgagaagcctagtggttttgttggtgaacttgatgttccgcttattgatttaggggcattcctttctggtgatccgattgcagctaagcgtgaatctagtctggttgatgaagcatgcaagaagcacggtttctttctcgtggcaaatcatggtgttgatactaatcttatctcacttgcacatcgctatatggacatgttctttgaattgccactttccgacaagcaaaagattcaaaggaagagaggagatcattgtggttatgctagtagctttactgagagattttcatccaagttaccttggaaagagacactttcttttccatattctaccctacaaggctcgtcccacatgcttgatcaatattttctaaaaacaatgggggaagactttagccatattgggaagttttaccaagagtattgtaatgcgatgagcactctctcttctgggatcatggaactcttgggcgagagcctaggcgtgagcaaaaaccatttcaaacaattctttgaagaaaatgaatcgattatgagactcaactattatccaacatgtctaaaaccagatcttgcgttaggaactggaccacattgtgacccaacatcattaaccatcctccatcaagacaacgtctcaggactacaagttttcatggacaaccagtggcgctctatcagtccaaataatagtgcttttgtcgttaacataggtgacacatttatggcgctttcaaatggaaggtataaaagttgtttgcacagagctgtagtaaacaacaaaacacctagaaaatctcttgctttttttctttgtcctaagaaggataaggtggtgaggccaccggcagaattggtggactctaataatcctagaatatatccagatttcacatggccaactctatttgaatttacacagaagcattatagagctgataccaatactctacgattcttctctacttggcttcaacagaaaactacggaaatttaa

SEQ ID NO: 24775 - protein, 372 aa, Solanum lycopersicum
MAIDCMVMPMIQDEKKSLIFDSSVLKNESNIPRQFIWPDHEKPSGFVGELDVPLIDLGAFLSGDPIAAKRESSLVDEACKKHGFFLVANHGVDTNLISLAHRYMDMFFELPLSDKQKIQRKRGDHCGYASSFTERFSSKLPWKETLSFPYSTLQGSSHMLDQYFLKTMGEDFSHIGKFYQEYCNAMSTLSSGIMELLGESLGVSKNHFKQFFEENESIMRLNYYPTCLKPDLALGTGPHCDPTSLTILHQDNVSGLQVFMDNQWRSISPNNSAFVVNIGDTFMALSNGRYKSCLHRAVVNNKTPRKSLAFFLCPKKDKVVRPPAELVDSNNPRIYPDFTWPTLFEFTQKHYRADTNTLRFFSTWLQQKTTEI

SEQ ID NO: 24776 - DNA, 1137 bp, Solanum lycopersicum
  CDS (1)..(1137)
atggctattgattgtatgatcacaaatggaaaatctcccatgctagatgaaaaaaaacaatttatttttgatgcatctcatatgaaacgtgagtctaatattcccacacaattcatatggcctgaccacgagaagccttgtgccttagtacaacaacttcatgtaccccttattgatttaaggggttttctttctggtgaccccgacgcggcccaacaagcatctgagcttgttggggaagcgtgtcggggtcatggtttttttcttgtggtgaatcacggagttgatgctaatctcatttctaatgctcatcgttatatggatacgttctttgagttgccgcttttagaaaagcaaaaagctcagagaaaaattggtgagcattgtggttatgctagtagttttactggaaggttttcatcaaagctaccttggaaagagacactctcttttcgttactccgctaagaaagaatcatctcacatagttgaagagtattttcaaagtacattgggcgaaagttttaaccatctcgggaatgtttatcaagaatattgcaattctatgaacacactttctcttgggatcatggaactcttagggatgagcctaggtgtagagaagagtcacttcaaagagtttttcgaagaaaatgattcgataatgagactcaactactatccaccatgccagaaaccggagctcgccttaggaacggggcctcattgtgatccaacatcattaacaattctccatcaagattgtgttggtggacttcaagtttttgtggacgatgaatggcgttccatcagtccaaatttcaatgcatttgtggttaatataggcgacacatttatggcgctatcaaatggaagatacaaaagttgcctacacagagcggtagtaaacaacaagactcctaggaaatcacttgctttctttctttgtccaaacaaagataaggtggtgagcccaccaaatgaattggtggactccaacaaccctcgaatatatcccgatttcacatggcctactcttcttgaatttactcaaaaacattatagagctgatatgaacactcttcaaacattctcaaattggcttcatgatcaacacaacactactacacaagcttaa

SEQ ID NO: 24777 - protein, 378 aa, Solanum lycopersicum
MAIDCMITNGKSPMLDEKKQFIFDASHMKRESNIPTQFIWPDHEKPCALVQQLHVPLIDLRGFLSGDPDAAQQASELVGEACRGHGFFLVVNHGVDANLISNAHRYMDTFFELPLLEKQKAQRKIGEHCGYASSFTGRFSSKLPWKETLSFRYSAKKESSHIVEEYFQSTLGESFNHLGNVYQEYCNSMNTLSLGIMELLGMSLGVEKSHFKEFFEENDSIMRLNYYPPCQKPELALGTGPHCDPTSLTILHQDCVGGLQVFVDDEWRSISPNFNAFVVNIGDTFMALSNGRYKSCLHRAVVNNKTPRKSLAFFLCPNKDKVVSPPNELVDSNNPRIYPDFTWPTLLEFTQKHYRADMNTLQTFSNWLHDQHNTTTQA

SEQ ID NO: 24778 - DNA, 1089 bp, Lactuca sativa
  CDS (1)..(1089)
atgtctttacaacaactagatgctttcagagaaaagcatttggacttaaactcaataaaagaactacccgaatcatatgcatggtcatcagaggataattgcccttcctctagcaattcagagccagttccagtgatcaacctcaaagattcaaacgccatgaagcatgtaggctatgcatgcaaaacatggggtgtgtttcaagtcaccaaccatgacatccctataactcttcttaacaacatggaagcttctggaagaaaactattctcactccccttccaacaaaaactaaaagcagctcgctctctagatggtgtttctggatatggtgttgctagaatatcttctttttttccaaaactcatgtggtctgaaggcttcactctcattgactcacctcaccaacatgctcagaagctttggcctcaaggttccggaaacttctgcgatgtaatcgaagagtacaataaggagatgaataaattatccaatagggtgatgtggctaatacttggatcattgggtataaaaaagggagatataaaatgggctaatcaagaaggagagataaaagaagcatgtgcagccttacagttaaactcttacccatcttgtccagatccggatcgagccatgggtcttgcagctcatacggattcaaccctcctcacaatcctacaccaaagcaacacaagtgggttgcaggttcaaagaggagttggttgggttacagtgaaacccatagcaggggcacttgtggtaaatataggtgacttgatccaaatactatctaatgggttgtattcaagtgttcttcatcgagccatggttaatcgaacccaacatcgtctctctgtagcttatctctatggcccaccatcaaatgttagaattgcaccactatcaaaattaacagataatgttcatcctcctctttatcgcccagtgacatggagtgaatatcttggcactaaggcaaaacacttcaataaggcactcttgtttgttcgtttgtgtgcacctatcactatgagtggctttgtagatgcaagtactgataatcataacagtgtccttgttggttga

SEQ ID NO: 24779 - protein, 362 aa, Lactuca sativa
MSLQQLDAFREKHLDLNSIKELPESYAWSSEDNCPSSSNSEPVPVINLKDSNAMKHVGYACKTWGVFQVTNHDIPITLLNNMEASGRKLFSLPFQQKLKAARSLDGVSGYGVARISSFFPKLMWSEGFTLIDSPHQHAQKLWPQGSGNFCDVIEEYNKEMNKLSNRVMWLILGSLGIKKGDIKWANQEGEIKEACAALQLNSYPSCPDPDRAMGLAAHTDSTLLTILHQSNTSGLQVQRGVGWVTVKPIAGALVVNIGDLIQILSNGLYSSVLHRAMVNRTQHRLSVAYLYGPPSNVRIAPLSKLTDNVHPPLYRPVTWSEYLGTKAKHFNKALLFVRLCAPITMSGFVDASTDNHNSVLVG

SEQ ID NO: 24780 - DNA, 1092 bp, Lactuca sativa
  CDS (1)..(1092)
atgcatacaagagtagctgatgctttcaaagcccacccgatggtaaatcagaagcatttagacttaaaatccatgaaagaattgcctgaatcgcatgcatggttatcacaagatggctctccttcttatggttcatccagttccgagcaagttcctgtgattaacctcaaagatccaaacgccatgaagcttgtgggccatgcatgcaagacttggggggtgtttcaggtcaccaatcatggcgtccctacaaatcttcttgaagaaatggaggctgctggtagaaaactgtttgcacttcctatccaacagaagcttaaagctgctagagcaccagacggtgtctctggctatggcgttgcaagaatatcgtcgttttttcccaaactcatgtggtctgaaggattcaccatcattggatctccatacgaacatgctcgtaaactctggcccaaccgttatagtagattctgtgatgtaatcgaagggtataaacacgagatgaacaacttagctcaaagactgatgtggttgatgctgggatccttgggtgtaacaacggaagacgtaaaatgggatggatcacaaggatcatgtccagctttacagttaaattcatacccagcttgtcctgatccagaccgagccatgggtctggcggctcacacagattcgaccctcttaaccattctttaccaaaacaacacaagcggactccaggctcacagggaaggagccggttgggtgacagtcccaccgatacctggtgcccttgtggtcaatgtaggtgacctcctccacatattatccaacgggttgtatccaagtgtgctgcaccgggccatggtgaaccgaacccaacaccgcttgtcagtcgcttatctctacggaccaccttctaatgttcaaatctcacctctttcaaaactaacggatcatgttcacccacctctttaccgaccagttacatggagcgagtatcttggcacaaaagcaaaacacttcaacaaggctttgtcttcggtccgtttatgtgtgcctttaaacggattcgtggacgcaaatgatcacagtggtgtaccagttggttga

SEQ ID NO: 24781 - protein, 363 aa, Lactuca sativa
MHTRVADAFKAHPMVNQKHLDLKSMKELPESHAWLSQDGSPSYGSSSSEQVPVINLKDPNAMKLVGHACKTWGVFQVTNHGVPTNLLEEMEAAGRKLFALPIQQKLKAARAPDGVSGYGVARISSFFPKLMWSEGFTIIGSPYEHARKLWPNRYSRFCDVIEGYKHEMNNLAQRLMWLMLGSLGVTTEDVKWDGSQGSCPALQLNSYPACPDPDRAMGLAAHTDSTLLTILYQNNTSGLQAHREGAGWVTVPPIPGALVVNVGDLLHILSNGLYPSVLHRAMVNRTQHRLSVAYLYGPPSNVQISPLSKLTDHVHPPLYRPVTWSEYLGTKAKHFNKALSSVRLCVPLNGFVDANDHSGVPVG

SEQ ID NO: 24782 - DNA, 1110 bp, Lactuca sativa
  CDS (1)..(1110)
atgccttctttgcataaagaacacataaacgcccaaccgaaaccactggtttttgattctttgatcctgcaacatgaaaccaacatacccgaacagtttatatggcctgatcatgagaaacccaactcacaaaaagccaaggaacttgcagttcctttagttgacctacgaggctttctttctggacgtgctagttcagccaaggaagcctccgtggttgttggcgaggcttgcaagaagcatggtttcttcctagtcaccaatcatggtgttgatgcaagcctcatagtagatgctcataggtacatggacctattctttgagcttccttttttagacaaacaaagagttcaaagaaaaataggtgagagctgtgggtatgcaagcagcttcaccggtagattctcctctaaactaccatggaaagaaacactttcttttcaattctcaggtgaaaaaaaatcatccaaaatagtggaggagtattttgagaagacaatgggaaaagaatttgctcgactcgggaaagtttaccaagaatattgcaatgccatgagtagactttcactaggaatcatggaattactggggatgagccttggtgtagagcaatcgcactttaaggaattcttcaaagaaaacgattccataatgaggctaaactactacccaccatgccaaaaaccagacctcaccttaggaacaggccctcattgtgatccaacatcattaacaattcttcaccaagataccgttggtggactagaagtgttcatagacaatgaatggcgttcaattgctccaaatctcaatacttttgtagtaaacatcggtgatacattcatggcactttcaaatggacaatacagaagttgcttacatagagctgtggttaacaacaagattcataggaaatcacttgctttctttctatgtccaaaaaaggataaggtggtgagcccaccagacgaactagtggacgaaaagaaccccagaatttatccagattttacatggtctacgtttcttgaattcactcagaagcattaccgagccgacatgaacaccctccaagctttcaccaactggattcagcagaaaaacagctga

SEQ ID NO: 24783 - protein, 369 aa, Lactuca sativa
MPSLHKEHINAQPKPLVFDSLILQHETNIPEQFIWPDHEKPNSQKAKELAVPLVDLRGFLSGRASSAKEASVVVGEACKKHGFFLVTNHGVDASLIVDAHRYMDLFFELPFLDKQRVQRKIGESCGYASSFTGRFSSKLPWKETLSFQFSGEKKSSKIVEEYFEKTMGKEFARLGKVYQEYCNAMSRLSLGIMELLGMSLGVEQSHFKEFFKENDSIMRLNYYPPCQKPDLTLGTGPHCDPTSLTILHQDTVGGLEVFIDNEWRSIAPNLNTFVVNIGDTFMALSNGQYRSCLHRAVVNNKIHRKSLAFFLCPKKDKVVSPPDELVDEKNPRIYPDFTWSTFLEFTQKHYRADMNTLQAFTNWIQQKNS

SEQ ID NO: 24784 - DNA, 1152 bp, Lactuca sativa
  CDS (1)..(1152)
atggcaatagattgcatgattaagacaccatcgtgcatgtcttccctcaaggaagagctcaaagaagaccaacaaaggtcactcgtgttcgatgcatcagtcctacaacacgaaaccaacatcccccaacagttcatatggcccgataatgagaaacccaactccaaaaaatctaaggacctagaggttcctttgatagacttgggaggcttcctttctggacgctcgagttcaacaaaagaagcctccaaactcgttggtaacgcttgccaaaaacatgggtttttcctcgtggtaaatcatggagttgatgcaaacctaatatctgatgctcaaacatacatggacttgttctttgagcttcccctttcagaaaagcaaagagctcaaagaaaagccggtgaaagctgtggatatgctagtagcttcactggaagattctcctctaaacttccttggaaagagacgctatctttccgattctcagccgagaagaactcggccgatatagttaaggactacttcgagaacacaatgggcgaagaatttgttcgactcgggaaggtgtatcaagaatattgcaatgccatgagtagactttctcttgggatcatggagttattggggttgagccttggggttaaccgatctcacttcaaggaatttttcgaagaaaataattctataatgagactcaactactatccacgatgccaaaaaccagagctcaccttaggaacggggcctcattgtgacccgacatcgttgacaattctacaccaagataacgttggtgggctagaagtgttcgtggacaatgagtggcgttccattacaccaaattcaaatgcttttgttgtcaatatcggtgacacattcatggcactttcaaatggaagatacaaaagttgcttacatagagctgtggtaaacaacaaaactccaagaaagtcacttgctttctttctatgcccaaagaaggataaggtggtgagcccaccaaaggaattggtggatgaaaataacccaagggtatatccagattttacatgggctacttttcttgagttcactcagaagcattacagagctgacatgaacaccctccaagctttttcaaactgggttgaacagaaaaccagcacaacttga

SEQ ID NO: 24785 - protein, 383 aa, Lactuca sativa
MAIDCMIKTPSCMSSLKEELKEDQQRSLVFDASVLQHETNIPQQFIWPDNEKPNSKKSKDLEVPLIDLGGFLSGRSSSTKEASKLVGNACQKHGFFLVVNHGVDANLISDAQTYMDLFFELPLSEKQRAQRKAGESCGYASSFTGRFSSKLPWKETLSFRFSAEKNSADIVKDYFENTMGEEFVRLGKVYQEYCNAMSRLSLGIMELLGLSLGVNRSHFKEFFEENNSIMRLNYYPRCQKPELTLGTGPHCDPTSLTILHQDNVGGLEVFVDNEWRSITPNSNAFVVNIGDTFMALSNGRYKSCLHRAVVNNKTPRKSLAFFLCPKKDKVVSPPKELVDENNPRVYPDFTWATFLEFTQKHYRADMNTLQAFSNWVEQKTSTT

SEQ ID NO: 24786 - DNA, 1068 bp, Solanum lycopersicum
  CDS (1)..(1068)
atgccttcaattatctcatcacaactcgatttgtactcgataaaagaattacccgaatcacatgcatggaaatcctcattggacgacgatggatcgcgtaatattaatgcggagtccattccagtaatcgatctaaaccatgatcataaatttgtcatggatacaattggccatgcatgcaaaacatggggtgccttccaaatagtaaaccacaatatatcgcaccgattacttaaccatatggaaacacacgggacgagattattttcccttccgatgcaacaaaaattaaaagcagctcgatcgtccgatggcatcgctggctatggagtcgctcgaatttcttcttttttcgataagctcatgtggtccgaaggattcacaatttttggatcccctctggaacatgcccgccaactttggccatacgattacaataaattctgtgacgtcatcgaagagtacgaaaatgaaatggaaaagctagcgggaagattaatgggtttaatgcttgggtcccttggaatagcaaaagaagatgttaaatgggccgttggcccaagaagcggtagttcggccctacaactaaattcttacccggcttgtccggatccggatcgggctatgggtcttgctgcacatacggattctaccctattaacaatccttcaccaaaacaatacaagtggtttacaggtatttaaagaaggaaacgggtgggtaacggttcctctccttcgcggggcattagttatcaacgtgggtgatttgttacacatattgtcaaacgggttgtacccgagtgttctacatcgggcgatagtgaacaggactcgacatcgtctttcagtggcctatctatatgggccaccgtcaggggtgaaaatttcacccctatcgaaattggtagaccaaaggaaccctcaaatgtataggccagtgacgtggagtgagtatttgggaactaaggcaaaacatttcgataaagcactttcatctgttcggctttgtgctcctcgtattgggtttgccaattccaaggatcaaagtggcgtccaagtaggttaa

SEQ ID NO: 24787 - protein, 355 aa, Solanum lycopersicum
MPSIISSQLDLYSIKELPESHAWKSSLDDDGSRNINAESIPVIDLNHDHKFVMDTIGHACKTWGAFQIVNHNISHRLLNHMETHGTRLFSLPMQQKLKAARSSDGIAGYGVARISSFFDKLMWSEGFTIFGSPLEHARQLWPYDYNKFCDVIEEYENEMEKLAGRLMGLMLGSLGIAKEDVKWAVGPRSGSSALQLNSYPACPDPDRAMGLAAHTDSTLLTILHQNNTSGLQVFKEGNGWVTVPLLRGALVINVGDLLHILSNGLYPSVLHRAIVNRTRHRLSVAYLYGPPSGVKISPLSKLVDQRNPQMYRPVTWSEYLGTKAKHFDKALSSVRLCAPRIGFANSKDQSGVQVG

SEQ ID NO: 24788 - DNA, 1122 bp, Solanum lycopersicum
  CDS (1)..(1122)
atgccttcaagaatctcagattcttgtagacctcatcactctcaaaaacactttgacttgaactcaattaaagaattaccagaatcccatgcatggacatcatcaaatgatcattatactcaagaaaattcatgtaatttcgagtctattccagtgatcgacctcgataacaacaataacaataataataataatattcttgatcatataggtcatgcatgcaagaaatggggtgcatttcaaattataaaccatagtatatcagagaaattactacaagatattgaagtggctggaaaaaccctattttcacttcctatgcaacaaaaattaaaggctgctcgctctcctgatggtgtcactggctatggcgcagctcgaatttcgtcttttttctcgaagctcatgtggtctgaagggttcaccattgttggttccccaattgaacatgctcgacaactttggcctaaagattacaacaaattctgtgaagtaatagaagaatatgaaaaggaaatggaaaagctagcaggaagattaatgtggcttatacttgggtcattaggaataacaaaagatgatgtaaaatgggccgtaggcccaaaaggtgaaaccaaagaaggatgtgctgccttacaactaaattcatacccggcatgtccggatccgggtcgggccatgggtcttgcagcacatacggattctaccatattaacaatccttcaccaaaacaacacaagtggtttacaagtttaccaagaaggaaatgggtggatcactgtccctccaatacccggggcattagtagttaatataggtgacttattacacatactctcaaacgggtcatacccgagtgttttacatcgggcggtcgtaaaccgaacacgatatcgactttctgtagcttatttatatggtccaccgtcgggggtgagagtctcacccctatcgaaattggtggaccataggcacccacccttgtatagggcagtgacatggagtgagtatttaggtactaaggccaaatattttgacaaggcactttcatccgtacggctttgtgtccctttaaatggatttactgatgccaaagatcataaaggggtacaagttggataa

SEQ ID NO: 24789 - protein, 373 aa, Solanum lycopersicum
MPSRISDSCRPHHSQKHFDLNSIKELPESHAWTSSNDHYTQENSCNFESIPVIDLDNNNNNNNNNILDHIGHACKKWGAFQIINHSISEKLLQDIEVAGKTLFSLPMQQKLKAARSPDGVTGYGAARISSFFSKLMWSEGFTIVGSPIEHARQLWPKDYNKFCEVIEEYEKEMEKLAGRLMWLILGSLGITKDDVKWAVGPKGETKEGCAALQLNSYPACPDPGRAMGLAAHTDSTILTILHQNNTSGLQVYQEGNGWITVPPIPGALVVNIGDLLHILSNGSYPSVLHRAVVNRTRYRLSVAYLYGPPSGVRVSPLSKLVDHRHPPLYRAVTWSEYLGTKAKYFDKALSSVRLCVPLNGFTDAKDHKGVQVG

SEQ ID NO: 24790 - DNA, 1113 bp, Triticum aestivum
  CDS (1)..(1113)
atgccgacgccgtcgcacctgagcaaggacccgcgctacttcgacttccgggcggcgcggcgggtgccggagacgcacgcgtggcccgggctgcacgaccaccccgtggtggacggcagcggcgcgggcggagggccggacgcggtgccggtggtggacatgcgcgacccgtgcgcggcggaggcggtggcgctggcggcgcaggactggggcgccttcctcctggagggccacggcgtcccgttggagctgctggccggcgtggaggccgcgatcgggggcatgttcgcgctgccggcgtcggagaagatgcgcgccgtgcggcggcccggcgactcgtgcggctacgggtcgccgcccatctcctccttcttctccaagtgcatgtggtccgagggctacaccttctccccggccaacctccgctccgacctccgcaagctctggcccaaggccggccatgactaccgccacttctgcgccgtgatggaggagttccacagggagatgcgcgcgctggccgacaagctgctggagctgttcctggtggccctcgggctcaccggcgagcaggtcgccgccgtcgagtccgagcacaagatcgccgagaccatgaccgccacaatgcacctcaactggtaccccaagtgcccggacccgaagcgggcgctgggcctgatcgcgcacacggactcgggcttcttcaccttcgtgctgcagagcctggtgcccgggctgcagctgttccggcacgggcccgaccggtgggtgacggtgcccgccgtgccgggggccatggtcgtcaacgtcggcgacctcttccagatcctcaccaacggccgcttccacagcgtctaccaccgcgccgtcgtcaaccgggacagcgaccggatatcgctcggctacttcctcggcccgcccgcccacgtcaaggtggcgccgctcagggaggccctcgccggcacgcccgccgcctaccgggccgtcacgtggcccgagtacatgggcgtgcgcaagaaggccttcaccaccggtgcctccgcgctcaagatggtcgccatctccaccgacaacgatgccgccaacgacacggacgacctgatctcgtcgtag

SEQ ID NO: 24791 - protein, 370 aa, Triticum aestivum
MPTPSHLSKDPRYFDFRAARRVPETHAWPGLHDHPVVDGSGAGGGPDAVPVVDMRDPCAAEAVALAAQDWGAFLLEGHGVPLELLAGVEAAIGGMFALPASEKMRAVRRPGDSCGYGSPPISSFFSKCMWSEGYTFSPANLRSDLRKLWPKAGHDYRHFCAVMEEFHREMRALADKLLELFLVALGLTGEQVAAVESEHKIAETMTATMHLNWYPKCPDPKRALGLIAHTDSGFFTFVLQSLVPGLQLFRHGPDRWVTVPAVPGAMVVNVGDLFQILTNGRFHSVYHRAVVNRDSDRISLGYFLGPPAHVKVAPLREALAGTPAAYRAVTWPEYMGVRKKAFTTGASALKMVAISTDNDAANDTDDLISS

SEQ ID NO: 24792 - DNA, 1113 bp, Triticum aestivum
  CDS (1)..(1113)
atgccgacgccggcgcacctgagcaaggacccgcgctacttcgacttccgggcggcgcggcgggtgccggagacgcacgcgtggcccgggctgcacgaccaccccgtggtggacggcagcggcgcgggcggagggccggacgcggtgccggtggtggacatgcgcgacccgtgcgcggcggaggcggtggcgctggcggcgcaggactggggcgccttcctcctggagggccacggcgtcccgttggagctgctggcgcgcgtggaggccgcgatcgcgggcatgttcgcgctgccggcgtcggagaagatgcgcgccgtgcggcggcccggcgactcgtgcggctacgggtcgccgcccatctcctccttcttctccaagtgcatgtggtccgagggctacaccttctccccggccaacctccgctccgacctccgcaagctctggcccaaggccggccacgactaccgccacttctgcgccgtgatggaggagttccacagggagatgcgcgcgctggccgacaagctgctggagctgttcctggtggccctcgggctcaccggcgagcaggtcgccgccgtcgagtccgagcagaagatcgccgagaccatgaccgccacaatgcacctcaactggtaccccaagtgcccggacccgaagcgggcgctgggcctgatcgcgcacacggactcgggcttcttcaccttcgtgctgcagagccttgtgcccgggctgcagctgttccggcacggccccgaccggtgggtgacggtgcccgccgtgccgggggccatggtcgtcaacgtcggcgacctcttccagatcctcaccaacggccgcttccacagcgtctaccaccgcgccgtcgtcaaccgcgacagcgaccggatatcgctcggctacttcctcggcccgcccgcccacgtcaaggtggcgccgctcagggaggccctggccggcacgcccgccgcctaccgcgccgtcacgtggcccgagtacatgggcgtgcgcaagaaggccttcaccaccggcgcctccgcgctcaagatggtcgccatctccactgacaacgacgccgccaaccacacggacgacctgatctcgtcgtag

SEQ ID NO: 24793 - protein, 370 aa, Triticum aestivum
MPTPAHLSKDPRYFDFRAARRVPETHAWPGLHDHPVVDGSGAGGGPDAVPVVDMRDPCAAEAVALAAQDWGAFLLEGHGVPLELLARVEAAIAGMFALPASEKMRAVRRPGDSCGYGSPPISSFFSKCMWSEGYTFSPANLRSDLRKLWPKAGHDYRHFCAVMEEFHREMRALADKLLELFLVALGLTGEQVAAVESEQKIAETMTATMHLNWYPKCPDPKRALGLIAHTDSGFFTFVLQSLVPGLQLFRHGPDRWVTVPAVPGAMVVNVGDLFQILTNGRFHSVYHRAVVNRDSDRISLGYFLGPPAHVKVAPLREALAGTPAAYRAVTWPEYMGVRKKAFTTGASALKMVAISTDNDAANHTDDLISS

SEQ ID NO: 24794 - DNA, 1110 bp, Triticum aestivum
  CDS (1)..(1110)
atgccgacgccggcgcacctgagcaaggacccgcactacttcgacttccgggcggcgcggcgggtgccggagacgcacgcgtggcccgggctgcacgaccaccccgtggtggacggcagcggcgcgggcggagagccggacgcggtgccggtggtggacatgcgcgacccgttcgcggcggaggcggtggggctggcggcgcaggactggggcgccttcctcctggtgggccacggcgtcccgttggacctcctggtgcgcgtggaggccgcgatcgcgggcatgttcgcgctgccggcgtcggagaagatgcgcgccgtgcggcggcccggcgactcgtgcggctacgggtcgccgcccatctcctccttcttctccaagtgcatgtggtccgagggctacaccttctccccggccaacctccgctccgacctccgcaagctctggcccaaggcaggccacgactaccgccacttctgcgccgtgatggaggagttccacagggagatgcgcgcgctggctgacaagctgctggagcttttcctcgtggccctcgggctcaccggcgagcaggtcgccgccgtcgagtccgagcagaagatcgccgagaccatgaccgccacaatgcacctcaactggtaccccaagtgcccggacccgaagcgggcgctgggcctgatcgcgcacacggactcgggcttcttcaccttcgtgctgcagagcctggtgccagggctgcagctgttccggcacggccccgaccggtgggtgacggtgccggccgtgccgggggccatggtcgtcaacgtcggcgacctcttccagatcctcaccaacggccgcttccacagcgtctaccaccgcgccgtcgtcaaccgcgagagcgaccggatatcgctcgggtacttcctcggcccgcccgcccacgtcaaggtggcgccgctcagggaggccctggccggcacgcccgccgcctaccgcgccgtcacgtggcccgagtacatgggtgtgcgcaagaaggccttcaccaccggggcctccgcgctcaagatggtcgccatctccaccgatgatgccgccaacgacacagacgacctgatcttgtcgtag

SEQ ID NO: 24795 - protein, 369 aa, Triticum aestivum
MPTPAHLSKDPHYFDFRAARRVPETHAWPGLHDHPVVDGSGAGGEPDAVPVVDMRDPFAAEAVGLAAQDWGAFLLVGHGVPLDLLVRVEAAIAGMFALPASEKMRAVRRPGDSCGYGSPPISSFFSKCMWSEGYTFSPANLRSDLRKLWPKAGHDYRHFCAVMEEFHREMRALADKLLELFLVALGLTGEQVAAVESEQKIAETMTATMHLNWYPKCPDPKRALGLIAHTDSGFFTFVLQSLVPGLQLFRHGPDRWVTVPAVPGAMVVNVGDLFQILTNGRFHSVYHRAVVNRESDRISLGYFLGPPAHVKVAPLREALAGTPAAYRAVTWPEYMGVRKKAFTTGASALKMVAISTDDAANDTDDLILS

SEQ ID NO: 24796 - DNA, 1077 bp, Arabidopsis thaliana
  CDS (1)..(1077)
atgcctgctatgttaacagatgtgtttagaggccatcccattcacctcccacactctcacatacctgacttcacatctctccgggagctcccggattcttacaagtggacccctaaagacgatctcctcttctccgctgctccttctcctccggccaccggtgaaaacatccctctcatcgacctcgaccacccggacgcgactaaccaaatcggtcatgcatgtagaacttggggtgccttccaaatctcaaaccacggcgtgcctttgggacttctccaagacattgagtttctcaccggtagtctcttcgggctacctgtccaacgcaagcttaagtctgctcggtcggagacaggtgtgtccggctacggcgtcgctcgtatcgcatctttcttcaataagcaaatgtggtccgaaggtttcaccatcactggctcgcctctcaacgatttccgtaaactttggccccaacatcacctcaactactgcgatatcgttgaagagtacgaggaacatatgaaaaagttggcatcgaaattgatgtggttagcactaaattcacttggggtcagcgaagaagacattgaatgggccagtctcagttcagatttaaactgggcccaagctgctctccagctaaatcactacccggtttgtcctgaaccggaccgagccatgggtctagcagctcataccgactccaccctcctaaccattctgtaccagaacaataccgccggtctacaagtatttcgcgatgatcttggttgggtcaccgtgccaccgtttcctggctcgctcgtggttaacgttggtgacctcttccacatcctatccaatggattgtttaaaagcgtgttgcaccgcgctcgggttaaccaaaccagagcccggttatctgtagcattcctttggggtccgcaatctgatatcaagatatcacctgtaccgaagctggttagtcccgttgaatcgcctctataccaatcggtgacatggaaagagtatcttcgaacaaaagcaactcacttcaacaaagctctttcaatgattagaaatcacagagaagaatga

SEQ ID NO: 24797 - protein, 358 aa, Arabidopsis thaliana
MPAMLTDVFRGHPIHLPHSHIPDFTSLRELPDSYKWTPKDDLLFSAAPSPPATGENIPLIDLDHPDATNQIGHACRTWGAFQISNHGVPLGLLQDIEFLTGSLFGLPVQRKLKSARSETGVSGYGVARIASFFNKQMWSEGFTITGSPLNDFRKLWPQHHLNYCDIVEEYEEHMKKLASKLMWLALNSLGVSEEDIEWASLSSDLNWAQAALQLNHYPVCPEPDRAMGLAAHTDSTLLTILYQNNTAGLQVFRDDLGWVTVPPFPGSLVVNVGDLFHILSNGLFKSVLHRARVNQTRARLSVAFLWGPQSDIKISPVPKLVSPVESPLYQSVTWKEYLRTKATHFNKALSMIRNHREE

SEQ ID NO: 24798 - DNA, 1044 bp, Arabidopsis thaliana
  CDS (1)..(1044)
atgagttcaacgttgagcgatgtgtttagatcgcatcccattcacatcccactctcaaacccacctgacttcaaatctctcccggattcttacacgtggactcctaaagatgatctcctcttctccgcctccgcctccgacgaaaccctgccgctcatcgacctctccgatatccacgtggccactcttgtgggccatgcttgtaccacgtggggagcgttccagatcaccaaccacggcgtcccctcgcgacttctcgacgacattgagttcctcaccggaagtcttttccggcttcccgtacagcggaagctcaaggcggctcggtcagagaatggcgtctccggctacggcgtagctcgtattgcttcgttctttaataagaagatgtggtccgaaggtttcaccgttattggctctcccctccacgatttccgtaaactctggcccagccaccacctcaaatactgtgaaattattgaagagtatgaagaacatatgcaaaagttggcagccaagttgatgtggttcgcattaggttcactgggagttgaagaaaaggacatacaatgggccgggcctaattcagactttcaaggaacccaagcagttatccaactaaaccattatccaaaatgtccagaaccagacagagccatgggcctcgcagcccatacagactcgaccctcatgacaattctgtaccagaacaacaccgccggtctccaagttttccgggatgacgtgggctgggttaccgcgccacctgtccctggctcgctggtggtcaacgtcggtgacttgctccacattttaaccaacggaatcttcccgagcgtgcttcaccgagccagggttaaccacgtccgatctcggttctcaatggcttacctgtggggtccaccatccgatataatgatctctccacttcccaaactggttgatcctctccaatctcctctctacccatctctcacttggaaacaataccttgctaccaaagctactcattttaatcaatctctttccattattagaaattaa

SEQ ID NO: 24799 - protein, 347 aa, Arabidopsis thaliana
MSSTLSDVFRSHPIHIPLSNPPDFKSLPDSYTWTPKDDLLFSASASDETLPLIDLSDIHVATLVGHACTTWGAFQITNHGVPSRLLDDIEFLTGSLFRLPVQRKLKAARSENGVSGYGVARIASFFNKKMWSEGFTVIGSPLHDFRKLWPSHHLKYCEIIEEYEEHMQKLAAKLMWFALGSLGVEEKDIQWAGPNSDFQGTQAVIQLNHYPKCPEPDRAMGLAAHTDSTLMTILYQNNTAGLQVFRDDVGWVTAPPVPGSLVVNVGDLLHILTNGIFPSVLHRARVNHVRSRFSMAYLWGPPSDIMISPLPKLVDPLQSPLYPSLTWKQYLATKATHFNQSLSIIRN

SEQ ID NO: 24800 - DNA, 1098 bp, Triticum aestivum
  CDS (1)..(1098)
atggtgcggccggtgttcgacgcggcggtgctgagcgggcggtcggacatcccctcgcagttcatctggcccgagggcgagagcccgaccccggacgccgccgaggagctgcacgtgcccctcatcaacatcggcggcatgctctccggcgacgccgctgcggcggccgaggtgacgcgcctcgtgggcgaggcctgcgagcggcacggcttcttccaggtcgtcaaccacggcatcgacgccgagctgctggcggacgcgcaccgctgcgtggacaacttcttcaccatgcccctcccggagaagcagcgcgccctgcgccgccccggcgagtcctgcggctacgccagcagcttcaccggccggttcgcctccaagctgccgtggaaggagaccctctccttccggtcctgcccgtccgaccccgccctcgtcgtcgactacatcgtcgccaccctcggcgaggaccaccgccgcctcggggaggtgtacgcgcgctactgctcggagatgagccgtctgtcgctggagatcatggaggtgctcggggagagcctcggggtcggccgtgcccactaccggcgcttcttcgagggcaacgactccatcatgcgcctcaactactacccgccgtgccagcggccgttggagacgctgggcacgggcccgcattgcgacccgacgtcgctgaccatcctccaccaggacaacgtcggcggcctgcaggtgcacacggagggccggtggcggtccatccgaccccgcgccgacgccttcgtcgtcaacatcggcgacaccttcatggcgctctcgaacgggaggtacaagagctgcctccaccgcgcagtcgtgaacagcagggtccccaggaagtcgctggccttcttcctctgcccggagatggacaaggtggtggcgccgccggggacgctggtggacgcctccaacccgcgcgcctacccggacttcacgtggcggtcgctgctggacttcacgcagaagcactaccgggcggacatgaagaccctcgaggtcttctcctcgtggatcgtccagcagcagcagggccagctcgccctccagccagccatgacatga

SEQ ID NO: 24801 - protein, 365 aa, Triticum aestivum
MVRPVFDAAVLSGRSDIPSQFIWPEGESPTPDAAEELHVPLINIGGMLSGDAAAAAEVTRLVGEACERHGFFQVVNHGIDAELLADAHRCVDNFFTMPLPEKQRALRRPGESCGYASSFTGRFASKLPWKETLSFRSCPSDPALVVDYIVATLGEDHRRLGEVYARYCSEMSRLSLEIMEVLGESLGVGRAHYRRFFEGNDSIMRLNYYPPCQRPLETLGTGPHCDPTSLTILHQDNVGGLQVHTEGRWRSIRPRADAFVVNIGDTFMALSNGRYKSCLHRAVVNSRVPRKSLAFFLCPEMDKVVAPPGTLVDASNPRAYPDFTWRSLLDFTQKHYRADMKTLEVFSSWIVQQQQGQLALQPAMT

SEQ ID NO: 24802 - DNA, 1098 bp, Triticum aestivum
  CDS (1)..(1098)
atggtgcagccggtgttcgacgcggcggtgctgagcggccgggcggacatcccgtcgcagttcatctggcccgagggcgagagcccgaccccggacgccgccgaggagctgcacgtcccgctcatcgacatcggcggcatgctctccggcgacccccgcgcgaccgccgaggtgacgcgcctcgtgggcgaggcctgcgagcggcacggcttcttccaggtcgtcaaccacggcatcgacgccgagctgctggcggacgcgcaccgctgcgtggacgccttcttcaccatgcccctcccggagaagcagcgcgcgctgcgccgccccggcgagtcctgcggctacgccagcagcttcaccggccggttcgcctccaagctgccctggaaggagacgctgtccttccgctcctgcccctccgaccccgccctcgtcgtcgactacatcgtcgccaccctcggcgaggaccaccgccgcctcggggaggtgtacgcccggtactgctcggagatgagccggctgtccctggagatcatggaggtgctcggggagagcctgggcgtcggccgcgcacactaccggcgcttcttcgagggcaacgactccatcatgcgcctcaactactacccgccgtgccagcggccgatggagacgctggggacgggcccgcattgcgacccgacgtcgctgaccatcctccaccaggacaacgtcggcgggctgcaggtgcacacggagggccggtggcgttccatccggccgcgggccgacgccttcgtcgtcaacatcggcgacaccttcatggcgctctcaaacgggcggtacaagagttgtctccaccgcgctgtcgtgaacagcaaggtcccgaggaagtcgctggccttcttcctgtgcccggagatggacaaggtggtggcgccgccggggacgctggtggacgccgccaacccgcgcgcctacccggacttcacgtggcggtcgctgctcgacttcacgcagaagcactaccgcgccgacatgaagaccctcgaggtcttctcctcctggatcgtccagcagcagcagggccagctcctcccaccattagccagccattga

SEQ ID NO: 24803 - protein, 365 aa, Triticum aestivum
MVQPVFDAAVLSGRADIPSQFIWPEGESPTPDAAEELHVPLIDIGGMLSGDPRATAEVTRLVGEACERHGFFQVVNHGIDAELLADAHRCVDAFFTMPLPEKQRALRRPGESCGYASSFTGRFASKLPWKETLSFRSCPSDPALVVDYIVATLGEDHRRLGEVYARYCSEMSRLSLEIMEVLGESLGVGRAHYRRFFEGNDSIMRLNYYPPCQRPMETLGTGPHCDPTSLTILHQDNVGGLQVHTEGRWRSIRPRADAFVVNIGDTFMALSNGRYKSCLHRAVVNSKVPRKSLAFFLCPEMDKVVAPPGTLVDAANPRAYPDFTWRSLLDFTQKHYRADMKTLEVFSSWIVQQQQGQLLPPLASH

SEQ ID NO: 24804 - DNA, 1086 bp, Triticum aestivum
  CDS (1)..(1086)
atggtgcagccggtgttcgacgcggcggtgctgagcggccgggcggacatcccgtcgcagttcatctggcccgagggcgagagcccgaccccggacgccgccgaggagctgcacgtcccgctcatcgacatcggcggcatgctctccggcgaccccgccgcggccgccgaggtgacgcgcctcgtgggcgaggcctgcgagcggcacggcttcttccaggtcgtgaaccacggtatcgacgccgagctgctggccgacgcgcaccgctgcgtggacaacttcttcacgatgcccctcccggagaagcagcgcgcgctgcgccaccccggcgagtcgtgcggctacgccagcagcttcaccggccggttcgcgtccaagctgccgtggaaggagaccctgtccttccgctcctgcccctccgaccccgccctcgtcgtcgactacatcgtcgccaccctcggcgaggaccaccgccgcctcggggaggtgtacgctcggtactgctcggagatgagccgtctgtcgctggagatcatggaggtgctcggggagagcctgggcgtcggccgcgcccactaccggcgcttcttcgagggcaacgactccatcatgcgcctcaactactacccgccgtgccagcggccgttggagacgctgggcacgggcccgcattgcgacccgacgtccctgaccatcctccaccaggacaacgtcggcggcctgcaggtgcacacggagggccggtggcgctccatccgaccccgcgccgacgccttcgtggtcaacatcggcgacaccttcatggcgctgtctaacggacggtacaagagctgcctccacagagcggtggtgaacagccgggtcccgaggaagtcgctggccttcttcctgtgcccggagatggacaaggtggtggcgccgccggggacgctggtggacgccgccaacccgcgcgcctacccggacttcacgtggcggtcgctgctggacttcacgcagaagcactaccgggccgacatgaagaccctcgaggtcttctcctcctggatcgtccagcagcagcagccccagcccgccaggacatga

SEQ ID NO: 24805 - protein, 361 aa, Triticum aestivum
MVQPVFDAAVLSGRADIPSQFIWPEGESPTPDAAEELHVPLIDIGGMLSGDPAAAAEVTRLVGEACERHGFFQVVNHGIDAELLADAHRCVDNFFTMPLPEKQRALRHPGESCGYASSFTGRFASKLPWKETLSFRSCPSDPALVVDYIVATLGEDHRRLGEVYARYCSEMSRLSLEIMEVLGESLGVGRAHYRRFFEGNDSIMRLNYYPPCQRPLETLGTGPHCDPTSLTILHQDNVGGLQVHTEGRWRSIRPRADAFVVNIGDTFMALSNGRYKSCLHRAVVNSRVPRKSLAFFLCPEMDKVVAPPGTLVDAANPRAYPDFTWRSLLDFTQKHYRADMKTLEVFSSWIVQQQQPQPART

SEQ ID NO: 24806 - DNA, 1134 bp, Arabidopsis thaliana
  CDS (1)..(1134)
atggccgtaagtttcgtaacaacatctcctgaggaagaagacaaaccgaagctaggccttggaaatattcaaactccgttaatcttcaacccttcaatgcttaaccttcaagccaatatcccaaaccaattcatctggcctgacgacgaaaaaccttccatcaacgttctcgagcttgatgttcctctcatcgaccttcaaaaccttctctctgatccatcctccactttagatgcttcgagactgatctctgaggcctgtaagaagcacggtttcttcctcgtggtcaatcacggcatcagcgaggagcttatttcagacgctcatgaatacacgagccgcttctttgatatgcctctctccgaaaaacagagggttcttagaaaatccggtgagagtgttggctacgcaagcagtttcaccggacgcttctccaccaagcttccatggaaggagaccctttctttccggttttgcgacgacatgagccgctcaaaatccgttcaagattacttctgcgatgcgttgggacatgggtttcagccatttgggaaggtgtatcaagagtattgtgaagcaatgagttctctatcactgaagatcatggagcttctggggctaagtttaggcgtaaaacgggactactttagagagtttttcgaagaaaacgattcaataatgagactgaattactaccctccatgtataaaaccagatctcacactaggaacaggacctcattgtgatccaacatctcttaccatccttcaccaagaccatgttaatggccttcaagtctttgtggaaaatcaatggcgctccattcgtcccaaccccaaggcctttgtggtcaatatcggcgatactttcatggctctatcgaacgatagatacaagagctgcttgcaccgggcggtggtgaacagcgagagcgagaggaaatcacttgcattcttcttgtgtccgaaaaaagacagagtagtgacgccaccgagagagcttttggacagcatcacatcaagaagataccctgacttcacatggtctatgttccttgagttcactcagaaacattatagagcagacatgaacactctccaagccttttcagattggctcaccaaacccatctaa

SEQ ID NO: 24807 - protein, 377 aa, Arabidopsis thaliana
MAVSFVTTSPEEEDKPKLGLGNIQTPLIFNPSMLNLQANIPNQFIWPDDEKPSINVLELDVPLIDLQNLLSDPSSTLDASRLISEACKKHGFFLVVNHGISEELISDAHEYTSRFFDMPLSEKQRVLRKSGESVGYASSFTGRFSTKLPWKETLSFRFCDDMSRSKSVQDYFCDALGHGFQPFGKVYQEYCEAMSSLSLKIMELLGLSLGVKRDYFREFFEENDSIMRLNYYPPCIKPDLTLGTGPHCDPTSLTILHQDHVNGLQVFVENQWRSIRPNPKAFVVNIGDTFMALSNDRYKSCLHRAVVNSESERKSLAFFLCPKKDRVVTPPRELLDSITSRRYPDFTWSMFLEFTQKHYRADMNTLQAFSDWLTKPI

SEQ ID NO: 24808 - DNA, 1137 bp, Arabidopsis thaliana
  CDS (1)..(1137)
atggcgatactatgcacaacaacatctccggcagagaaagaacacgaaccaaaacaagatcttgaaaaagaccaaacttctccactaatctttaacccttctcttcttaacctccaatcccaaatcccaaaccaattcatttggccagacgaagagaaaccttccattgacattccagagctcaacgtcccgttcatcgatctctcaagccaagactcgactcttgaagctcctagagtcatcgcagaagcttgcaccaaacacggcttcttcctcgtcgtcaatcatggcgtcagcgagtcactaatagcggatgctcaccgtttgatggaaagtttcttcgacatgcctctcgccggcaaacagaaagctcagagaaaacccggtgagagttgtggctatgcaagtagcttcaccggcagattctccactaagctgccatggaaggagactctctcttttcagttttccaacgataatagtggctcgagaaccgttcaagattacttttccgatacattaggacaagagttcgagcagtttgggaaggtgtatcaagactattgtgaagcaatgagttctctatcactcaagatcatggagcttctgggcttaagtttaggcgtaaaccgagactatttccgaggatttttcgaagagaacgattcgataatgaggctcaatcattatcctccatgccaaacaccagatctcacgttaggtacaggacctcattgtgatccaagttctttgaccatccttcatcaagaccatgtcaatggccttcaagtctttgtcgacaatcaatggcaatccattcgtcccaatcccaaggctttcgttgtcaatattggtgacactttcatggctctatcgaacgggatattcaagagctgtttgcatagagcggttgtgaatagagagagcgcgagaaaatcgatggcgtttttcttgtgtccgaagaaagacaaagtggtgaaaccaccaagtgatattttggagaagatgaaaacaagaaaataccctgacttcacttggtctatgttccttgagttcactcaaaaacattaccgagcagatgtgaatactctcgattccttttctaattgggttattaccaacaacaatcccatctaa

SEQ ID NO: 24809 - protein, 378 aa, Arabidopsis thaliana
MAILCTTTSPAEKEHEPKQDLEKDQTSPLIFNPSLLNLQSQIPNQFIWPDEEKPSIDIPELNVPFIDLSSQDSTLEAPRVIAEACTKHGFFLVVNHGVSESLIADAHRLMESFFDMPLAGKQKAQRKPGESCGYASSFTGRFSTKLPWKETLSFQFSNDNSGSRTVQDYFSDTLGQEFEQFGKVYQDYCEAMSSLSLKIMELLGLSLGVNRDYFRGFFEENDSIMRLNHYPPCQTPDLTLGTGPHCDPSSLTILHQDHVNGLQVFVDNQWQSIRPNPKAFVVNIGDTFMALSNGIFKSCLHRAVVNRESARKSMAFFLCPKKDKVVKPPSDILEKMKTRKYPDFTWSMFLEFTQKHYRADVNTLDSFSNWVITNNNPI

SEQ ID NO: 24810 - DNA, 1071 bp, Arabidopsis thaliana
  CDS (1)..(1071)
atggttgcggttgaaagagttgagagtctagcaaaaagcggaatcatatcgattccaaaagaatatattcgtccaaaagaagagctcgagagcatcaacgatgttttcctagaagagaagaaagaagacggtcctcaagttcccacaatcgatctaaagaacatcgagtcagacgatgaaaagatccgtgagaattgtattgaggagctgaaaaaggcatctttggattggggagtgatgcatttgatcaaccatggaataccagctgatctaatggagcgtgtcaagaaagccggagaagagtttttcagtttgtctgtggaagagaaggagaagtatgcaaacgatcaagccactggaaagattcaaggctatggaagtaaattggctaacaacgcgagtggacaattggaatgggaagattacttctttcatcttgcgtatcctgaagagaagagagatctatcaatttggcctaagacaccaagtgattacatagaagcaacgagtgagtacgcgaagtgtcttcgtttgctagcgactaaagtcttcaaggctctctctgtcggtctaggtttagagcctgaccgtctagagaaagaagttggtggtttagaagagcttcttctacaaatgaagataaattactatccaaaatgtcctcagcctgagctagcactcggtgtggaagctcacaccgatgtaagcgctttaactttcattctacacaacatggttccgggtttgcagcttttctacgagggcaaatgggtcactgcaaaatgtgttcctgattcgattgtgatgcacattggggatactttggagattcttagtaatgggaagtataagagtatacttcatcgtgggttggtgaataaggagaaggttaggatttcttgggctgtgttttgtgaacccccaaaggataagattgttcttaagccgttgccggagatggtgagtgttgagtctccggctaagtttcctccacggacttttgctcaacatattgagcataagttgtttgggaaggaacaagaagaattggtatccgagaaaaatgattaa

SEQ ID NO: 24811 - protein, 356 aa, Arabidopsis thaliana
MVAVERVESLAKSGIISIPKEYIRPKEELESINDVFLEEKKEDGPQVPTIDLKNIESDDEKIRENCIEELKKASLDWGVMHLINHGIPADLMERVKKAGEEFFSLSVEEKEKYANDQATGKIQGYGSKLANNASGQLEWEDYFFHLAYPEEKRDLSIWPKTPSDYIEATSEYAKCLRLLATKVFKALSVGLGLEPDRLEKEVGGLEELLLQMKINYYPKCPQPELALGVEAHTDVSALTFILHNMVPGLQLFYEGKWVTAKCVPDSIVMHIGDTLEILSNGKYKSILHRGLVNKEKVRISWAVFCEPPKDKIVLKPLPEMVSVESPAKFPPRTFAQHIEHKLFGKEQEELVSEKND

SEQ ID NO: 24812 - DNA, 1122 bp, Oryza sativa
  CDS (1)..(1122)
atgccgacgccgtcgcacttgaagaacccgctctgcttcgacttccgggcggcgaggcgggtgccggagacgcacgcgtggccggggctggacgaccacccggtggtggacggcggcggcggcggcggcgaggacgcggtgccggtggtggacgtcggggcgggcgacgcggcggcgcgggtggcgcgggcggcggagcagtggggcgcgttccttctggtcgggcacggcgtgccggcggcgctgctgtcgcgcgtcgaggagcgcgtcgcccgcgtgttctccctgccggcgtcggagaagatgcgcgccgtccgcggccccggcgagccctgcggctacggctcgccgcccatctcctccttcttctccaagctcatgtggtccgagggctacaccttctccccttcctccctccgctccgagctccgccgcctctggcccaagtccggcgacgactacctcctcttctgtgacgtgatggaggagtttcacaaggagatgcggcggctagccgacgagttgctgaggttgttcttgagggcgctggggctcaccggcgaggaggtcgccggagtcgaggcggagaggaggatcggcgagaggatgacggcgacggtgcacctcaactggtacccgaggtgcccggagccgcggcgagcgctggggctcatcgcgcacacggactcgggcttcttcaccttcgtgctccagagcctcgtcccggggctgcagctgttccgtcgagggcccgaccggtgggtggcggtgccggcggtggcgggggccttcgtcgtcaacgtcggcgacctcttccacatcctcaccaacggccgcttccacagcgtctaccaccgcgccgtcgtgaaccgcgaccgcgaccgggtctcgctcggctacttcctcggcccgccgccggacgccgaggtggcgccgctgccggaggccgtgccggccggccggagccccgcctaccgcgctgtcacgtggccggagtacatggccgtccgcaagaaggccttcgccaccggcggctccgccctcaagatggtctccaccgacgccgccgccgccgccgacgaacacgacgacgtcgccgccgccgccgacgtccacgcataa

SEQ ID NO: 24813 - protein, 373 aa, Oryza sativa
MPTPSHLKNPLCFDFRAARRVPETHAWPGLDDHPVVDGGGGGGEDAVPVVDVGAGDAAARVARAAEQWGAFLLVGHGVPAALLSRVEERVARVFSLPASEKMRAVRGPGEPCGYGSPPISSFFSKLMWSEGYTFSPSSLRSELRRLWPKSGDDYLLFCDVMEEFHKEMRRLADELLRLFLRALGLTGEEVAGVEAERRIGERMTATVHLNWYPRCPEPRRALGLIAHTDSGFFTFVLQSLVPGLQLFRRGPDRWVAVPAVAGAFVVNVGDLFHILTNGRFHSVYHRAVVNRDRDRVSLGYFLGPPPDAEVAPLPEAVPAGRSPAYRAVTWPEYMAVRKKAFATGGSALKMVSTDAAAAADEHDDVAAAADVHA

SEQ ID NO: 24814 - DNA, 1101 bp, Oryza sativa
  CDS (1)..(1101)
atggcggactgcatgcaggagtggccggagcccgtggtccgcgtgcaggcgctcgccgatagcggcctggaggccatcccgcgctgctacgtcaaaccaccgtgcgaccgccccgcccccgaggcggacgacgcgtcctccggcgccagcattccggtggtcgacctcggcaacggcggcgacgacgagggcggccagctcgcggaggccgtggcggcggcgtgccggggctggggcttcttccaggtggtaaaccacggggtgcggccggagctgatgcgcgcggcgcgggaggcgtggcacggcttcttccgcctgccgctccaggagaagcagaagtacgccaactcgccgcggacgtacgaggggtacggcagccggcttggcgtcgagaagggcgccatcctcgactggggagactactacttcctcgtcctctcgccggacgccgccaagagcccggccaaatactggccggccaatcccggcatctgcaaggaggtgtccgaggagtacgggagagaggtgatcaagctgtgcgagcggctgatgaggttgctgtcagcgagcctggggctggacgagacgcggttccaggaggcgttcggtggggcggactgcggcgcgggcctgcgcgccaactactacccgcggtgcccgcagccggacctcacgctgggcctctccgcccactccgatcccggcatcctcaccgtcctcctcgccgacgaccacgttcgcggcctccaggtacgccgccgtgacggccactgggtcaccgtgcagcccctccccgacgccttcatcgtcaacgtcggcgaccagattgagatcttgagcaactcgatgtacaagagcgtggagcaccgcgtgatcgtgaacgccgaggaggagcgcatctcgctcgcactcttctacaacccgagaggcgacgtcccggtggcgccggcgccggagctggtgacgccggagcggccgtcgctctactaccgtccgatgaccttcgacgagtacagggtgtacgtcaggaagaatggccccaagggcaaggcacagcttgaggctctcaagggccagtcaatcacccaaaacaacgaataa

SEQ ID NO: 24815 - protein, 366 aa, Oryza sativa
MADCMQEWPEPVVRVQALADSGLEAIPRCYVKPPCDRPAPEADDASSGASIPVVDLGNGGDDEGGQLAEAVAAACRGWGFFQVVNHGVRPELMRAAREAWHGFFRLPLQEKQKYANSPRTYEGYGSRLGVEKGAILDWGDYYFLVLSPDAAKSPAKYWPANPGICKEVSEEYGREVIKLCERLMRLLSASLGLDETRFQEAFGGADCGAGLRANYYPRCPQPDLTLGLSAHSDPGILTVLLADDHVRGLQVRRRDGHWVTVQPLPDAFIVNVGDQIEILSNSMYKSVEHRVIVNAEEERISLALFYNPRGDVPVAPAPELVTPERPSLYYRPMTFDEYRVYVRKNGPKGKAQLEALKGQSITQNNE

SEQ ID NO: 24816 - DNA, 1170 bp, Oryza sativa
  CDS (1)..(1170)
atggtggccgagcaccccacgccaccacagccgcaccaaccaccgcccatggactccaccgccggctctggcattgccgccccggcggcggcggcggtgtgcgacctgaggatggagcccaagatcccggagccattcgtgtggccgaacggcgacgcgaggccggcgtcggcggcggagctggacatgcccgtggtcgacgtgggcgtgctccgcgacggcgacgccgaggggctgcgccgcgccgcggcgcaggtggccgccgcgtgcgccacgcacgggttcttccaggtgtccgagcacggcgtcgacgccgctctggcgcgcgccgcgctcgacggcgccagcgacttcttccgcctcccgctcgccgagaagcgccgcgcgcgccgcgtcccgggcaccgtgtccggctacaccagcgcccacgccgaccgcttcgcctccaagctcccatggaaggagaccctctccttcggcttccacgaccgcgccgccgcccccgtcgtcgccgactacttctccagcaccctcggccccgacttcgcgccaatggggagggtgtaccagaagtactgcgaggagatgaaggagctgtcgctgacgatcatggaactcctggagctgagcctgggcgtggagcgaggctactacagggagttcttcgcggacagcagctcaatcatgcggtgcaactactacccgccatgcccggagccggagcggacgctcggcacgggcccgcactgcgaccccaccgccctcaccatcctcctccaggacgacgtcggcggcctcgaggtcctcgtcgacggcgaatggcgccccgtcagccccgtccccggcgccatggtcatcaacatcggcgacaccttcatggcgctgtcgaacgggaggtataagagctgcctgcacagggcggtggtgaaccagcggcgggagcggcggtcgctggcgttcttcctgtgcccgcgggaggacagggtggtgcggccgccgccgagcgccgccacgccgcagcactacccggacttcacctgggccgacctcatgcgcttcacgcagcgccactaccgcgccgacacccgcacgctcgacgccttcacgcgctggctcgcgccgccggccgccgacgccgccgcgacggcgcaggtcgaggcggccagctga

SEQ ID NO: 24817 - protein, 389 aa, Oryza sativa
MVAEHPTPPQPHQPPPMDSTAGSGIAAPAAAAVCDLRMEPKIPEPFVWPNGDARPASAAELDMPVVDVGVLRDGDAEGLRRAAAQVAAACATHGFFQVSEHGVDAALARAALDGASDFFRLPLAEKRRARRVPGTVSGYTSAHADRFASKLPWKETLSFGFHDRAAAPVVADYFSSTLGPDFAPMGRVYQKYCEEMKELSLTIMELLELSLGVERGYYREFFADSSSIMRCNYYPPCPEPERTLGTGPHCDPTALTILLQDDVGGLEVLVDGEWRPVSPVPGAMVINIGDTFMALSNGRYKSCLHRAVVNQRRERRSLAFFLCPREDRVVRPPPSAATPQHYPDFTWADLMRFTQRHYRADTRTLDAFTRWLAPPAADAAATAQVEAAS

SEQ ID NO: 24818 - DNA, 1119 bp, Oryza sativa
  CDS (1)..(1119)
atgagcatggtggtgcagcaggagcaggaggtggtgttcgacgcggcggtgctgagcgggcagacggagatcccgtcgcagttcatatggccggcggaggagagccccgggtcggtggcggtggaggagctggaggtggcgctgatcgacgtgggggcgggggcggagaggtcgtcggtggtccggcaggtgggggaggcgtgcgagaggcacggcttcttcctggtggttaaccacggcatcgaggcggcgctgctggaggaggcgcaccggtgcatggacgccttcttcacgctgccgctgggggagaagcagcgggcgcagcggcgcgcgggggagagctgcggctacgccagcagcttcacggggcgcttcgcgtccaagctgccgtggaaggagacgctgtcgttccggtactcatcggctggagatgaagagggcgaggagggcgtgggtgagtacctggtgcggaagctcggggcggagcacgggcggcggctgggcgaggtgtactcgcgctactgccacgagatgagccgcctgtcgctggagctgatggaggtgctcggggagagcctgggcatcgtcggagaccggcgccactacttccggcgattcttccagcgcaacgactccatcatgcgcctcaactactacccggcgtgccagaggccactcgacacgctgggcaccggtccgcactgcgaccccacctcgctcaccatcctccaccaggaccacgtcggcggcctggaggtgtgggcggaggggcggtggcgcgccatccgccctcgccccggggcgctcgtcgtcaacgtcggcgacaccttcatggcgctctccaacgccaggtaccgcagctgcctgcaccgggcggtcgtcaacagcacggcgcctcgccgctcgctggccttcttcctctgcccggagatggacacggtggtgcgcccgccggaggagctggtcgacgaccaccacccgagggtgtacccggacttcacgtggcgggcgctgctggacttcacgcagcgccactacagggccgacatgcgcacgcttcaggccttctccgactggcttaatcatcatcgtcacctgcaaccaacaatatactcctag

SEQ ID NO: 24819 - protein, 372 aa, Oryza sativa
MSMVVQQEQEVVFDAAVLSGQTEIPSQFIWPAEESPGSVAVEELEVALIDVGAGAERSSVVRQVGEACERHGFFLVVNHGIEAALLEEAHRCMDAFFTLPLGEKQRAQRRAGESCGYASSFTGRFASKLPWKETLSFRYSSAGDEEGEEGVGEYLVRKLGAEHGRRLGEVYSRYCHEMSRLSLELMEVLGESLGIVGDRRHYFRRFFQRNDSIMRLNYYPACQRPLDTLGTGPHCDPTSLTILHQDHVGGLEVWAEGRWRAIRPRPGALVVNVGDTFMALSNARYRSCLHRAVVNSTAPRRSLAFFLCPEMDTVVRPPEELVDDHHPRVYPDFTWRALLDFTQRHYRADMRTLQAFSDWLNHHRHLQPTIYS

SEQ ID NO: 24820 - DNA, 1227 bp, Oryza sativa
  CDS (1)..(1227)
atggtgtacatctcgaacgcgcaggatgccagtaagctgatcgtgacggcgaagggaggaggaggagaagccgacgacgccgccgcctcctccgctgccgtcgtccttgacctctggcggcagccggccaagatcccggcgccgttcgtctggccgcgcgccgacgtcgcgctgccgccgtcgtcgccgccgacgggggagctggacgtgcccgtggtcgacctcgccgcggcgctacgcgacgccgccgggatgcgccgcgccgtcgcgcaggtggccgccgcgtgcgcgagccacgggttcttccaggtgagcgggcacggcgtgcccccgtcgctggcgcgcgccgcgctcgacggcgccgcgggcttcttccgcctcccgcccgccgcgaagcagcgcgcccgccgcgccccaggcacggtcaccggctacaccgccgcccacgccgaccgcttcgtcgacaacctcccctggaaggagacgctctccttcggccaccgccacgccaacgccgccggcaacaactcctccaccgtcgccgattacttctccaccctaggcgacgacttcaaacacctaggggaggtgtaccaggagtactgcgaggcgatggaggaggtgacgaaggcgataatggcggtgctaggggagagcctgggggtggggggcggatactacagggagttcttcgaggacagcagctcgatcatgcggtgcaactactacccgccgtgcccggagccggagaggacgctggggacggggccgcactgcgacccgtcggcgctcaccgtgctcctccaggacggcgacgtcgacggcctccaggtgctcgtcgccggcgcgtggcgccccgtgcggccgctgcccggcgcgttcgtcgtcaacatcggcgacaccttcatggcgctgacgaacggccggtacaagagctgcctgcaccgggcggtggtgcaccgggagcaggagcggcggtcgctggccttcttcctctgcccgcgcgaggaccgcgtggtgcggccgcccgccggcgccggcgccggcgagcggcggctctacccggacttcacctgggccgacttcatgcgcttcacgcagcgccactaccgcgccgacacccgcacgctcgacgccttcgcccgctggctccgcccgccggcctgctccggcgccgcgccggtcgtcggcccaccgacgacggcgacccaggcggccaccgtctag

SEQ ID NO: 24821 - protein, 408 aa, Oryza sativa
MVYISNAQDASKLIVTAKGGGGEADDAAASSAAVVLDLWRQPAKIPAPFVWPRADVALPPSSPPTGELDVPVVDLAAALRDAAGMRRAVAQVAAACASHGFFQVSGHGVPPSLARAALDGAAGFFRLPPAAKQRARRAPGTVTGYTAAHADRFVDNLPWKETLSFGHRHANAAGNNSSTVADYFSTLGDDFKHLGEVYQEYCEAMEEVTKAIMAVLGESLGVGGGYYREFFEDSSSIMRCNYYPPCPEPERTLGTGPHCDPSALTVLLQDGDVDGLQVLVAGAWRPVRPLPGAFVVNIGDTFMALTNGRYKSCLHRAVVHREQERRSLAFFLCPREDRVVRPPAGAGAGERRLYPDFTWADFMRFTQRHYRADTRTLDAFARWLRPPACSGAAPVVGPPTTATQAATV

SEQ ID NO: 24822 - DNA, 1065 bp, Oryza sativa
  CDS (1)..(1065)
atggctgacgagccatggaggctgccaaacatagtgcaagaactggccgccggcgtgcaggagccaccgagccggtacctgcaagacctcgccggcggtgaccagctcgccggcgccgagataccggagcccatcccgaccatcgatctcggccggctgtcaggatcggacggtgccgacgaggctgccaagctgcggtcggctctgcagaactggggcctcttcctggtttctaaccatggcgttgagacctcactgatcgatgctgtgatcgaggctgcgagggaattttttcggcagccagttgaagagaagaagaaactgagcaacctgattgatggcaagcgttttcagatagaagggtatggaaatgatcctgtgcaaaccaaagatcagatcctggattggtctgatcggctgcatctcaaggttgagccagagtgtgacagaaatctagccttttggcccacacatcccaaatcttttagggatattctacatgagtacacactgaagatcaagacggtcaaaaacgatatcctcctcgcattggccaagctcttggagcttgatgaggattgcctcctcaaccagttcagcgacagggccatcactactgccagattcaactactactctccttgtccaagacctgatcttgtgttaggcctgaagcctcactctgacctctgtgctctcaccgttcttctcactgacaaagaagtcggtggcctgcaagttcttagagatggaacatggtacagtgttccagctgtgcgagattactctcttctgattaacattggtgttacactggagataatgaccaatgggaccttcagggctccattgcatagggtggtgacaaatgcagagagggagagaatgtcggtggccatgttctacgctgtggatggcgagaaggagatagagccggtggctgagctgctggggctgaagcaacaatcagcacggtacaggggaatcaagggcaaggacttgttgattggacactatgaacatttctctcgtggtggtagagttgtcgattcattgaagatctaa

SEQ ID NO: 24823 - protein, 354 aa, Oryza sativa
MADEPWRLPNIVQELAAGVQEPPSRYLQDLAGGDQLAGAEIPEPIPTIDLGRLSGSDGADEAAKLRSALQNWGLFLVSNHGVETSLIDAVIEAAREFFRQPVEEKKKLSNLIDGKRFQIEGYGNDPVQTKDQILDWSDRLHLKVEPECDRNLAFWPTHPKSFRDILHEYTLKIKTVKNDILLALAKLLELDEDCLLNQFSDRAITTARFNYYSPCPRPDLVLGLKPHSDLCALTVLLTDKEVGGLQVLRDGTWYSVPAVRDYSLLINIGVTLEIMTNGTFRAPLHRVVTNAERERMSVAMFYAVDGEKEIEPVAELLGLKQQSARYRGIKGKDLLIGHYEHFSRGGRVVDSLKI

SEQ ID NO: 24824 - DNA, 1104 bp, Oryza sativa
  CDS (1)..(1104)
atggcagccgtggtgttcgacgcggcgatcctgagcaagcaggaggcgatcccggcgcagttcgtctggccggccgacgaggcgccggcggcggacgacggcgtggtggaggagatcgccatccccgtcgtcgacctggccgcgttcctcgccagcggcggcattgggcgcgacgtggcggaggcgtgcgagcggcacgggttcttccaggtggtgaaccacggcgtcgacccggcgctgctcgccgaggcgtaccgctgctgtgacgcgttctacgcgcggccgctcgccgagaagcagcgcgcgcggcgccgccccggcgagaaccacggctacgcgagcagcttcacggggcggttcgactgcaagctgccgtggaaggagaccatgtcgttcaactgctccgccgcgccggggaacgcgcgcatggtcgccgactatttcgtcgacgccctcggcgaggaataccgccacatgggggaggtgtaccaggagtactgcgacgtgatgacgcggctggcgctggacgtgacggaggtgctcgcggtggcgctcgggctcggccgcggcgagctccgcggcttcttcgccgacggcgacccggtgatgcggctgaaccactacccgccgtgccggcagccgcacctgacgctgggcacgggcccgcaccgcgacccgacgtcgctgacgctgctccaccaggacgacgtcggcggcctgcaggtgctccccgacgacgccgcggcggcggcgggcgggtggcgcgccgtgcgcccgcgcgccgacgcgttcgtcgtcaacatcggcgacacgttcgcggcgctcaccaacgggcgccacgccagctgcctccaccgcgccgtggtgaacggccgcgtcgcgcgcaggtcgctcaccttcttcctcaacccgcgcctcgaccgcgtcgtgtcgccgccgccggcgctcgtcgacgccgcgcacccgcgcgcgttcccggacttcacgtggcgcgagttcctcgagttcacgcagaggcactaccggtcggacaccaacaccatggacgccttcgtcgcctggatcaagcaaaggaatggctatgaaagcctcgacaagtactag

SEQ ID NO: 24825 - protein, 367 aa, Oryza sativa
MAAVVFDAAILSKQEAIPAQFVWPADEAPAADDGVVEEIAIPVVDLAAFLASGGIGRDVAEACERHGFFQVVNHGVDPALLAEAYRCCDAFYARPLAEKQRARRRPGENHGYASSFTGRFDCKLPWKETMSFNCSAAPGNARMVADYFVDALGEEYRHMGEVYQEYCDVMTRLALDVTEVLAVALGLGRGELRGFFADGDPVMRLNHYPPCRQPHLTLGTGPHRDPTSLTLLHQDDVGGLQVLPDDAAAAAGGWRAVRPRADAFVVNIGDTFAALTNGRHASCLHRAVVNGRVARRSLTFFLNPRLDRVVSPPPALVDAAHPRAFPDFTWREFLEFTQRHYRSDTNTMDAFVAWIKQRNGYESLDKY

SEQ ID NO: 24826 - DNA, 1029 bp, Oryza sativa
  CDS (1)..(1029)
atggcggcggaggcggagcagcagcaccagctgctgtcgacggccgtgcacgacacgatgccggggaagtacgtccgcccggagtcgcagcgcccgcgcctcgacctcgtcgtctccgacgcccgcatccccgtcgtcgacctcgcctcccccgaccgcgccgccgtcgtctccgccgtcggcgacgcctgccgcacccacggcttcttccaggtggtgaaccatggcatcgatgcggcgctgatcgcgtcggtcatggaggtgggccgcgagttcttccggctgccggcggaggagaaggcgaagctctactccgacgatccggccaagaagatacggctgtcgacgagcttcaacgtgcgcaaggagacggtgcacaactggcgcgattacctccgcctccactgctatcctctccaccagttcgtccccgactggccctccaatccgccctccttcaaggagatcatcggcacgtactgcacagaggtaagagagctagggttcaggctatacgaggcgatatcggagagccttggactggagggaggatacatgagggagacgttgggggagcaggagcagcacatggcggtgaactactacccacagtgcccggagccggagctcacctatggcctccccgcgcacaccgaccccaacgccctcaccatcctcctcatggacgaccaggtcgccggcctgcaggtcctcaacgacggcaagtggattgccgtcaacccgcaacccggtgctctcgtcatcaacattggcgaccaacttcaggcgctgagcaacgggaagtacaggagcgtgtggcaccgggcggtggtgaactccgacagggagaggatgtcggtggcgtcgttcctgtgcccgtgcaacagcgtggagctcggcccggccaagaagctcatcaccgacgactcgccggcggtgtaccggaactacacctacgacgagtactacaagaagttctggagcaggaaccttgaccaggagcactgcctcgagctgttcaggacttag

SEQ ID NO: 24827 - protein, 342 aa, Oryza sativa
MAAEAEQQHQLLSTAVHDTMPGKYVRPESQRPRLDLVVSDARIPVVDLASPDRAAVVSAVGDACRTHGFFQVVNHGIDAALIASVMEVGREFFRLPAEEKAKLYSDDPAKKIRLSTSFNVRKETVHNWRDYLRLHCYPLHQFVPDWPSNPPSFKEIIGTYCTEVRELGFRLYEAISESLGLEGGYMRETLGEQEQHMAVNYYPQCPEPELTYGLPAHTDPNALTILLMDDQVAGLQVLNDGKWIAVNPQPGALVINIGDQLQALSNGKYRSVWHRAVVNSDRERMSVASFLCPCNSVELGPAKKLITDDSPAVYRNYTYDEYYKKFWSRNLDQEHCLELFRT

SEQ ID NO: 24828 - DNA, 1053 bp, Oryza sativa
  CDS (1)..(1053)
atgtctctacaggtgccaaatgtgcaggaactcgcactgacttgcaaccgacctgaccagcagatacctgacaggtacatcaggccggaggctggcaccgaagaggtcatctgcggccaaggcatcaacacggcaatcccggtcatcgatctcgccaagctgctcaacccgcagtcatcccaagaggagtgtgccaagctgcgatctgcatgtcagcactggggtttcttccagctcgtcaaccatggggtgcctgacgatgtgatcagcgacgtgaggagagacttaactgagttcttcaagctaccacttgaagccaaggaggcgtacgctaaaccaccagacaagtacgaaggctatggccagcacttcgtcgtttcagagaagcagaagctggactggggagacctgctacacctccggcttcgcccaaccgagtccagggatttgaggttctggcctgcccatccttcatctttcaggaattccatggagaggtactccttggagacggcaaaagtagcacgctgcctgttggagttcttggccatggacatgggcgttgatccggagtctctcctggaggtattcagaggccagccccagaacatgagggtgaactactacccgccgtgcaggcaaaccggcaaggtgctcggcctgtcgccgcactgcgacgcgaccagcctgacgctgctgctccatgtgaacgacatgcagggcctccagatcaggaaggacggcaagtggctcaccatcgaagccctcgacggcgcgttcgtcgtcaacgtcggcgacatgcttgagattctgagcaatgggaggtacaggagcgttgagcacagggccgtggtgcacccggagaaggagcgcatctcggcggcggtgttccaccaggcgtgccgggacgcgacggtcgggcctctgccggagctcgtgacgaaggacggtggcaggccggtgtacaagtcgatggcctacgaggatttcatgaagcgcttcttctcggccaaacttgacggaagggctaacgtcgagggcatgaagatttag

SEQ ID NO: 24829 - protein, 350 aa, Oryza sativa
MSLQVPNVQELALTCNRPDQQIPDRYIRPEAGTEEVICGQGINTAIPVIDLAKLLNPQSSQEECAKLRSACQHWGFFQLVNHGVPDDVISDVRRDLTEFFKLPLEAKEAYAKPPDKYEGYGQHFVVSEKQKLDWGDLLHLRLRPTESRDLRFWPAHPSSFRNSMERYSLETAKVARCLLEFLAMDMGVDPESLLEVFRGQPQNMRVNYYPPCRQTGKVLGLSPHCDATSLTLLLHVNDMQGLQIRKDGKWLTIEALDGAFVVNVGDMLEILSNGRYRSVEHRAVVHPEKERISAAVFHQACRDATVGPLPELVTKDGGRPVYKSMAYEDFMKRFFSAKLDGRANVEGMKI

SEQ ID NO: 24830 - DNA, 1287 bp, Oryza sativa
  CDS (1)..(1287)
atggccggcgaccactcttctccatttccgccgccgtcgtcgactcgtcgtcgccggccgcaagagagagatgaagagaggggagaaggagaaagaggaagcagaagaggagggggaagacacctacacggctacacgactacacctactgaagaagaacaggagcgagaaaaatcaccaatggctcatgcaagaagcacaggatctctgccggtggcaaatgttcaggcactcgcagagacctgcaacgatccagatcagcagatacctgagaggtacatcagagcagacgccaacgccgacgaggtcatcagcggcgacgactgcacggccgcaattcctaccgtcgatctcagcaagttgctcgatccattgtcgtcagacgaggagactgaaaagctggggtctgcctgtcagcaatggggattctttcagctgatcaaccatggcgtgtcagaggatgtgatccgcgacgcgaggaaagacatagccgagttcttcaggctgccaatggagaccaagaaggcgtactcgcagctgcccagtggcatcgagggatatggccaggcgttcgtggtgtcgcacgagcagaagctggactgggctgacatgttctacctcgttctccgccccggcgagtccaggaacatggccctctggcctgctcatcctccatccttcaggaattcgatagatcggtactcgtcggagacggcgagggtggcgagatgcctgttggagttcatggcgaaggacatgggcgtgaggccggggtcgctgctggagaggttccaggaccagccgcagggcatcaggatgaacgactacccgccgtgccgggaggccggcaaggtggtcggcctgtcgccgcacaccgacgccgcctgcctgacgctgctcctgcaggtgaacgacgtgccgggcctgcagatcaggagccccggcggcaggtggctcgccgtcggcgcccctccggacgacggcgcgttcatcgtcaacgtcggcgacatactcgagatcatgagcaacggcaagtaccggagcgtggagcacagggcggtggtgcggccggacagggagcgcgtgtcggcggcggtgttccaccagccgtgccaggacgcggtggtcgggcctctgccggagctggtcggggaaggcggcggcgataacgcgcggtacacgtcgatgggctacctggatttcatgaagcgttactactcggcaaagctcgacggaaggaatcacctcgacggcttgaggattaaactgtcatcttcgaagggttag

SEQ ID NO: 24831 - protein, 428 aa, Oryza sativa
MAGDHSSPFPPPSSTRRRRPQERDEERGEGERGSRRGGGRHLHGYTTTPTEEEQEREKSPMAHARSTGSLPVANVQALAETCNDPDQQIPERYIRADANADEVISGDDCTAAIPTVDLSKLLDPLSSDEETEKLGSACQQWGFFQLINHGVSEDVIRDARKDIAEFFRLPMETKKAYSQLPSGIEGYGQAFVVSHEQKLDWADMFYLVLRPGESRNMALWPAHPPSFRNSIDRYSSETARVARCLLEFMAKDMGVRPGSLLERFQDQPQGIRMNDYPPCREAGKVVGLSPHTDAACLTLLLQVNDVPGLQIRSPGGRWLAVGAPPDDGAFIVNVGDILEIMSNGKYRSVEHRAVVRPDRERVSAAVFHQPCQDAVVGPLPELVGEGGGDNARYTSMGYLDFMKRYYSAKLDGRNHLDGLRIKLSSSKG

SEQ ID NO: 24832 - DNA, 1074 bp, Oryza sativa
  CDS (1)..(1074)
atggcgggagcaagatccgttggttctctcccagtgcctaatgtgcaggcgcttgcagaaatttgcaatgatccagatgaacacatacctgaaaggtacatcagaccagaggctagttctgaggaggtcatcaacaactaccaaggtgacatggcgattccgatcatcgatctcaagaaattgctttgtccgcaatcatcagaagaggagtgtgtgaagctgagatctgcctgccagtattgggggttctttctgctcattaaccatggagtgccagatgaagtgattgcaaacctgaagagagacattgttgatttctttagccagccactggacaccaagaaggagtacacacagctaccgaatagcctagaaggctatggacagagctttgttttctctgaggaccagaaacttgactgggcagacatgctgtatcttcatgtccatcctagcgattcaagggacctaaggttctggcccacttctccagcatctttcaggcaatccattgatgcatactcatcagagactaaaagcctggcactctgcttgtttgagttcatggctaaggctgtgggcgctaagccagagtcacttttagatttatttgaagagcagcctcgaggcttaaggatggcctattacccaccatgccggcaagctgacaaggtgatgggcctttcgccacactctgatgcgggtggcctgacactgctgctcgagattaacaatgtgcagggcctgcagatcaagaaagatggcaagtggttctccatagatgctccaaatggtgcacttattgctaacattggcgacacacttgagatcctgagtaacggaaagttcagaagtgttgaacacagggccgtgataaacccaaataaagagcgaatttcagcagcactcttccactatccaagtgaaaatatggtgatcagccctctgccggagtttgtgaaagatggtaaagtgaagtacagatcaataagttaccttgatttcatgaaacaaatcttcacacaacagcttgatggaaaaaaccgagtggaggtattaaagctggaccagtag

SEQ ID NO: 24833 - protein, 357 aa, Oryza sativa
MAGARSVGSLPVPNVQALAEICNDPDEHIPERYIRPEASSEEVINNYQGDMAIPIIDLKKLLCPQSSEEECVKLRSACQYWGFFLLINHGVPDEVIANLKRDIVDFFSQPLDTKKEYTQLPNSLEGYGQSFVFSEDQKLDWADMLYLHVHPSDSRDLRFWPTSPASFRQSIDAYSSETKSLALCLFEFMAKAVGAKPESLLDLFEEQPRGLRMAYYPPCRQADKVMGLSPHSDAGGLTLLLEINNVQGLQIKKDGKWFSIDAPNGALIANIGDTLEILSNGKFRSVEHRAVINPNKERISAALFHYPSENMVISPLPEFVKDGKVKYRSISYLDFMKQIFTQQLDGKNRVEVLKLDQ

SEQ ID NO: 24834 - DNA, 1077 bp, Brassica napus
  CDS (1)..(1077)
atggaagccaatggagcaagtaagcatcatagctctattatagtcccatctgttcaagagatggtgaaggagaagctgatcaagaaggttcctcagaggtatgtacggtctgatctagacaaagctgagattgcctgtgactctggtctaaaagctgagatcccagtcattgacatgagccgcttgtgttcttcaaccaccatggattctgagattgaaaaactcgacttggcttgcaaagaatggggatttttccagcttgtaaaccatggagtggactcaggcttcctggacaaattcaaatctgagattcaaaatttcttcaaccttcccatggaagagaagaagaagctgtggcaaaagcctggagacatggaagggtttggacaggcttttgtggtttcagaagagcagaaactcgattgggcagacatgttccatctcacagtgcaacctgctaggttacgcaagcctcacgtgttccccaagatacctcttccccttagagatacactagagacgtattcggctgaactgaaaagcatagctaagatcttgtttgctaaaatggcggtggcattgaagatcaaccctgaggagatggagaagttgtttgatgatgatctaggacagataatgaggatgaattactaccctccttgtcctgagcccgaccaggttattggtctgactccacattcagattctacaggagtcaccatccttttgcaggttaatgaagtggaaggtctccaaatcaagaagaatggcaagtgggtctcggtcaaacctctcccaaatgctttcgttgtcaatgttggagacatgatagagattgttacaaatgggacgtaccgaagtatagagcatcgtggggtagtgaactcagagaaggagaggatttctataggggcgtttcacaatataggaactggtaaagaagttggtccgctgagaagtctcgtggagaggcataaggcttcatttttcagaagcatgaccactgatgagtacttcaaaggcttgttctcacgtgagctcggtggaaaagcttaccttgatgttatgagaatctaa

SEQ ID NO: 24835 - protein, 358 aa, Brassica napus
MEANGASKHHSSIIVPSVQEMVKEKLIKKVPQRYVRSDLDKAEIACDSGLKAEIPVIDMSRLCSSTTMDSEIEKLDLACKEWGFFQLVNHGVDSGFLDKFKSEIQNFFNLPMEEKKKLWQKPGDMEGFGQAFVVSEEQKLDWADMFHLTVQPARLRKPHVFPKIPLPLRDTLETYSAELKSIAKILFAKMAVALKINPEEMEKLFDDDLGQIMRMNYYPPCPEPDQVIGLTPHSDSTGVTILLQVNEVEGLQIKKNGKWVSVKPLPNAFVVNVGDMIEIVTNGTYRSIEHRGVVNSEKERISIGAFHNIGTGKEVGPLRSLVERHKASFFRSMTTDEYFKGLFSRELGGKAYLDVMRI

SEQ ID NO: 24836 - DNA, 927 bp, Brassica napus
  CDS (1)..(927)
atggcgattcctgtgattgatttctccaagatcaatggcgaagaaagggagaagacactctctgaaatcgctaaagcttgcgaagaatggggattttttcagctggtgaaccatgggattccattggagcttcttaacaaggtgaagaagctggcctcagactgctacaaaacggagagagaagaagcgttcaaaacctcaactcccgtgaagctactcaacgaactgcttgagaaaaactctggagagaagctcgagaacgttgactgggaagatgtcttcactctcttagaccacaaccaaaacgaatggccatcaaacacttcaggcctcaaagagacgatggtggaatacagagaagaagtgaggaagctagcgagcaagatgatggaagtgatggatgagaacttgggtttgcctaaaggttacataaagaaagcttttaacgaagggatggaagacggagaagagacggctttctttggaaccaaagttagccattacccaccttgtcctcgtcctgagcttgtcaatggtctcagggctcataccgatgcaggaggtgtggttttgctgttccaagacgatgagtacgatggccttcaagtgttgaaagatggcgagtggatcgatgttcagccgatgcctaatgctattgttatcaacactggtgatcagattgaggttcttagcaacggaaggtacaagagtgcatggcacagggtgttggcgagggaggaagggaacaggaggtccattgcttccttctacaatccgtcgtacaaggcggccattgggccagcggcggcggaggaaggaagtgagaagaagtatccaaagtttgtgtttggagattatatggatgtctatgcaaaccagaagttcatgcctaaggagcctcgttttcttgctgtgaagactctctaa

SEQ ID NO: 24837 - protein, 308 aa, Brassica napus
MAIPVIDFSKINGEEREKTLSEIAKACEEWGFFQLVNHGIPLELLNKVKKLASDCYKTEREEAFKTSTPVKLLNELLEKNSGEKLENVDWEDVFTLLDHNQNEWPSNTSGLKETMVEYREEVRKLASKMMEVMDENLGLPKGYIKKAFNEGMEDGEETAFFGTKVSHYPPCPRPELVNGLRAHTDAGGVVLLFQDDEYDGLQVLKDGEWIDVQPMPNAIVINTGDQIEVLSNGRYKSAWHRVLAREEGNRRSIASFYNPSYKAAIGPAAAEEGSEKKYPKFVFGDYMDVYANQKFMPKEPRFLAVKTL

SEQ ID NO: 24838 - DNA, 1026 bp, Brassica napus
  CDS (1)..(1026)
atggtggttttatcacagccagtcgctttagataatcacatatcagtaatcccaacatacaagccagttccggttctaacatcccattcaatccccgtcgtggacctaacccacccagaagccaaaacccttatcgtgaaagcttgtgaggagtttggtttcttcaaggttgtcaaccacggagtgtgccctgacctcatgacccggttagagcaggaagctgtcggcttcttcgccttgcctcagtctctcaaaaaccaggccggtccacctgaaccgtacggctatggtagtaaacggattggaccaaacggtgacgtggggtggattgagtatatcctcctcaatgctaaccctcagctctcgtcagccaaaacctctgccgttttcagtcaaagcccactaattttccgtgaggcagtggaggaatacatgaaagaggtgaaggaagtgtcgtgcaaagtgttggagatgataactgaaggattggggatagagccaagggacagtctgagtaagatggtgagagatgagaagagtgactcgtgcctgagactgaaccactatccgacggcggaggaagaggcggagaagatggtgaagttaggttttggggaacacacagacccacagatcatctcagtgctaaggtccaataacacatcgggtcttcaaatctgtatgaaagatggaagctgggtcgctgtccctcctgatcactcatctttcttcattaatgttggagatgctcttcaggttatgacaaacggaaggttcaagagtgtaaaacacaaagtattagctgatacaaggaaatcgagagtctcgatgatatattttggaggaccaacactgagccagaagatcacgccattgccatctcttgtacctaagcaagaggattggctttacaaagaattcacttggtctcaatacaaatcttctgcttacaagtctaagcttggtgattataggcttggtctctttgagagacaacctcttctcactcataggtctaatgtatga

SEQ ID NO: 24839 - protein, 341 aa, Brassica napus
MVVLSQPVALDNHISVIPTYKPVPVLTSHSIPVVDLTHPEAKTLIVKACEEFGFFKVVNHGVCPDLMTRLEQEAVGFFALPQSLKNQAGPPEPYGYGSKRIGPNGDVGWIEYILLNANPQLSSAKTSAVFSQSPLIFREAVEEYMKEVKEVSCKVLEMITEGLGIEPRDSLSKMVRDEKSDSCLRLNHYPTAEEEAEKMVKLGFGEHTDPQIISVLRSNNTSGLQICMKDGSWVAVPPDHSSFFINVGDALQVMTNGRFKSVKHKVLADTRKSRVSMIYFGGPTLSQKITPLPSLVPKQEDWLYKEFTWSQYKSSAYKSKLGDYRLGLFERQPLLTHRSNV

SEQ ID NO: 24840 - DNA, 1062 bp, Brassica napus
  CDS (1)..(1062)
atgggagtactcgacgaagcttttatccaagctccagaacacagacccaaaactcatctcaaacactccgatgaccacattctctccaaggagatcccgaccatcgacctctcctccctccaagacccaaactgcgacaagacagcgctagcgacagagattgcagaagcatgcatgagatggggctttttccaggtgatcaaccatggtttgtcgttggacttaatgcgtagggtggagaagacggtggccgagtttttcagtctaacgttggaggagaagagaagagtgaaaagagatgaagtgaaccctatgggttatcacgacggagaacataccaaaaacgttagagactggaaagagattttcgatttctttttgcaggactcgacgacggttccggcgactacagagccggaagataccgagctcaggaagctgactaacccgtggcctcaaaacccttccgacttcagagaggtgtgccaagaatatgcaagagaagttgagaagttagctttcaagcttttggaacttatctccattagcttgggtctacccggtgatcggttaacaggttacttcaaggaccaaacaagctttttgcggtttaaccattaccctccttgcccgaacccggagctagcattaggcgttggacgccacgcagacgcaggagttataaccgtcttggcacaagatagtgtgggtgggttacaagtgagccgtagatcagatggacaatggttctctgtcaaaccgaaccctgatgctttcatcattaacattggcaactgcatgcaggtatggacaaatgacaagtattggagtgcagaacatagagtggtagtgaattcaagcaaagagagattctcaatgccattcttccttttcccatcccatgataccaacattgagccattgaaagagcttataagcgaagacagcccgccttgttacaaaaagtacaattggggcaagttctttgctgcgagaaacagaagtgattacaagaagctccaaactgagagcatccagattgatcgcttcaaggccgcttaa

SEQ ID NO: 24841 - protein, 353 aa, Brassica napus
MGVLDEAFIQAPEHRPKTHLKHSDDHILSKEIPTIDLSSLQDPNCDKTALATEIAEACMRWGFFQVINHGLSLDLMRRVEKTVAEFFSLTLEEKRRVKRDEVNPMGYHDGEHTKNVRDWKEIFDFFLQDSTTVPATTEPEDTELRKLTNPWPQNPSDFREVCQEYAREVEKLAFKLLELISISLGLPGDRLTGYFKDQTSFLRFNHYPPCPNPELALGVGRHADAGVITVLAQDSVGGLQVSRRSDGQWFSVKPNPDAFIINIGNCMQVWTNDKYWSAEHRVVVNSSKERFSMPFFLFPSHDTNIEPLKELISEDSPPCYKKYNWGKFFAARNRSDYKKLQTESIQIDRFKAA

SEQ ID NO: 24842 - DNA, 963 bp, Brassica napus
  CDS (1)..(963)
atggagcagaccattaagtttcctgttgtaaacttgtccaagctcaatggtgaagaaagagaccaaaccatggctttaatcaacgatgcttgcgaaaattggggtttctttgagatagtgaaccatgggttaccacatgatttgatggacaacgttgagaagatgacaaaggagcattacaagaaatcaatggaacagaagtttaacgacatgctcaggtccaaaggtttggaaaagcttgagacagaagttgaggacgtcgattgggaaagcactttctaccttcgtcaccttcctcaatccaatctctacgacattcctgatatgtctgatgaatatcggacggccatgaaagattttgggaagagattggagaatcttgcagaggatttgttggatctactgtgtgagaatctagggttagagaaagggtatctgaagaaagtgtttcatggaacaaaaggtccaacctttgggactaaggtgagcaattatccaccttgtcctggaccagaaatgatcaaaggtctcagggcccacactgatgcaggaggcatcatcttgttgtttcaagacgacaaagtcagtggcctccagcttctcaaagatggtgattggatcgatgttcctccactcaaccactccattgtcattaatcttggtgaccaacttgaggtgataaccaacggcaagtacaagagtgtgatgcaccgtgtggtgactcaaaaagaagggaacagaatgtctattgcatcgttctacaatcccggaagcgatgcggagatctctccagcttcatcactcgccagcaaggaaaccgaatacccaagctttgtgtttgatgactacatgaagctttatgctggggtcaagtttcagcctaaagagccacgctttgaggcgatgaagaatgctactgcagttacagaactgaacccagccgcatccgtagagactttctaa

SEQ ID NO: 24843 - protein, 320 aa, Brassica napus
MEQTIKFPVVNLSKLNGEERDQTMALINDACENWGFFEIVNHGLPHDLMDNVEKMTKEHYKKSMEQKFNDMLRSKGLEKLETEVEDVDWESTFYLRHLPQSNLYDIPDMSDEYRTAMKDFGKRLENLAEDLLDLLCENLGLEKGYLKKVFHGTKGPTFGTKVSNYPPCPGPEMIKGLRAHTDAGGIILLFQDDKVSGLQLLKDGDWIDVPPLNHSIVINLGDQLEVITNGKYKSVMHRVVTQKEGNRMSIASFYNPGSDAEISPASSLASKETEYPSFVFDDYMKLYAGVKFQPKEPRFEAMKNATAVTELNPAASVETF

SEQ ID NO: 24844 - DNA, 957 bp, Glycine max
  CDS (1)..(957)
atggagaagtttccagttgttgacatggggaaccttaataatgaagagagatcagcaaccatggagataatcaaagatgcctgtgagaactggggtttctttgagttggtgaaccatgggatatccatagagttgatggacaccgtggagaggatgacaaaagagcactacaaaaagtgtatggagcaaaggttcaaagaaatggtagcaagcaaaggtttggagtctgctcaatctgaaatcaatgatttggattgggaaagcactttctttttgcgccaccttcctgcctctaacatctcagagatccctgatcttgatgaagattacaggaaggtaatgaaggattttgctgtggaactggaggaactggcagagctagttcttgacttgctgtgtgagaatcttgggctagagaaagggtatctgaagaaggtgttctatggatcaaagggcccaaattttggtaccaaagttagcaactaccctccttgtccgaagccagagctgataaaggggctcagagctcacacagatgctggtggcatcattctactcttccaagatcacaaggtcagtggattacagctcctcaaagatggccactggattgatgtcctcccaatgcgccactccattgtcatcaaccttggagaccaacttgaggtcatcaccaatggcaaatacaagagtgtgatgcaccgtgtgattactcaaacggatggtaacagaatgtccatagcctcgttttacaatccaggcaatgatgcattgatcgctccagcaccagccttggtgaaggaagatgagactagccaagtttatcccaagtttgtttttgatgattacatgaagctctatgctggccttaaatttcaggccaaagaaccaagatttcaagctatgaaggccacggagtcatccaacattaatttaggccccatagcaacggtctaa

SEQ ID NO: 24845 - protein, 318 aa, Glycine max
MEKFPVVDMGNLNNEERSATMEIIKDACENWGFFELVNHGISIELMDTVERMTKEHYKKCMEQRFKEMVASKGLESAQSEINDLDWESTFFLRHLPASNISEIPDLDEDYRKVMKDFAVELEELAELVLDLLCENLGLEKGYLKKVFYGSKGPNFGTKVSNYPPCPKPELIKGLRAHTDAGGIILLFQDHKVSGLQLLKDGHWIDVLPMRHSIVINLGDQLEVITNGKYKSVMHRVITQTDGNRMSIASFYNPGNDALIAPAPALVKEDETSQVYPKFVFDDYMKLYAGLKFQAKEPRFQAMKATESSNINLGPIATV

SEQ ID NO: 24846 - DNA, 1011 bp, Brassica napus
  CDS (1)..(1011)
atggagatcgagagagtccaagacatttcatcatcttccctccacaccgaagccatccctctcgagttcatcagatcggagaaagaacagccggcgatcaccactttccgaggtccggtgccggcgatccccgtcgtcgacctgagcgaccccgacgaagagagcgtggcgcgtgcggtggtgaaggcgagtgaagaatgggggattttccaggtggttaatcacgggattcccacggagctgataaaaaggttgcaggaagtggggagaacgttcttcgagcttccgtcggcggagaaagagtccgtcgcgaagcccgttgatgccaaggacatcgaagggtacggaacgaagctacagaaagaagtagaaggtaagaaagcttgggttgatcatcttttccacaggatctggccaccgtcgtgcgttaactacagtttctggcccaagaacccacctgagtacagggaggtgaacgaagagtacgcgttgcatgtgaagaagctgtccgagacattactaggcatactctcggaagggttaggcttacgtcgtgaggcgttgagagaaggtctcggcggagatctggcggagtatatgatgaagattaactattatccgccgtgtcctcgaccggatttagctttgggagtacccgcgcatactgatctcagtggaatcactctgcttgtacctaatgaagttcctggacttcaagtcttcaaagacgatcactggttcgacgccgagtatattccttccgccgtcattgttcacatcggcgatcagatactgaggctaagtaatgggaggtataagaatgtgttgcataggacgacggtggataaggacaggacaaggatgtcgtggccagtgttcttggagccacaccgtgaaatgatagtcgggccattaccggagcttataagcgatgattatcctccaaagtacaagccttttgctttcaaggactacagttaccgtaagctcaataagcttcctctggactaa

SEQ ID NO: 24847 - protein, 336 aa, Brassica napus
MEIERVQDISSSSLHTEAIPLEFIRSEKEQPAITTFRGPVPAIPVVDLSDPDEESVARAVVKASEEWGIFQVVNHGIPTELIKRLQEVGRTFFELPSAEKESVAKPVDAKDIEGYGTKLQKEVEGKKAWVDHLFHRIWPPSCVNYSFWPKNPPEYREVNEEYALHVKKLSETLLGILSEGLGLRREALREGLGGDLAEYMMKINYYPPCPRPDLALGVPAHTDLSGITLLVPNEVPGLQVFKDDHWFDAEYIPSAVIVHIGDQILRLSNGRYKNVLHRTTVDKDRTRMSWPVFLEPHREMIVGPLPELISDDYPPKYKPFAFKDYSYRKLNKLPLD

SEQ ID NO: 24848 - DNA, 1080 bp, Glycine max
  CDS (1)..(1080)
atgggagacattgatccagcttttatacaatccacagaacaccgtcccatagcaaaggtggtggaagttagagagattccagtgatagacctttcagaaggtagaaaagaattactcatttcagaaattggcaaagcatgtgaggagtggggatttttccaagtaataaatcatggggtaccctttgagattagtagagaggttgagattgtcgccaagaagttctttgagacgagcttagaggagaagaagaaagtgaaaagagatgaatttaatgcaatggggtaccatgatggggagcacaccaagaacgtaagagactggaaagaggtgtttgattaccttgttgaaaacactgcacaagtcccatcttcccatgagccaaatgatttggatttgaggactctcaccaaccaatggccccaaaactctcctcattttagggaaacattgcaagagtatgctcgagaagtggaaaagctagcttacaagttgttggagctgatttcacagagcttgggtttggctgctgacaaattccatggctgtttcaagaaccaactcagcatggtgcgactcaattactatcccgcatgccctttccctgacctggcacttggtgttggtcgccacaaggattccagtgctttaactgtgcttgcccaagatgatgttggaggattacaagttaagagaaaatcagatggagaatggattcctgttaaacctaccccaaatgcatttattatcaatgtgggggatatagttcaggtttggagcaatgacaagtacgagagcgtggagcacagggtggtggtgaattctgaaaaggaaaggttttcaattccattcttctttttccctgctcaccatgttatggtgaagcctgccgaggagctggtaaatgagcaaaatccagcaagatatagagaatacaaatatggtaagttctttgccaacagaaaccggagtgatttcaagaagcgtgatgtggagaatatccaaattcatcacttcaggatcttggatgaggcatttgggttggcatcctcaatatcatccatatctgagcataactag

SEQ ID NO: 24849 - protein, 359 aa, Glycine max
MGDIDPAFIQSTEHRPIAKVVEVREIPVIDLSEGRKELLISEIGKACEEWGFFQVINHGVPFEISREVEIVAKKFFETSLEEKKKVKRDEFNAMGYHDGEHTKNVRDWKEVFDYLVENTAQVPSSHEPNDLDLRTLTNQWPQNSPHFRETLQEYAREVEKLAYKLLELISQSLGLAADKFHGCFKNQLSMVRLNYYPACPFPDLALGVGRHKDSSALTVLAQDDVGGLQVKRKSDGEWIPVKPTPNAFIINVGDIVQVWSNDKYESVEHRVVVNSEKERFSIPFFFFPAHHVMVKPAEELVNEQNPARYREYKYGKFFANRNRSDFKKRDVENIQIHHFRILDEAFGLASSISSISEHN

SEQ ID NO: 24850 - DNA, 966 bp, Brassica napus
  CDS (1)..(966)
atggagagttttccaatcatcaatctcgagaagcttaatggagaagagagaggactcacgatggagaagatcaaagacgcttgtgaaaactgggggttctttgagtgcgtgaaccatgggattccacatgaactacttgacagagtggagaagatgaccaaggaacactacaagaagtgcatggaagacagattcaaggagtccattaagaacagaggactcgactctgttcggtctgaagtcaatgacgttgactgggagtcaactttctaccttaagcaccttcctgcctccaatatatcccttgtccctgatctcgacgacgattacaggacgttgatgaaagagtttgccggtaagatagagatgttgtcggaggagctactggatctgctttgcgagaatcttggattggagaagggttatctgaaaaaggtgttctacggatcgaaaagtccaacatttggaaccaaagtgagcaactatccaccttgtcctaaaccggatttaatcaaggggctccgagcacataccgacgcaggcggcatcatcctcctcttccaggacgataaagtcagtggacttcagctccttaaggacggtgagtgggtcgatgttcctccggttaagcattctatcgtcgttaatctcggtgaccagcttgaggtgataaccaatgggaagtacaagagcgtggagcatagagtgatagcccagacggacggagaaggaagaatgtccattgcatcattctacaaccctggaagcgactctgttatttttccggcgccggagttgatcggaaaagagaatgagaagaaggataactatccaaaatttgtgtttgaggattacatgaaactttactctgctgtcaagtttcaggccaaagaaccaaggtttgaagccatgaaggctatggagacaaccgtggccaacaatgttggaccattggccactgcctaa

SEQ ID NO: 24851 - protein, 321 aa, Brassica napus
MESFPIINLEKLNGEERGLTMEKIKDACENWGFFECVNHGIPHELLDRVEKMTKEHYKKCMEDRFKESIKNRGLDSVRSEVNDVDWESTFYLKHLPASNISLVPDLDDDYRTLMKEFAGKIEMLSEELLDLLCENLGLEKGYLKKVFYGSKSPTFGTKVSNYPPCPKPDLIKGLRAHTDAGGIILLFQDDKVSGLQLLKDGEWVDVPPVKHSIVVNLGDQLEVITNGKYKSVEHRVIAQTDGEGRMSIASFYNPGSDSVIFPAPELIGKENEKKDNYPKFVFEDYMKLYSAVKFQAKEPRFEAMKAMETTVANNVGPLATA

SEQ ID NO: 24852 - DNA, 1125 bp, Brassica napus
  CDS (1)..(1125)
atggaatacatcacagagctctctttcaatggaaagaaaaccgaagataaccctttgacactctttggttcgactgtcataaataatcaacaaaaccaaatacctcaagagtttgtatggccggacgataagaaaccctctgctaacattccgatcctccagatccccctcatcgacctcgccggtatcctctccggcgaccagttcttggtctcggaggcaacaagactcgtggcagaaggggcaaaacaacatggtttcttcctggtcaccaaccatggagtcgatgagggactcatgtctagtgcatgtacactaatggacagattctttaagtcaccgacttgtgagaaacagaaggctcagaggaaccatgacgaaagctggggttacactagtagctttgtaggaaaattcaagaagaatctaccctggaaggaaatgctgtcgtttaggttctccccacaggagaagagcgagaatcattctgaaatcgttaaagacttcattattaagaaaatgggacaaggatacaacgattttgggagtgtttatcaagaatacgcggaggccatgagcaatctctcactaaggatcatggaacttcttgcaatgagtcttggaatcaaaaggagccattttgtagagtttttcgaagacaacgaatccatattgagattgaattactacccaaagtgcaagcaaccgaatgatgtattagggtcaggaccacattgcgatccaacctctctaaccatacttcaacaagaccacagtggtcttcaagttttcgtggacaaccagtggcaatcaatcccttataaccctcaagcgttggtggttaacattggcgacactttcagggctctaactaacggaagatacaagagttgcttgcatcaagcggtagtaaatagccaaaccgaaagaaagacacttgtattcttcctatctccgaaaatggacaaagtggtaaagccaccagaagaattagaaggcgaaagagcgtatcctgattttacatggtctttgcttcatgagttcgtaatgaaacattatagaacagacgagaacacgcttaaagagttcacaaaatggcttaaaaccagaagaattttcttatga

SEQ ID NO: 24853 - protein, 374 aa, Brassica napus
MEYITELSFNGKKTEDNPLTLFGSTVINNQQNQIPQEFVWPDDKKPSANIPILQIPLIDLAGILSGDQFLVSEATRLVAEGAKQHGFFLVTNHGVDEGLMSSACTLMDRFFKSPTCEKQKAQRNHDESWGYTSSFVGKFKKNLPWKEMLSFRFSPQEKSENHSEIVKDFIIKKMGQGYNDFGSVYQEYAEAMSNLSLRIMELLAMSLGIKRSHFVEFFEDNESILRLNYYPKCKQPNDVLGSGPHCDPTSLTILQQDHSGLQVFVDNQWQSIPYNPQALVVNIGDTFRALTNGRYKSCLHQAVVNSQTERKTLVFFLSPKMDKVVKPPEELEGERAYPDFTWSLLHEFVMKHYRTDENTLKEFTKWLKTRRIFL

SEQ ID NO: 24854 - DNA, 1077 bp, Brassica napus
  CDS (1)..(1077)
atggttgaagtggaaagagtcgagaatttagcaaagagcggaatcaaatcgatcccaaaagaatacatccgtccaaaagaagagctggagagcatcaacgacgttttccaagaagagaagaaagaagacggccctcaagtccccaccatcgacttacaaaacatcgagtccgaagacgaaacgctccgtgagaaatgcacagaggagctcaagaaggctgctatggactggggagtgatgcatctgatcaaccacggcgtaccggttgacctgatggagcgtgtgaagaaagcaggagaagagttcttcggtttgcccgtggaggagaaggagaagtatgcaaacgatcaagccaccggtaagatccaagggtatggaagtaaattagctaacaacgcgagtggacagctagagtgggaagactacttcttccatcttgtttatcctgaagacaagagagatctctcactttggcccaagacaccaagtgattatgtagaagccacgagtgagtacgctaagtgtcttcgtttgctagcaacaaaggttttcaaagctctctctatcggtctaggcttagagcctgaccgtctagagaaagaagttggtggtttagaagagcttcttctacaaaagaagataaactattacccgaaatgccctcagcctgagctagcacttggcgtggaagctcacaccgatgtaagcgctttgaccttcattctacacaacatggttcctggtctgcagcttttctacgagggcaaatgggttattgcaaaatgtgttcctgattccattgtgatgcacattggcgatacgttggagattcttagtaatggcaagtttaagagtatactgcaccgtggtttggtgaataaggagaaggttaggatctcttgggctgtgttttgtgagccacccaaggataagatcgttcttaagccgttgccggagatggtgagtgctgagactccggctaagtttcctccaaggacattttctcaacatattgagcataagttgtttagaaaaaacgaacaagaggagttggtgcctgagaaaaaagacgattaa

SEQ ID NO: 24855 - protein, 358 aa, Brassica napus
MVEVERVENLAKSGIKSIPKEYIRPKEELESINDVFQEEKKEDGPQVPTIDLQNIESEDETLREKCTEELKKAAMDWGVMHLINHGVPVDLMERVKKAGEEFFGLPVEEKEKYANDQATGKIQGYGSKLANNASGQLEWEDYFFHLVYPEDKRDLSLWPKTPSDYVEATSEYAKCLRLLATKVFKALSIGLGLEPDRLEKEVGGLEELLLQKKINYYPKCPQPELALGVEAHTDVSALTFILHNMVPGLQLFYEGKWVIAKCVPDSIVMHIGDTLEILSNGKFKSILHRGLVNKEKVRISWAVFCEPPKDKIVLKPLPEMVSAETPAKFPPRTFSQHIEHKLFRKNEQEELVPEKKDD

SEQ ID NO: 24856 - DNA, 924 bp, Glycine max
  CDS (1)..(924)
atggagaacttccccgtgatcaacttagacaatctcaacggtgaggagaggaaagctacactagaccagattgaagacgcttgccagaactggggattttttgagttggtgaatcatggaataccccttgagcttttggatactgtggaaaggttgacaaaagagcattataggaaatgcatggagaacaggttcaaggaggcagtcgcaagcaaggccttagaagttgaagtgaaggacatggattgggagagtaccttcttcttgcgccatcttccaacctccaacatctctgaaatccctgatctctgccaagagtatagggatgcaatgaaggaatttgcaaagaaattggaggagcttgcagaggagttgctagacctgttatgtgaaaatcttggattagagaaagggtacctgaagaatgcattttatggatcaaagggtccaaattttgggacaaaggtagcaaactaccctgcatgcccaaagccagagttggtgaagggtcttcgtgcacatacggatgcgggtgggattatccttctcttgcaagatgacaaggtcagtggccttcagcttctcaaagatggccaatgggtggatgtgcctcctatgcgccattccattgttgttaaccttggtgaccaaattgaggtaatcacgaatgggagatataagagtgtggagcatcgtgtggttgctcgaactgatgggaccagaatgtccgtagcctcattctacaatccagccaatgatgctgttatctaccctgcaccagcattgttggagaaagaggcacaggagacagagcaagtgtacccaaaatttgtatttgaggattacatgaagctctatgctacgctaaagttccagccaaaggagccaagatttcaagccataaaggcagtgaactcattttag

SEQ ID NO: 24857 - protein, 307 aa, Glycine max
MENFPVINLDNLNGEERKATLDQIEDACQNWGFFELVNHGIPLELLDTVERLTKEHYRKCMENRFKEAVASKALEVEVKDMDWESTFFLRHLPTSNISEIPDLCQEYRDAMKEFAKKLEELAEELLDLLCENLGLEKGYLKNAFYGSKGPNFGTKVANYPACPKPELVKGLRAHTDAGGIILLLQDDKVSGLQLLKDGQWVDVPPMRHSIVVNLGDQIEVITNGRYKSVEHRVVARTDGTRMSVASFYNPANDAVIYPAPALLEKEAQETEQVYPKFVFEDYMKLYATLKFQPKEPRFQAIKAVNSF

SEQ ID NO: 24858 - DNA, 1068 bp, Triticum aestivum
  CDS (1)..(1068)
atggctgacgagtcatggaggctgccgagttcagtgcagcaactggctgccagcatacaggagccaccaaggcagtacttgctcagagagcaagaaccgcttggtgggaacctggctggtaccgagatgccggagcccattccaacaatcgatctcggcttgctgtccgcatccaacgatgcggaggaggccgccaagctgcggtcagcgctgcagacctggggattcttcaaggtttctgaccatggaatggagacctctctcatggattctgtgatgaacgcatcaagggattttttccgcctgccgctcgaagagaagagaaagtacagtaacataataggcgggaaacatttccagatggaagggtatggaactgaccaggtgaaaactcaagatcaaaggctggactggtccgatcggctgcatcttaaagtggagccagaggatgagagaaaccttgcccattggcccatacatccaaaatctttcagggatgacctgcatgagtacacatcgaagagcaagagaatcaaagacgacatccttcgggcagtggccaagctattggagctcgatgaagattgcctagttaaccagtttagcaacagggctctcacttatgctagattcaattactatcctccatgtccaagacctgatcttgtcttgggcatcaaacctcattctgatgtctatgctcttacagttcttctaatggacaaggatgtcgctgggctgcagtttctcagagatggaacgtggtacaatgttccatctgcgtctaactacaccttactgatcaacgttggtgttacaatggagataatgaccaacgggatcttcaagggaccagtacatagggttgtgactaattctgagaaagagaggatgtcagtggccgtgttctatggtctggatcctgaaagagagattggaccgatagctcagatgttgactgaggaccaaccggcgcgatacagggaaatgaaggtcaaggatttcctagtcgcgcaccttgagcatttctctcgaggagaaagagttgtcgattcgttaaggatatga

SEQ ID NO: 24859 - protein, 355 aa, Triticum aestivum
MADESWRLPSSVQQLAASIQEPPRQYLLREQEPLGGNLAGTEMPEPIPTIDLGLLSASNDAEEAAKLRSALQTWGFFKVSDHGMETSLMDSVMNASRDFFRLPLEEKRKYSNIIGGKHFQMEGYGTDQVKTQDQRLDWSDRLHLKVEPEDERNLAHWPIHPKSFRDDLHEYTSKSKRIKDDILRAVAKLLELDEDCLVNQFSNRALTYARFNYYPPCPRPDLVLGIKPHSDVYALTVLLMDKDVAGLQFLRDGTWYNVPSASNYTLLINVGVTMEIMTNGIFKGPVHRVVTNSEKERMSVAVFYGLDPEREIGPIAQMLTEDQPARYREMKVKDFLVAHLEHFSRGERVVDSLRI

SEQ ID NO: 24860 - DNA, 996 bp, Triticum aestivum
  CDS (1)..(996)
atggcaattcctgctaatgctgctgtctcgttgaacttcccggtgatcaacatggagaagcttgagaccggggagaggggcgcggccatggaggtcatccacgacgcctgccagaactggggattcttcgagctgctgaaccatggcatctccgccgagctgatggacgaggtggagcgggtgagcaaggcccactacgcggcgtgccgggaggacaagttcaaggagttcgcggcgaagacgctggaggccggcgagaagggcgccgacgtgaaggacgtggactgggagagcaccttcttcgtccgtcacctccccgcctccaacctcgccgacctgcccgacctcgaccaccactacagacaagtgatgaaggaattcgcgtccgagatcgagaagctggcggagaaggtgctggacctgctgtgcgagaacctgggtctggagccgggctacctgaagcgggcgttcgccggttccaggggcccgacgttcggcaccaaggtcagcagctacccgccgtgcccgcggccggacctggtggacggcctccgcgcgcacacggacgccggcggcgtgatcctgctgtttcaggacgaccaggtcagcgggctgcagctgctcaaggacggggcctgggtggacgtgccgcccatgcgccacgccatcgtcgtcaacatcggcgaccagctggaggtgatcaccaacgggcggtacaagagcgtgatgcaccgcgtgctcacccgccacgacggcaaccgcatgtccatcgcctccttctacaaccccggcgccgacgccgtcatattcccggccccggcgctcgtgggcgctgccgacgctgctgagaggaacgagggcgaggagggcaccgccgtgtacccaaggttcgtgttcgaggactacatgaacctgtacgtgcgccacaagttcgaggccaaggagccacggttcaaggccatgaaggcagacgccgcgcccatcgccaccgcgtga

SEQ ID NO: 24861 - protein, 331 aa, Triticum aestivum
MAIPANAAVSLNFPVINMEKLETGERGAAMEVIHDACQNWGFFELLNHGISAELMDEVERVSKAHYAACREDKFKEFAAKTLEAGEKGADVKDVDWESTFFVRHLPASNLADLPDLDHHYRQVMKEFASEIEKLAEKVLDLLCENLGLEPGYLKRAFAGSRGPTFGTKVSSYPPCPRPDLVDGLRAHTDAGGVILLFQDDQVSGLQLLKDGAWVDVPPMRHAIVVNIGDQLEVITNGRYKSVMHRVLTRHDGNRMSIASFYNPGADAVIFPAPALVGAADAAERNEGEEGTAVYPRFVFEDYMNLYVRHKFEAKEPRFKAMKADAAPIATA

SEQ ID NO: 24862 - DNA, 1110 bp, Triticum aestivum
  CDS (1)..(1110)
atggaggagaccaagccgcggaacctcggcggctcgctgcccgtgcccaacgtgcaggacctcgccgcgcgggccgacgacctcacgctcacgcccaccctcctccgccgctatgtgcggcctcagcccaacacggccgacctgcgccacgacgcccctgccggcgaagaacaggagcacgtccccatcatcgacctcggccggctcctcggtccgaacggcctcgccggcggacggggcgaggaggccgccaggctgcgctcggcctgcgaggactggggcttcttccagttggtgaaccacgggatacccgaggagaccctggaggagatgaagaggaacgtcatgggattcttcgcgctcccgctggccgagaaggccgccctcgcgcagcagcccggagagatcgaggggtacggccaggcgttcgtcgtctcggaggagcagacgctcgactgggcggacatgttcttcctcctcacgcagccgcccagctaccgcgacctccgcctctggccgtccaacccttccacattcaagaattgcttggagaactactccgaggaggtgcaaagggtggcaggcgagctgctgggagccatggcggagatcctgggcgtgagagaccactcggacatgacgaggctcgccgcgtcgcagtcagtcaggatgaactactacccgccttgcccggaggcgcatgtggacagcgtgttgggcctgtcgccgcactcggacgccgtcgggctgacgctgctgctgcaggtcagcaaggtccccgggctgcagatcaggaggaaaggcggctgggtcccggtgacgccgctccccggcgccctcgtcgtcaacgtcggcgacgtgattgaggtgctcaccaacgggaagtacaagagcgtggagcacagggcggtggttaacgcacgcgaggagcggatgtccatcgcgacgttccacaccgggaagttcggcaccatgtacgggccgctggaggaggtcgtcggagacgagaagccgcggtacaggagtgtcagcgtcgaggagtatgtgaagctcgtgttctccagcaagctcaacggcaagaacatcatggacgccatgaagatcaattga

SEQ ID NO: 24863 - protein, 369 aa, Triticum aestivum
MEETKPRNLGGSLPVPNVQDLAARADDLTLTPTLLRRYVRPQPNTADLRHDAPAGEEQEHVPIIDLGRLLGPNGLAGGRGEEAARLRSACEDWGFFQLVNHGIPEETLEEMKRNVMGFFALPLAEKAALAQQPGEIEGYGQAFVVSEEQTLDWADMFFLLTQPPSYRDLRLWPSNPSTFKNCLENYSEEVQRVAGELLGAMAEILGVRDHSDMTRLAASQSVRMNYYPPCPEAHVDSVLGLSPHSDAVGLTLLLQVSKVPGLQIRRKGGWVPVTPLPGALVVNVGDVIEVLTNGKYKSVEHRAVVNAREERMSIATFHTGKFGTMYGPLEEVVGDEKPRYRSVSVEEYVKLVFSSKLNGKNIMDAMKIN

SEQ ID NO: 24864 - DNA, 1149 bp, Zea mays
  CDS (1)..(1149)
atgccgacgccgtcgcacctcaacaagaacccgcgctacctggacttccgggcggcgcggcgggtgccggagtcgcacgcctggccgggcctgcacgaccaccccgtcgtggacggcggcgcgccgggccccgaccccgtgccggtggtggacctgggcgccgcggacccggcgccggcgccggcggcggcggtggcccgcgccgccgagcaatggggcgcgttcctgctcacgggccacggcgtccccgcggacctgctggcgcgcgtggaggaccggatcgccaccatgttcgcgctgccggccgacgacaagatgcgcgccgtgcgcgggcccggcgacgcctgcggctacggctccccgcccatctcctccttcttctccaagtgcatgtggtccgagggctacaccttctcgccggcctccctccgcgccgacctccgcaagctctggcccaaggccggcgacgactacaccagcttctgtgatgtgatggaggagttccacaagcacatgcgcgccctcgcggacaagctgctggagctgttcctcatggcgctggggctcaccgacgagcaggccagcgccgtcgaggccgagcggaggatcgccgagacgatgaccgccaccatgcatctcaactggtacccgaggtgcccggacccgcggcgcgcgctggggctgatcgcgcacaccgactcgggcttcttcaccttcgtgatgcagagcctcgtgcccgggctgcagctcttccgccacgccccggaccggtgggtggcggtgccggccgtgccgggcgccttcgtcgtcaacgtgggcgacctcttccacatcctcaccaacggccggttccacagcgtgtaccaccgcgccgtcgtgaaccgggacctcgacaggatctcgctcggctacttcctcggccccccgccgcacgccaaggtggcgccgctgcgcgaggccgtgccgcccggccgggcccccgcgtaccgcgccgtcacgtggcccgagtacatgggcgtccgcaagaaggccttcaccaccggcgcctccgcgctcaagatggtcgccctcgccgccgccgccgacctcgacgacgacggcgacgccgccgtcgtccatcagcagcagcagctagtcgtctcgtcgtag

SEQ ID NO: 24865 - protein, 382 aa, Zea mays
MPTPSHLNKNPRYLDFRAARRVPESHAWPGLHDHPVVDGGAPGPDPVPVVDLGAADPAPAPAAAVARAAEQWGAFLLTGHGVPADLLARVEDRIATMFALPADDKMRAVRGPGDACGYGSPPISSFFSKCMWSEGYTFSPASLRADLRKLWPKAGDDYTSFCDVMEEFHKHMRALADKLLELFLMALGLTDEQASAVEAERRIAETMTATMHLNWYPRCPDPRRALGLIAHTDSGFFTFVMQSLVPGLQLFRHAPDRWVAVPAVPGAFVVNVGDLFHILTNGRFHSVYHRAVVNRDLDRISLGYFLGPPPHAKVAPLREAVPPGRAPAYRAVTWPEYMGVRKKAFTTGASALKMVALAAAADLDDDGDAAVVHQQQQLVVSS

SEQ ID NO: 24866 - DNA, 1140 bp, Linum usitatissimum
  CDS (1)..(1140)
atggaaacaacaatagagcagatgatgatgacgaggaggcattcttcgaagctagggaggtcccttctggtgcctagtgttcaggaactggcaaaatcttccactctcaccaattctgctagtgttcctctaaggtacataagggatcctgatcaccagcaggttctggataagccctcctgtaacaagagtcctgaagacgaagatggcgatgatgatgatgaggtgcctgtaattgacatggagaagctgctttcccctgaatccatgccttctcaactctccaaactccattttgcctccacccactggggtttcttccagttaataaaccacagagtaagcagcagtattctggagaaggtgaagacagaggtggagcacttcttcaacctaccaatggaagagaaacaaaagtattggcaaagagaggaagaagtcgaaggtttcggacaagcatttgttgtctctgaggaacagaagctcgattgggccgacctcttcttccttgtcacgcagcctcctcacgagcgaaagcctcacttgtttccaaagcttcccctgcctctaagggagaccttggaggtatactcgacagagcttaaaaacacagcaatggagatcttggttcaaatggctaaagcactaaaaatggatgaaaatgagatgacacaagtgtttgaaaatggacatcaatcaatgaggatgaactattacccaccgtgcccgcagcctaataaggtaattgggctcactccgcattcggacgccacaggcctaaccatccttctccagctcaaccaagtccaaggcctccagatcaagaaacgtggcaattgggttactgtgaaacccctccctgatgccttcatcatcaacattggtgacattgtggagattgtgacgaatggggcgtatagaagcattgagcatcgggcgacagtgaactcggagaaagaaaggctttcgattgcgactttctatgcgccgagctacgagaaagagataggacccgccgaaagcttgattactgaggagaatccaccccacttcaaacgcatactcgtggaagatttcttcaaagggcttttctctagggagctcaaccggaaatcttaccttgattctttgaggctttag

SEQ ID NO: 24867 - protein, 379 aa, Linum usitatissimum
METTIEQMMMTRRHSSKLGRSLLVPSVQELAKSSTLTNSASVPLRYIRDPDHQQVLDKPSCNKSPEDEDGDDDDEVPVIDMEKLLSPESMPSQLSKLHFASTHWGFFQLINHRVSSSILEKVKTEVEHFFNLPMEEKQKYWQREEEVEGFGQAFVVSEEQKLDWADLFFLVTQPPHERKPHLFPKLPLPLRETLEVYSTELKNTAMEILVQMAKALKMDENEMTQVFENGHQSMRMNYYPPCPQPNKVIGLTPHSDATGLTILLQLNQVQGLQIKKRGNWVTVKPLPDAFIINIGDIVEIVTNGAYRSIEHRATVNSEKERLSIATFYAPSYEKEIGPAESLITEENPPHFKRILVEDFFKGLFSRELNRKSYLDSLRL

SEQ ID NO: 24868 - DNA, 996 bp, Linum usitatissimum
  CDS (1)..(996)
atgggaattgtaagggttcaggacatagccttggaatcgaaggagaagatcccggaggagtttgtgaggcacgaggccgagcagccagcaatcacgaccgttcgtggggtcaccctggaggtccccacgatcgacctgagcgaccctgaccaggaaaaggttcagaggctggtggtggaagccagcagagaatgggggatgttccagatcgtgaaccacgacatccctacggagctcactaccaggctccaggatgtcgggaggcggttcttcgagctgccattggaggagaaggagctttatgcaaagtcgcccggttcgatagaagggtatgggacccttcttcagaaggaagttgaaggcaagaaaggatgggttgatcatttgtttcacaaagtttggcctccttctgccgttgattacaagttttggccaagaaatccagcttcctacagggaggtgaatgaggagtatacaaagcacctgcatggagtggtgaacaagctatacgatagcctctccttagggctaggtttggaagctggtgaagttagagaagcacttggtggagatgatttggtctacctaatgaagatcaactactacccgccgtgtccacgacccgatctagcccttggtgtcgtggcccacaccgacatgtcctcgctcacccttctcgtccccaacgatgttcagggactccaggcttcgaaggatggacagtggtacaatgttaggtacatccccaacgcccttgtcgtccacgttggtgaccagatggagatagtgagcaatgggttctacaagagcgtattgcacaggaccacggtgagcaaggaccagacaaggatgtcttggccggtgttcttcgagccaccaacggaccacgtggtgggccctcaccggaagctggtgagcgagaacaatctggccaagtataagaccaagaagtttggagagtactgttactgcaagctcaacaagattcctcagtag

SEQ ID NO: 24869 - protein, 331 aa, Linum usitatissimum
MGIVRVQDIALESKEKIPEEFVRHEAEQPAITTVRGVTLEVPTIDLSDPDQEKVQRLVVEASREWGMFQIVNHDIPTELTTRLQDVGRRFFELPLEEKELYAKSPGSIEGYGTLLQKEVEGKKGWVDHLFHKVWPPSAVDYKFWPRNPASYREVNEEYTKHLHGVVNKLYDSLSLGLGLEAGEVREALGGDDLVYLMKINYYPPCPRPDLALGVVAHTDMSSLTLLVPNDVQGLQASKDGQWYNVRYIPNALVVHVGDQMEIVSNGFYKSVLHRTTVSKDQTRMSWPVFFEPPTDHVVGPHRKLVSENNLAKYKTKKFGEYCYCKLNKIPQ

SEQ ID NO: 24870 - DNA, 1107 bp, Linum usitatissimum
  CDS (1)..(1107)
atgagcaacactactaccactactaccctcctccatgactggccggaaccaatcgtccgggtccagtccttatccgacagcggcctccacgtcatcccacctcgttacatcaagccggcccatcagcggcccaataaccctcctcctcctcctcctccgttgactccgatcctaaacaacaacaacaatattaacatcccgatcgttgacctgagccacggcgtggcggcggcggaggaggagatatcggcggcgtgcagggattgggggttcttccaggtggtgaaccacggtgttaacccggcgttgatggaccgggtgagagaagcgtggcgggaattcttccacctccccatggatgtcaaacaaagctacgctaactctccgaagacttatgaagggtacggcagccgccttggcgtcgagaaaggcgccattctcgattggagcgattactacttcctccacctcttgccgttggcgttgaaggaccatcgcaaatggcccgcccgcccttccgacatcagggaagcgatcgacgagtacgggaagcaagtggtggagctatgcgggaggctgatgaggattctgtcggcaaacctgggattggaacaggaacgcctccagaatgcgttcggcgggaccgacattggggcgtgcttgagagtgaatttctacccgaggtgtccgcagccggacttgacgctcggcttgtcgtcgcactccgaccctggagggttgaccgtcttgttgccggacgaccaggttccggggctgcaggttcggagaggggaggattggattaccgttaagccggctaagcatgcgtttatcgtcaacattggcgatcaagttgaggtattgagcaatgctatttacaaaagtgtggagcatcgggtgatagtgaactcggcgatggaaagagtgtcgttggcgtttttctacaatccgaagagcgacatcccaattgaaccggtgaaagagcttgtgaccgaagagagaccctcgttgtacccacccatgacatttaacgagtacaggctttacataagaaccaagggtccacgtggcaagtcccaagtggaggctttgagatctccaaggtga

SEQ ID NO: 24871 - protein, 368 aa, Linum usitatissimum
MSNTTTTTTLLHDWPEPIVRVQSLSDSGLHVIPPRYIKPAHQRPNNPPPPPPPLTPILNNNNNINIPIVDLSHGVAAAEEEISAACRDWGFFQVVNHGVNPALMDRVREAWREFFHLPMDVKQSYANSPKTYEGYGSRLGVEKGAILDWSDYYFLHLLPLALKDHRKWPARPSDIREAIDEYGKQVVELCGRLMRILSANLGLEQERLQNAFGGTDIGACLRVNFYPRCPQPDLTLGLSSHSDPGGLTVLLPDDQVPGLQVRRGEDWITVKPAKHAFIVNIGDQVEVLSNAIYKSVEHRVIVNSAMERVSLAFFYNPKSDIPIEPVKELVTEERPSLYPPMTFNEYRLYIRTKGPRGKSQVEALRSPR

SEQ ID NO: 24872 - DNA, 1056 bp, Linum usitatissimum
  CDS (1)..(1056)
atgggagaagttgatgcagcattcatccaagaagcagagcacagaccaaacccagaaatcatcaaagcagaaggaattcctctcatcgacctctctcatgcatcaaccgagagacttgtgggggagatcagggatgcttgcagggaatgggggttcttccaagtgatcaaccatggagttccattggaggccagacagagagtggaggctgcttcgaaggagttcttctggcagccattggaggagaagaggaaagttagaagagatgagaagaaagttatgggttactatgacactgagcataccaagaacgttagggattggaaagaagtgtttgatttcagtgttgaagatcctacttttgttcctcatgatgatcatggtggtggtttctctgagtggcataatcagtggcctcaacatccctctgatctcagggaagcatgcgaggagtatgcaaaagaagtggagaagctagcctacaaggtgatggagctgatcgccatgagcctagggctggaaccagacagattccatggattcttcgacgaccaatcgaccagcttcgtgaggctgaatcactatcctccatgcccagttcctcacttggccctcggagtcggccggcacaaggacgccggagcactcaccgttcttgctcaggacgacgtcggcgggctggaagtgaagaggaggtccgatggggagtgggcctgggtccagcccactcctgatgcttacattgtcaacgttggtgacatcatccaggtttggagcaatgaggcatacgagagcgtggaacacagagtgatggtgaactcagagaaggaaaggttctcgattccgttcttcttcaacccatcccattacactgtggttcagccattggaggaactactggtggtggatgctagtaagaagaagaagaacactacagcaaagtacaggccttaccactgggggaagttctttgttaccaggaaaggcagcaacttcaagaaacttgctgttgaaaacatccagatctctcacttcagagtcctctcagaaatctga

SEQ ID NO: 24873 - protein, 351 aa, Linum usitatissimum
MGEVDAAFIQEAEHRPNPEIIKAEGIPLIDLSHASTERLVGEIRDACREWGFFQVINHGVPLEARQRVEAASKEFFWQPLEEKRKVRRDEKKVMGYYDTEHTKNVRDWKEVFDFSVEDPTFVPHDDHGGGFSEWHNQWPQHPSDLREACEEYAKEVEKLAYKVMELIAMSLGLEPDRFHGFFDDQSTSFVRLNHYPPCPVPHLALGVGRHKDAGALTVLAQDDVGGLEVKRRSDGEWAWVQPTPDAYIVNVGDIIQVWSNEAYESVEHRVMVNSEKERFSIPFFFNPSHYTVVQPLEELLVVDASKKKKNTTAKYRPYHWGKFFVTRKGSNFKKLAVENIQISHFRVLSEI

SEQ ID NO: 24874 - DNA, 969 bp, Linum usitatissimum
  CDS (1)..(969)
atggagttcccaatcatcaacatggagaagctcgccggcaacgagagatccgccaccatggccaagatcaacgacgcctgcgagaactggggcttctttgagattctgaaccatccgattccggtggagctactcgacacggtggaggcgatgacaaaagagcattacaggaaatgcttggagcagaggttcaaggagctggtgaagagcaaggggctcgaagagctcgattccgagatcaaggacatggactgggagagcaccttctacctcaagcaccttcccgaatcgaacatcaatgaggtccccgatctcgaggaccgataccgggaggtgatgaaggactttgccggtaggcttgagaagctggcggaggagcttcttgatctgctgtgcgagaatctcgggctcgagaagggctacttgaagaaggcgttttatggatcgaaagggttgcccactttcggtacgaaagtgagcaactacccaccttgtccgaagcccgatctgatcaaggggcttcgggcacacaccgatgctggcgggatcatcttgttgtttcaggatgataaggtgagcggccttcagcttttgaaggatggggagtgggttgatgtgccgcctatgcgtcactcgatcgtcattaacctcggtgaccagattgaggtgattaccaatgggaggtataagagcgtggagcatagggtggtggcgcaaacagacgggaccaggatgtccattgcatcgttttacaaccctggaaatgacgcggtgatctaccctgcacctcagctgctcgagggagagtcggagacagagaagaagagcattacctacccgaaattcgtgtttgatgactacatgaagctgtatgccgggctgaagtttgaggccaaggagccaaggtttgaggccatgaagtctaacgtgaagctgagtccaagtgctgtcatagttgagaccttttaa

SEQ ID NO: 24875 - protein, 322 aa, Linum usitatissimum
MEFPIINMEKLAGNERSATMAKINDACENWGFFEILNHPIPVELLDTVEAMTKEHYRKCLEQRFKELVKSKGLEELDSEIKDMDWESTFYLKHLPESNINEVPDLEDRYREVMKDFAGRLEKLAEELLDLLCENLGLEKGYLKKAFYGSKGLPTFGTKVSNYPPCPKPDLIKGLRAHTDAGGIILLFQDDKVSGLQLLKDGEWVDVPPMRHSIVINLGDQIEVITNGRYKSVEHRVVAQTDGTRMSIASFYNPGNDAVIYPAPQLLEGESETEKKSITYPKFVFDDYMKLYAGLKFEAKEPRFEAMKSNVKLSPSAVIVETF

SEQ ID NO: 24876 - DNA, 999 bp, Hordeum vulgare
  CDS (1)..(999)
atggcaattccagctaatgctgccgccacctcgttgagcttcccggtgatccacatggagaagctggagacagaggagaggggagcggccatggaggtcatccgcgacgcctgcgagaactggggcttcttcgagctgctgaaccatggcatctcgcacgagctgatggacgaggtggagcgggtgagcaaggcgcactacgcggcgtgccgggaggagcagttcaaggagttcgcggcacggacgctggaggccggcgagaagggcgccgacgtgaaggacgtggactgggagagcaccttcttcgtccgccacctccccgcctccaacctcgccgacctgcccaacctcgaccaccactacaggcaagtgatgaaggagttcgcgtccgagatcgagaagcttgcggaaaaggtgctggacctgctgtgcgagaacctcggcctggaggagggctacctgaagcgggccttcaccggctccaatggcccgacgttcggcaccaaggtgagcagctacccgccgtgcccgcgccccgacctggtggacggcctccgcgcgcacaccgacgccggcggcgtcatcctgctgttccaggatgatcaggtcagcgggctccagctcctgaaagacggggcatgggtggacgtgccgcccatgcgtcacgccgtcgtcgtcaacatcggcgaccagctggaggtgatcaccaacgggcggtacaagagcgtcatgcaccgcgtgctcacccgccctgacggcaaccgcatgtccatagcctcattctacaaccccggcgccgacgccgtcatattcccggccccagcgcttatgggtgctgccgaagccgctgggaagaacgagggcgaggagggcaccgccgagtacccgagcttcgtgttcgaggactacatgaacctgtacttgcgccacaagttcgaggccaaggagccgcgcttcgaggccatgaaggtggatgccgcgcccatcgccaccgtgtga

SEQ ID NO: 24877 - protein, 332 aa, Hordeum vulgare
MAIPANAAATSLSFPVIHMEKLETEERGAAMEVIRDACENWGFFELLNHGISHELMDEVERVSKAHYAACREEQFKEFAARTLEAGEKGADVKDVDWESTFFVRHLPASNLADLPNLDHHYRQVMKEFASEIEKLAEKVLDLLCENLGLEEGYLKRAFTGSNGPTFGTKVSSYPPCPRPDLVDGLRAHTDAGGVILLFQDDQVSGLQLLKDGAWVDVPPMRHAVVVNIGDQLEVITNGRYKSVMHRVLTRPDGNRMSIASFYNPGADAVIFPAPALMGAAEAAGKNEGEEGTAEYPSFVFEDYMNLYLRHKFEAKEPRFEAMKVDAAPIATV

SEQ ID NO: 24878 - DNA, 1131 bp, Hordeum vulgare
  CDS (1)..(1131)
atggcggactgcatgcaggagtggccggagcccatcgtgcgcgtgcaggcggtcgcggagagcggcctggccgccatcccgggctgctacgtcaagccgccgcacgaccgcccagcgcagcagcacctggcagccgtcgccgtcctccacgagccctccgacaccagcattccggtgatcgacctcggcgagctcctcgcggcggacgagggccgcatcgacggcctgatcacagaggccgtggcggcggcgtgccgggactcggggttcttccaggtggtgaaccacggggtggcgccggagctgatgcgcgcggtgcgggaggcgtggcgcggcttcttccggctgcccatctcggcgaagcagcagtacgccaaccagccccgaacgtacgaggggtacggcagccgggtgggagtccagaagggcgggccactcgactggggggactactatttcctccacctcgcgccggaggccgccaagagccccgataagtactggccgaccaaccccgccatctgcaaggagttgtcggaggagtacgggcgggaggtgacgaggctgtgcgagctgctgatgaaggtgctgtcggcgagcctggggctggaggagacgaggttccgggaggcgttcggcggggccgagtgcggcgcgtgcctgcgcgccaactactacccgcggtgcccgcagccggacctcaccctcggcctctcggcgcactccgacccgggcgtcctcaccgtgctcctcgccgacgagcacgtccgcggcctgcaggtccgccgcgccgacggcgagtgggtcaccgtgcagcccgtccgccacgatgccttcatcgtcaacgtcggcgaccagatccagatattgagcaactcagtgtacaagagcgtggagcaccgggtgatcgtcaacgccaaggaggagcggatctccctggcgctcttctacaaccccagaggcgacgtccctatagcgccggcgccggagctggtgacgccggaccggccgtccctctaccctcccatgaccttcgacgagtacagggtgtacataaggaagaacgggcccaggggcaaggcgcagctcgagggtttcaagggcaaaaccgcacctgctggaaataaatag

SEQ ID NO: 24879 - protein, 376 aa, Hordeum vulgare
MADCMQEWPEPIVRVQAVAESGLAAIPGCYVKPPHDRPAQQHLAAVAVLHEPSDTSIPVIDLGELLAADEGRIDGLITEAVAAACRDSGFFQVVNHGVAPELMRAVREAWRGFFRLPISAKQQYANQPRTYEGYGSRVGVQKGGPLDWGDYYFLHLAPEAAKSPDKYWPTNPAICKELSEEYGREVTRLCELLMKVLSASLGLEETRFREAFGGAECGACLRANYYPRCPQPDLTLGLSAHSDPGVLTVLLADEHVRGLQVRRADGEWVTVQPVRHDAFIVNVGDQIQILSNSVYKSVEHRVIVNAKEERISLALFYNPRGDVPIAPAPELVTPDRPSLYPPMTFDEYRVYIRKNGPRGKAQLEGFKGKTAPAGNK

SEQ ID NO: 24880 - DNA, 1035 bp, Zea mays
  CDS (1)..(1035)
atggagaatatgctccacctagccccgtcgtcccaggcccaggcattggccttggaccgctcctccgtcttctcgcgtgagcacgtgccgccggccgtctccgctgtcacctccctgccagttatcgacatgtctcgcagccgcgacgaggtccgccgcgctatcctcgacgccggcatggagttcggcttcttcctggtggtggagcacggcatcccagaggaggtgatgcgcgacatgctggaggtgtgcgaggagttcttccagctgccggcggcgagcaaggcgtacatgtactcggaggacagtcagaggcccaaccggatcttctccggcacaacctacgacacgggcggcgacaagtactggcgggactgcctccgcctcgcctgcccctcgtccttcccggtcggcacaagggacgactggccgcacacgccccagcggctgaggggtgtcgtggagcgtttcaccgctctgacgagagggctgggggtggagctgctgcggctgctgtccgaggccatggggatccggcccgactacttcgagggcgacatcagcgccggcgacgtggtcctcaacgtcaaccactaccctccgtgccccagcccggagaagacgctcggcctgccgccacattgcgaccgcaacctcatcaccctcctcctccaaggctccgtctatggcctcgacgtcgcctacaggggagagtggataaaggtcgagcccatgcccggtgccttcgtcgtcaacttcggccagcaactcgaggtggtgaccaacggattgctgaagagcgttgagcaccgcgtggtgaccagctcgacgctggcgcggacggcggtggccacattcatcatgcccaccccagactgcctcatcggcccgtcaaaggagttcctcgccggggacaagccaccgtgctaccgcaccatcaggttcggtgacttcatgcgcatgtacaacactgtcaagctggggtcatccatcaaccagactacagatcttaagaatgtccagaagaagatatga

SEQ ID NO: 24881 - protein, 344 aa, Zea mays
MENMLHLAPSSQAQALALDRSSVFSREHVPPAVSAVTSLPVIDMSRSRDEVRRAILDAGMEFGFFLVVEHGIPEEVMRDMLEVCEEFFQLPAASKAYMYSEDSQRPNRIFSGTTYDTGGDKYWRDCLRLACPSSFPVGTRDDWPHTPQRLRGVVERFTALTRGLGVELLRLLSEAMGIRPDYFEGDISAGDVVLNVNHYPPCPSPEKTLGLPPHCDRNLITLLLQGSVYGLDVAYRGEWIKVEPMPGAFVVNFGQQLEVVTNGLLKSVEHRVVTSSTLARTAVATFIMPTPDCLIGPSKEFLAGDKPPCYRTIRFGDFMRMYNTVKLGSSINQTTDLKNVQKKI

SEQ ID NO: 24882 - DNA, 906 bp, Helianthus annuus
  CDS (1)..(906)
atggagattcctatgatagattttagcaagttagatggtgaagataggagcaaaacaatggcacttcttcacaatgcttgtgaaaaatggggcttctttcagattgagaaccatggagttgataaggaactaatggagaaggttaagaaattagtgaataagcattatgaagataacatgaagccaaggttttacaactcggatttggtaaaaactgttgatggtaaaaataaaatcagtaatactgattgggaaagcactttttttatctggcatcgaccggataataagatcaacgagtgcgctgatctgtctgaggaacttcgcaaaacagtggatgagtacattaatcagcttataaaggtagccgaaaagctttcagaactcatgtgcgaaaatctcggtctagacaaagaacacatcaaagaagcttttacaggaagtaaaggtcctgcagtaggaacaaaagtggcaaaatacccaaaatgccctcacccggaactcgtaagaggtctacgcgaacacacagatgccggtggcatcattctgttgctccaagacgatcaagtcccgggtctcgagtttttcaaagatggtgaatgggttaacattccaccttctaagaacaacactatatttgttaatacaggtgatcaagtggaagtgttgagtaatggaatttacaaaagtacccttcaccgagttatgactgataaagacggaagcaggctttcgatcgctactttttacaatccatctggcgatgcggttatttcgccggctcataaattaacctacccgaatcggtatacttttcaagattatttgaaactgtattcgtctactaagtttgaagataaagcgcctagattcgagtcgatgaagaagatggtcaacggtcattga

SEQ ID NO: 24883 - protein, 301 aa, Helianthus annuus
MEIPMIDFSKLDGEDRSKTMALLHNACEKWGFFQIENHGVDKELMEKVKKLVNKHYEDNMKPRFYNSDLVKTVDGKNKISNTDWESTFFIWHRPDNKINECADLSEELRKTVDEYINQLIKVAEKLSELMCENLGLDKEHIKEAFTGSKGPAVGTKVAKYPKCPHPELVRGLREHTDAGGIILLLQDDQVPGLEFFKDGEWVNIPPSKNNTIFVNTGDQVEVLSNGIYKSTLHRVMTDKDGSRLSIATFYNPSGDAVISPAHKLTYPNRYTFQDYLKLYSSTKFEDKAPRFESMKKMVNGH

SEQ ID NO: 24884 - DNA, 942 bp, Helianthus annuus
  CDS (1)..(942)
atggaggaggagacatttccagttgtgaacatggagaagctgaatggagaagaaagagctgcaacaatgaacctaatcaatgatgcttgtgaaaactggggattctttgagattgtgaatcatgggatctccacggagcttttggacagagtggagaagatgacaaaggggcattacaaaaagtgcatggaggatcgcttcaaagaaatggtggctgccaaaggcttagaagccgttcagactgagattgatgacctggactgggagagcactttctatctccgccatctccccaaatccaacatctctgagatcccagatcttgaacacgactacagggaggtcatgaaggaattcgctaaagagctagagaaacttgcagaagctatactggacatactgtgtgagaatctgggattggaaaagggttacctaaagaaagtattctatgggggaaagggccccaccttcgggaccaaggtgagcaactaccctccctgtccgaagccagacctgatcaagggtctaagggcccacaccgacgctggcggcgtcatcttgctcttccaggacgataaggtcagtggcctccagctgctcaaggacgacaagtgggttgatgtgccacccatgcaccactccatcgtcgttaacttgggtgatcagcttgaggtcatcaccaacggaaggtacaagagtgtgctccacagagtcattgctcagactgatggcaccggccgcatgtccttagcctccttctacaacccagggagtgatgcactcatctatcccgccccacagctagtgaacaaggaacaagacatgtaccccaaattcgtgtttgaggactacatgaagctatatgctcaagtcaagtttcaaccaaaggagcctcgctttgaagctttcaagacaatggaagaccccattgcaaccgcttaa

SEQ ID NO: 24885 - protein, 313 aa, Helianthus annuus
MEEETFPVVNMEKLNGEERAATMNLINDACENWGFFEIVNHGISTELLDRVEKMTKGHYKKCMEDRFKEMVAAKGLEAVQTEIDDLDWESTFYLRHLPKSNISEIPDLEHDYREVMKEFAKELEKLAEAILDILCENLGLEKGYLKKVFYGGKGPTFGTKVSNYPPCPKPDLIKGLRAHTDAGGVILLFQDDKVSGLQLLKDDKWVDVPPMHHSIVVNLGDQLEVITNGRYKSVLHRVIAQTDGTGRMSLASFYNPGSDALIYPAPQLVNKEQDMYPKFVFEDYMKLYAQVKFQPKEPRFEAFKTMEDPIATA

SEQ ID NO: 24886 - DNA, 1053 bp, Helianthus annuus
  CDS (1)..(1053)
atggagtcaaagggtggtagattcggggcttcacttttggttccaagcgtacaagaacttgctaacgaacacttgatcaaggttccatcccgatatattcgcgatgatcaagaatctgtcataccatcatccatgcctcaagtacctatcatcgatatggaccgattaacatccgaagattccattgactctgaattagaaaatctacaccttgcttgtaaagattggggattctttcagataataaatcatgggattagtggttcattattggagaaagtaaagaaagaaacacaagaattctttaagttgccaattgaggtgaaaaagaagttttggcaaacgtctgaagatgttgagggatttggacaagcctttgttgtatctgaggagcaaaaactcgattgggctgatatgtttttcttggttactcttcctcctcatagtcgaaggcctcgcttatttcctaacctacctcttccattccgagatatcttagatgaatattcaagagagataatgaatacagcgaaaaaaactttgctctacattgcaaaagcattaaagatggaaaccaaggatttgatggtattgtttgaggaaggaatgcaatcaatgaggatgaactactatccaccatgtccacaacccgaacaagtcattggtcttaccccacactctgatgcggttgggatcaccttccttctcgaactaaatgaagtacatggtctccaaataagaaaagatggcatttggatcccaattataccactcccaaatgctttcattgttaatattggagagatcctagagattgtgacaaacggacaatataaaagcgttgaacatagagctacagtgaactcagaaagagagaggctgtctatagccacatttatcaacccaaaggatggtgaaataggaccagcaccaagcatagtgacgccggaaacgccaccaaagtttactagggtgacaacttctgattttttcaagaacttattctctaaggaacttaaacgtaaatcaaaccttgaacaatactatatatag

SEQ ID NO: 24887 - protein, 350 aa, Helianthus annuus
MESKGGRFGASLLVPSVQELANEHLIKVPSRYIRDDQESVIPSSMPQVPIIDMDRLTSEDSIDSELENLHLACKDWGFFQIINHGISGSLLEKVKKETQEFFKLPIEVKKKFWQTSEDVEGFGQAFVVSEEQKLDWADMFFLVTLPPHSRRPRLFPNLPLPFRDILDEYSREIMNTAKKTLLYIAKALKMETKDLMVLFEEGMQSMRMNYYPPCPQPEQVIGLTPHSDAVGITFLLELNEVHGLQIRKDGIWIPIIPLPNAFIVNIGEILEIVTNGQYKSVEHRATVNSERERLSIATFINPKDGEIGPAPSIVTPETPPKFTRVTTSDFFKNLFSKELKRKSNLEQYYI

SEQ ID NO: 24888 - DNA, 1029 bp, Brassica napus
  CDS (1)..(1029)
atggaaacagcgtcgagagtcgaagcagttaccaaaggcggcttgcctgtagtcccttcccagtacatccaaccaccggaagctcgccccaacctccaccacgccggcgacgctgctccaatcccaaccatcgacctctctaactccgattccgcaaaagaatcaatcggcgaagcttgccgcaactggggagccttccacgtggtcaaccatggcgtccccatccatctcctcgatcgaatgaaggctctaggcctatccttcttccaagactgtccattggaagacaagctccaatacgcctgcgactcaacctccgccgcctccgaaggttacggaagccgcatgctcctcggagccgaaggcgacgtcgttttggattggagagactacttcgatcaccacacgttccctctctctcgccgcaacccttctcattggccgttacgtcctcctcactacagacaagtagtggaagagtatggtaatgagatgaagaaactagctcagaagctgttggggataatctcagagagcttgagtcttccatgctcatctatagaggaagctgttggagaaatctatcagaacattaccatgagttattaccctccttgtcctcagcctgagcttactcttggtctccagtcacattcagacatgggtgccatcactctcttgattcaagatgatgttggtggtcttcagctttacaaggatgatcaatggctaactgttcctcctatctctcacgccattcttgttcttatagccgaccaaaccgagatcataaccaatggcgtatacaaaagtgctcaacatagagcagtgactaatgcgaacagggcgaggttgtcagttgcgacgtttcatgatccttccaagactgcaaggatagcaccagcttctcaccttattgggcaacataccaaaccggcttacaaggaagttgtgtacggccagtatgtttcttcttggtactcaaagggtcctgtgggcaaacgaaaccttgacgctctcctctgctaa

SEQ ID NO: 24889 - protein, 342 aa, Brassica napus
METASRVEAVTKGGLPVVPSQYIQPPEARPNLHHAGDAAPIPTIDLSNSDSAKESIGEACRNWGAFHVVNHGVPIHLLDRMKALGLSFFQDCPLEDKLQYACDSTSAASEGYGSRMLLGAEGDVVLDWRDYFDHHTFPLSRRNPSHWPLRPPHYRQVVEEYGNEMKKLAQKLLGIISESLSLPCSSIEEAVGEIYQNITMSYYPPCPQPELTLGLQSHSDMGAITLLIQDDVGGLQLYKDDQWLTVPPISHAILVLIADQTEIITNGVYKSAQHRAVTNANRARLSVATFHDPSKTARIAPASHLIGQHTKPAYKEVVYGQYVSSWYSKGPVGKRNLDALLC

SEQ ID NO: 24890 - DNA, 1077 bp, Brassica napus
  CDS (1)..(1077)
atggctccaggtactctaactgagcttgccggagagactaagctcaactctaagttcgtccgggacgaggatgaacgtcccaaggttgcctacaatgagtttagcacggagatccccgtgatctctctcgccggaatcgacgatgttggtgggaaaagaggagagatctgtcgtcagatcgttgaggcttgtgagaactggggtgtttttcaggtggtcgatcatggagtggatactagtttggtggccgatatgactcgtctcgctcgagacttcttcgccttacctcctgaggagaaactaaagttcgacatgtccggtggtaaaaaaggaggattcattgtctctagtcatcttcagggagagtctgttcaagactggagagagatcgtgacgtatttctcgtacccggtgagaaacagagactactcacggtggccgactaagccggaaggatgggtgaaagtgacggaggagtacagcgagaggctgatgggtttggcttgtaaacttcttgaggttttgtctgaagctatggggcttgagaaagaggcacttaccaatgcatgcgtcgacatggaccaaaaaatagttgttaactattatccaaaatgccctcagcctgatctaaccctcggactcaagcgtcacactgaccctggaaccatcactttgctgctccaagaccaagtcggtggtttacaagccacacgagacgatgggaagacatggattacagttcagcctgttgaaggagcttttgttgttaatcttggagaccatggtcactatctgagcaacgggaggttcaagaacgctgaccaccaggcggtggtgaactccaactcgagcagactatcaatagccacgttccagaatccggcgccggaagcaaccgtgtatccgcttaaagtgagagaaggagagaagccgatcttggaggagccaattacgtttgcggagatgtataagagaaagatgagtagagatatcgagctggctcgcctcaagaagctggcgaaagaagaacatgaccacaaggaagctgccaagcctctagaccaaatcatcgcttag

SEQ ID NO: 24891 - protein, 358 aa, Brassica napus
MAPGTLTELAGETKLNSKFVRDEDERPKVAYNEFSTEIPVISLAGIDDVGGKRGEICRQIVEACENWGVFQVVDHGVDTSLVADMTRLARDFFALPPEEKLKFDMSGGKKGGFIVSSHLQGESVQDWREIVTYFSYPVRNRDYSRWPTKPEGWVKVTEEYSERLMGLACKLLEVLSEAMGLEKEALTNACVDMDQKIVVNYYPKCPQPDLTLGLKRHTDPGTITLLLQDQVGGLQATRDDGKTWITVQPVEGAFVVNLGDHGHYLSNGRFKNADHQAVVNSNSSRLSIATFQNPAPEATVYPLKVREGEKPILEEPITFAEMYKRKMSRDIELARLKKLAKEEHDHKEAAKPLDQIIA

SEQ ID NO: 24892 - DNA, 1095 bp, Brassica napus
  CDS (1)..(1095)
atggtgaccaaaaaatctgttgaattcgatccttatatcgaacgaaaggctttcgatgagacgaaagaaggagtcaaagggctggtcgacgctaaaatcaccgaagtcccacgtatcttccatgtccctcaagattccttgaccgacaagaaaccctctgtttcagacctagagatccctaccatcgactttgcaagcgtccacgtcgacacagcgtcacgtgaagccgtggtagagaaggtcaaacacgcggcggagaagtggggattcttccaggtgaccaatcatggtattccattgaacgttcttaaagagattgaagacggaagtcgtaggtttcacgaggaagatccagaggtcaagaaacgatatttctcgcgtgatttcaacaacaaaaaatttgtgtacaacagtaacttcgatctatacagtgcttctccatctgttaactggagagatactttctcttgttacatagctccagatcctccacctcctgaggatctcccagtggcttgcagggatgctatgatcgaatacacaaagcatgtgatgagtttaggtgatttgctatttgaacttctttcagaagcactaggtttaaaatctgagaccttgaagagcatggattgcttgaagagtttgcttatgatctgcaattattacccaccttgtccacaacctgacctaacgatggggataagtcaacactcagacaactctttcctcaccattcttcttcaagacaacatcggcggtcttcaaattcttcatcaagattcttgggtcgatgtctctcctattccaggagctcttgtcatcaacatgggagatttcttgcagctgataacgaacgataaatttgtaagcgccaaccatagagtgcctgcgaacagacaaggaccaaggatttcaatagcaagctttttcagctcaagtaaacaccccaattcaacagtttatggaccaatgaaagagcttgtgactgaagaaaaccctccaaaatacaaagacataaccataaaagaatacacagaaggatactttgagaaaggtctggatggaacatcacatctcttgaatttcaggatatga

SEQ ID NO: 24893 - protein, 364 aa, Brassica napus
MVTKKSVEFDPYIERKAFDETKEGVKGLVDAKITEVPRIFHVPQDSLTDKKPSVSDLEIPTIDFASVHVDTASREAVVEKVKHAAEKWGFFQVTNHGIPLNVLKEIEDGSRRFHEEDPEVKKRYFSRDFNNKKFVYNSNFDLYSASPSVNWRDTFSCYIAPDPPPPEDLPVACRDAMIEYTKHVMSLGDLLFELLSEALGLKSETLKSMDCLKSLLMICNYYPPCPQPDLTMGISQHSDNSFLTILLQDNIGGLQILHQDSWVDVSPIPGALVINMGDFLQLITNDKFVSANHRVPANRQGPRISIASFFSSSKHPNSTVYGPMKELVTEENPPKYKDITIKEYTEGYFEKGLDGTSHLLNFRI

SEQ ID NO: 24894 - DNA, 1077 bp, Brassica napus
  CDS (1)..(1077)
atggttgcagttgaaagagttgagagcttagcaaaaagcggaatcaactcaatcccaaaagaatacatccgtccaaaagaagagctcgagagcatcaacgacgtgttccaagaagagaagaaagaagacggtccacaagtccccaccatcgatctccaagacatcgagtcagaagacgaaaccatccgtgaaaaatgcatagaggagctcaagaaggcggctatggattggggagtgatgcatttgatcaaccatggtatacctgttgatctaatggagcgtgtgaagaagtcaggagaagagttcttcggtttgcccgtggaagagaaggagaagtatgcaaacgatcaagccaacggaaagattcaagggtatggaagcaagttagctaataacgcgagtggacagcttgagtgggaagattacttctttcatcttgtgtatcctgaagacaagagagatctctcactttggcctaagacaccaactgattacattgaagctacgagtgagtacgctaagtgtcttcgtttgctagcaacaaaagtcttcaaggctctctctatcgccctaggcttagagcctgaccgtctagagaatgaagtgggcggtatagaagagcttctgctccaaatgaagatcaattactacccaaaatgccctcagcctgagctagcactaggcgtggaagctcacacagatgtaagcgctttgaccttcattctacacaacatggttccgggtttgcagctgttctacgagggtaaatgggtcattgcaaaatgtgttcctgattcgattgtgatgcatattggagatacgttggagattcttagtaatgggaggtttaagagtatacttcaccgtggattggtgaacaaggagaaggtaaggatttcttgggctgtgttttgtgaaccaccaaaggataagattgttcttaagccgttgccggagatggtgagtgttgagtctccggctaagtttcctccaaggacgtttgctcagcatattgagcataagttgtttaggaacaagcaagaggagttggtaactgagaaaaaggatgaagtctga

SEQ ID NO: 24895 - protein, 358 aa, Brassica napus
MVAVERVESLAKSGINSIPKEYIRPKEELESINDVFQEEKKEDGPQVPTIDLQDIESEDETIREKCIEELKKAAMDWGVMHLINHGIPVDLMERVKKSGEEFFGLPVEEKEKYANDQANGKIQGYGSKLANNASGQLEWEDYFFHLVYPEDKRDLSLWPKTPTDYIEATSEYAKCLRLLATKVFKALSIALGLEPDRLENEVGGIEELLLQMKINYYPKCPQPELALGVEAHTDVSALTFILHNMVPGLQLFYEGKWVIAKCVPDSIVMHIGDTLEILSNGRFKSILHRGLVNKEKVRISWAVFCEPPKDKIVLKPLPEMVSVESPAKFPPRTFAQHIEHKLFRNKQEELVTEKKDEV

SEQ ID NO: 24896 - DNA, 1140 bp, Brassica napus
  CDS (1)..(1140)
atggcaatgggatgcatcacagctctccctcaaagattcagtgaaaacaaaaccaaagaggatccttcaatcttcgatgcaaatttcctgaaccagcagtctaaccacatacctcaacagttcgtatggcccgaccacgagaaaccttcctcggatgttcaacctctccaagtccctctcatagacctcgacggtttcctctctggtgacccgttcttagtctcggaggctactagactcgtctctgaggcttcaaagaaacatggtttcttcctagtcactaaccatggcgtcgatgacacgctcttgtctcgtgcccatctatccatggactctttctttaaggcacccgcttctgagaaacagaaggccaagaggacgtggggcgagagctccggttacgctagtagcttcgttgggagatactcctctaagctcccgtggaaggaaacgctgtcgtttaagttctctcccgaggagaagtgccattcccaaaacatcaaagactttgtttctgaaaaaatgggagatgaatatgaagatttcggaaaggtttatcaagaatacgctgaggccatgaacattctctcactaaagatcatggagcttcttggaatgagtcttgggatcgagaggagacattttagagacttttttgaagacaacgagtcaatattaaggttgaattactacccgcagtgcaagcaaccggagctggcattagggacaggacctcactgcgacccaacatctctaacaatacttcatcaagaccaagtcgatggtcttcaagttttcgtggacaacaaatggcaatccattcctcctaaccctcaatcagtcgtggtcaacataggcgacaccttcatggcgttaacaaatggtatatacaagagttgtttacatcgagcggtggtgaacagcgagaaggataggaaaacattggcattcttcctatgcccgaaaaaagacaaaatagtgaagccaccagaagaactagtaagaatgatgtctggtgaaagagagtatcctgattttacatggtctatgtttcttgagttcacacaaaagcattatagatcagacatgaacactcttgaagagttctcaaattggcttaagaacagaagaagtttctaa

SEQ ID NO: 24897 - protein, 379 aa, Brassica napus
MAMGCITALPQRFSENKTKEDPSIFDANFLNQQSNHIPQQFVWPDHEKPSSDVQPLQVPLIDLDGFLSGDPFLVSEATRLVSEASKKHGFFLVTNHGVDDTLLSRAHLSMDSFFKAPASEKQKAKRTWGESSGYASSFVGRYSSKLPWKETLSFKFSPEEKCHSQNIKDFVSEKMGDEYEDFGKVYQEYAEAMNILSLKIMELLGMSLGIERRHFRDFFEDNESILRLNYYPQCKQPELALGTGPHCDPTSLTILHQDQVDGLQVFVDNKWQSIPPNPQSVVVNIGDTFMALTNGIYKSCLHRAVVNSEKDRKTLAFFLCPKKDKIVKPPEELVRMMSGEREYPDFTWSMFLEFTQKHYRSDMNTLEEFSNWLKNRRSF

SEQ ID NO: 24898 - DNA, 939 bp, Brassica napus
  CDS (1)..(939)
atggcggttcctgtgattgatttctccaagatcaatggtgacgaaagagagaagacactctctgaaatcgctaaagcttgcgaagaatggggatttttccagctggtgaaccatgggattccattggagcttcttgaaaaggtgaagaagctaagctcagagtgctacaaaacagagagagaagaagcattcaagacctcaacacccgtgaagctactcaacgacctgcttcagaaaaactccacagagaaactcgaaaacgttgactgggaagataacttcactctcttagaccacaaccaaaacgaatggccatccaacacttctggcctcaaagagacgatggtagaatacagaggagaagtgaggaagctagcgagcaagatgatggaagtgatggacgagaacttgggtttgcctaaaggttacataaagaaagcttttaacgaagggatggaagatggagaagagacggctttctttggaaccaaagtcagccattacccaccttgtcctcgtcctgagctcgtcaatggtcttagagctcataccgatgcaggaggtgtggttttgctgttccaagacgatgagtacgatggtcttcaggtgttgaaagatggagagtggatcgatgttcagccgatgcctaatgctattgttatcaacactggtgatcagattgaggttcttagcaacggaaggtacaagagtgcatggcacagagtgttggccagggaaaaaggaaacaggaggtcaatagcttccttctacaacccgtcgtacaaggcggccattgggccaccggagatgacggcagcggcggaggaaggaagtgagaagaagtatccaaagtatgtgtttggagattatatggatgtctatgcaaaccagaagttcatgcctaaagagcctcgttttctagctgtaaagactctctga

SEQ ID NO: 24899 - protein, 312 aa, Brassica napus
MAVPVIDFSKINGDEREKTLSEIAKACEEWGFFQLVNHGIPLELLEKVKKLSSECYKTEREEAFKTSTPVKLLNDLLQKNSTEKLENVDWEDNFTLLDHNQNEWPSNTSGLKETMVEYRGEVRKLASKMMEVMDENLGLPKGYIKKAFNEGMEDGEETAFFGTKVSHYPPCPRPELVNGLRAHTDAGGVVLLFQDDEYDGLQVLKDGEWIDVQPMPNAIVINTGDQIEVLSNGRYKSAWHRVLAREKGNRRSIASFYNPSYKAAIGPPEMTAAAEEGSEKKYPKYVFGDYMDVYANQKFMPKEPRFLAVKTL

SEQ ID NO: 24900 - DNA, 1134 bp, Brassica napus
  CDS (1)..(1134)
atggaatgcatcacaaagctccctttcaatgaaaatgaaaccgaagatagccttttgacgacctttgattcaatggtcctacatgatcaagaaaaccaagtacctcaagagtttgtatggcccgaccatcagaaaccctctccaaacgttccaatcctccaagtccctctcattgaccttgctggcttcctctccgaggacccattcttggtctcggaggctacaagacttgtggcagaaggtgcaaagcaacatggtttcttcttggtcaccaaccatggagtcgatgagaggctcctgtccagtgcctatacatctatggacaaattctttttgtcaccgacttgtgagaaacagaaggctctgggggagtggcgtgaaagctggggttacgctaatagctatttcgggaaatacaagaagaatctaccctggaaggaaatgctgtcgttttctttctccccggaggagaagaccgataaccactctcaaatcgtcaaagatttcattattgaaaaaatgggtgacggatacaatgattttgggagggtatatcaagaatacggcgaggccatgagcaatctctcattgaagatcatggagcttcttggaatgagtcttggccttaatagaagccatttcaaagatttttttgaagacaatgaatcgatattgagattgaattactatccaaagtgcaagcaaccagatgttgtactagggacaggaccacactgcgacccaacctccctaaccatacttcaacaagaccacgtcagtggtcttcaagttttagtggacaaccaatggcattcagtccctcctaaccctcaagcgttggtggttaacattggcgacactttcagggctcttaccaacggaatatacaagagttctttgcatcaggcggtagtgaatagcgagacggaaagaaagacaattgcattcttcctatctccaaaagtggacaaagtggtgaagccaccagaggaattagaaagtaaaagagtgtatccagattttacatggtctatgcttcatgagttcgtaaagaaacactataaaacagacgagaacacgcttgaagagttcacaaaatggctcaaaaaggcggaaacctctaatgaaggataa

SEQ ID NO: 24901 - protein, 377 aa, Brassica napus
MECITKLPFNENETEDSLLTTFDSMVLHDQENQVPQEFVWPDHQKPSPNVPILQVPLIDLAGFLSEDPFLVSEATRLVAEGAKQHGFFLVTNHGVDERLLSSAYTSMDKFFLSPTCEKQKALGEWRESWGYANSYFGKYKKNLPWKEMLSFSFSPEEKTDNHSQIVKDFIIEKMGDGYNDFGRVYQEYGEAMSNLSLKIMELLGMSLGLNRSHFKDFFEDNESILRLNYYPKCKQPDVVLGTGPHCDPTSLTILQQDHVSGLQVLVDNQWHSVPPNPQALVVNIGDTFRALTNGIYKSSLHQAVVNSETERKTIAFFLSPKVDKVVKPPEELESKRVYPDFTWSMLHEFVKKHYKTDENTLEEFTKWLKKAETSNEG

SEQ ID NO: 24902 - DNA, 1026 bp, Brassica napus
  CDS (1)..(1026)
atggcagcaaagctaatatccaccggttttcgtcacactactttgccggaaaactatgtccggccactctccaaccgtccatgtctctccgacgtctctccacttgaagatttccctatcatcgatctatcttccacagatcgatctcggctcgtccaacaaatccaccaagcttgctcccgatttggattttttcaggtcataaatcacagagttagcaaagaaacaatagatggaatggtgagtgttgcgaacgagttctttagcatgtctatggaggaaaaaatgaagctgtactcggacgatccaacgaagacgacgagattatcaacgagcttcaatgtgaaaaaagaagaggtcaacaattggagagactatcttagactacattgttatcctatcaacaagtatgtccatgagtggccttcaaacccaccttctttcaaggaagttgtgagtaaatacagtacagaaataagagaactgggatttaaaatagaggaactgatatcagagagcctaggtttagaaaaagatcacatgaagaaagtgcttgccgaacaaggtcaacacatggcagacaactattaccctccatgtcctgagcctgagctcacctatggtttacctgctcataccgacccaaatgccctcaccattcttctccaagatgctaccgtttgcggtctccagatcttgatcgacggtcactggtttgctgttaatcctcgtcctgatgcttttgtcatcaacattggtgaccagttgcaggcattgagtaacggagtatacaaaagtgtttggcatcgagcagtgacaaacactgaaaacccgagactatcgatcgcatcatttatgtgccctgataacggtgctgtcataagcccggcaaagcccttgtgggaagccaaggaggaagaggccaagccagtctacagagactacacttatgcagagtactacaagaagttttggagtaggaatctggaccaagaacattgccttgagaactttctaaaccactag

SEQ ID NO: 24903 - protein, 341 aa, Brassica napus
MAAKLISTGFRHTTLPENYVRPLSNRPCLSDVSPLEDFPIIDLSSTDRSRLVQQIHQACSRFGFFQVINHRVSKETIDGMVSVANEFFSMSMEEKMKLYSDDPTKTTRLSTSFNVKKEEVNNWRDYLRLHCYPINKYVHEWPSNPPSFKEVVSKYSTEIRELGFKIEELISESLGLEKDHMKKVLAEQGQHMADNYYPPCPEPELTYGLPAHTDPNALTILLQDATVCGLQILIDGHWFAVNPRPDAFVINIGDQLQALSNGVYKSVWHRAVTNTENPRLSIASFMCPDNGAVISPAKPLWEAKEEEAKPVYRDYTYAEYYKKFWSRNLDQEHCLENFLNH

SEQ ID NO: 24904 - DNA, 963 bp, Brassica napus
  CDS (1)..(963)
atggagcaaaccattaagtttccagttgtaaacttgtccaagctcaatggtgaagaaagagaccaaaccatggctttaatcaacgatgcttgcgaaaattggggcttctttgagatagtgaaccatgggttaccacatgatttgatggacaacgtcgagaagatgacaaaggaacattacaagaaatcaatggaacaaaagttcaacgacatgctcaaatcaaaaggtttggaaaagcttgagacagaagttgaggatgttgattgggaaagcactttctaccttcgtcatctccctcagtccaatctctacgacattcctgatatgtctgatgaataccggacggccatgaaagattttggaaagagattggagaatcttgctgaggatttgttggatctattgtgtgagaatttagggttagagaaagggtacttgaagaaagtgtttcatggaacaaaaggtccaacctttgggactaaggtgagcaactatccagcttgtcctaagccagagatgataaaaggtcttagggcccacactgatgcaggaggcatcatcttgttgtttcaagatgacaaggtcagtggtctccagcttcttaaagatggtgactggattgatgttcctccactcaaccactctattgtcatcaatcttggtgaccaacttgaggtgataaccaacggcaggtacaagagtgtgatgcaccgtgtggtgactcagaaagaaggaaacagaatgtcaattgcatctttctacaacccgggaagcgatgctgagatctctccagcttcatcgcttgcctgtaaagaaaccgagtacccaagttttgtttttgatgactacatgaagctctatgctggggtcaagtttcagcctaaggagccacgctttgaggcgatgaagaatgctactgcagttacagaactgaacccagccgcatccgtagagactttctaa

SEQ ID NO: 24905 - protein, 320 aa, Brassica napus
MEQTIKFPVVNLSKLNGEERDQTMALINDACENWGFFEIVNHGLPHDLMDNVEKMTKEHYKKSMEQKFNDMLKSKGLEKLETEVEDVDWESTFYLRHLPQSNLYDIPDMSDEYRTAMKDFGKRLENLAEDLLDLLCENLGLEKGYLKKVFHGTKGPTFGTKVSNYPACPKPEMIKGLRAHTDAGGIILLFQDDKVSGLQLLKDGDWIDVPPLNHSIVINLGDQLEVITNGRYKSVMHRVVTQKEGNRMSIASFYNPGSDAEISPASSLACKETEYPSFVFDDYMKLYAGVKFQPKEPRFEAMKNATAVTELNPAASVETF

SEQ ID NO: 24906 - DNA, 1077 bp, Brassica napus
  CDS (1)..(1077)
atggaagccaatggagcaagtaagcatcatagctctattatagtcccatctgttcaagagatggtgaagaagaagctgaccaagaaggttcctcagaggtatgtacggtctgatctagacaaagctgagatcgactgtgactctggtctaaaaaccgagatcccaatcatcgacatgaacctcttgtgttcttcaacctccatggattctgagattgaaaagctcgacttggcatgcaaagaatggggatttttccagcttgtaaaccatggaatggactcaggcttcttggacaaattcaagtcagagattcaagatttcttcaaccttcccatggaagagaagaagaaactgtggcaacaaccaggtgacatcgaagggtttggacaagcttttgtggtttcagaagagcagaaactcgattgggcagacatgttcctcctcacaatgcaacctgttcaattacgcaagcctcacttgttccccaagttacctcttccctttagagatacactagagacgtattcagctgaagtgaaaagcatagctaagatcttattagcgaaaatggcgagggccttgaagatcaaacctgaggaaatggagaagttgtttgatgatgacttaggacagaaaatgaggatgaattactaccctccttgtccagagcccgatcaggttattggtctaactccacattcagatgctacaggactcaccatccttttgcaggttaatgaagtggaaggtctccagatcaagaaaaatggcaagtgggttccagtcaaacctctcccaaatgctttcgttgtcaatattggagacatgttagagatcataacgaatgggacatacagaagtatagagcatcgtggggttgtgaactcggagaaagagaggctttctgtggcggcgtttcacaatatgggaatgggtaaagaagttggtccgctgagaagtctcgtggaaaggcaaaagggtgcatttttcagaagtgtgaccactgaagagtatttcaagggcttgttctcacgtgagctagatggaaaagcttaccttgatgttatgagaatctaa

SEQ ID NO: 24907 - protein, 358 aa, Brassica napus
MEANGASKHHSSIIVPSVQEMVKKKLTKKVPQRYVRSDLDKAEIDCDSGLKTEIPIIDMNLLCSSTSMDSEIEKLDLACKEWGFFQLVNHGMDSGFLDKFKSEIQDFFNLPMEEKKKLWQQPGDIEGFGQAFVVSEEQKLDWADMFLLTMQPVQLRKPHLFPKLPLPFRDTLETYSAEVKSIAKILLAKMARALKIKPEEMEKLFDDDLGQKMRMNYYPPCPEPDQVIGLTPHSDATGLTILLQVNEVEGLQIKKNGKWVPVKPLPNAFVVNIGDMLEIITNGTYRSIEHRGVVNSEKERLSVAAFHNMGMGKEVGPLRSLVERQKGAFFRSVTTEEYFKGLFSRELDGKAYLDVMRI

SEQ ID NO: 24908 - DNA, 1101 bp, Brassica napus
  CDS (1)..(1101)
atggtgaccaaaacatcgatcgagttcgatccttatacggagcgtaaagctttcgatgagaccaaagaaggagtaaaagggctggtcgacgctaaaatcgccgaagtccctcgtatcttccatgttcctcaagcttccttgaccgaaaagaaaccttctgtctctgtttcagatctagagatccctatcatcgactttgcaagcgtccacgtggacacagcgtcacgtgaagccgtggtagagaaggttaaatacgcggcggagaagtggggattcttccaagtcatcaaccatggtgttcctttgaacgttcttgaagagattcaagatggagttcgtaggtttcacgaggaagatcctgaggtcaagaaacaatacttcacccgtgataacgccaacaaaaagtttgtctacaatagtaactttgatctatacagttcctcgccatctgttaactggagagatactttcacttgttacatagctccagatcctccatctcctgaggaactcccagtgacttgcagggatgctgtgttcgaatactcaaaacatgtgatgagtttaggtggtttactctgcgaacttttttcagaagcactaggtctagaatctgagatacttaagagcaaggggtgcttgaagggtttgtctatgctctgccattactacccaccttgtccacaacctgacctaactttgggggtaagtaaacactcagacaactccttcctcacggttcttcttcaagacaacatcggtggtctacaaattcttcatcaagactcttgggttgatgtggctcctcttcctggagctctcgtcatcaacattggagatttcttgcagctgataacgaacgataagtttgtaagtgtggagcatagggtgcttgcgaatagacaaggaccaaggatatcaattgcaagcttttttagctcaagtaaacatgccaattccacagtttatggaccaatgaaagagcttgtatctgaagaaaaccctccaaaatacagagacataaccataaaagaatacacagaaggatacaacaagaaaggtctggatggaacatcacatctcttgaatttcaggatatga

SEQ ID NO: 24909 - protein, 366 aa, Brassica napus
MVTKTSIEFDPYTERKAFDETKEGVKGLVDAKIAEVPRIFHVPQASLTEKKPSVSVSDLEIPIIDFASVHVDTASREAVVEKVKYAAEKWGFFQVINHGVPLNVLEEIQDGVRRFHEEDPEVKKQYFTRDNANKKFVYNSNFDLYSSSPSVNWRDTFTCYIAPDPPSPEELPVTCRDAVFEYSKHVMSLGGLLCELFSEALGLESEILKSKGCLKGLSMLCHYYPPCPQPDLTLGVSKHSDNSFLTVLLQDNIGGLQILHQDSWVDVAPLPGALVINIGDFLQLITNDKFVSVEHRVLANRQGPRISIASFFSSSKHANSTVYGPMKELVSEENPPKYRDITIKEYTEGYNKKGLDGTSHLLNFRI

SEQ ID NO: 24910 - DNA, 1140 bp, Brassica napus
  CDS (1)..(1140)
atggcaatgggatgcatcacagctctccctcaaagattcagtgaaaacaaaaccaaagaggatccttcaatcttcgatgcaaatttcctgaaccagcagtctaaccacatacctcaacagttcgtatggcccgaccacgagaaaccttcctcggatgttcaacctctccaagtccctctcatagacctcgacggtttcctctctggtgacccgttcttagtctcggaggctactagactcgtctctgaggcttcaaagaaacatggtttcttcctagtcactaaccatggcgtcgatgacacgctcttgtctcgtgcccatctatccatggactctttctttaaggcacccgcttctgagaaacagaaggccaagaggacgtggggcgagagctccggttacgctagtagcttcgttgggagatactcctctaagctcccgtggaaggaaacgctgtcgtttaagttctctcccgaggagaagtgccattcccaaaacatcaaagactttgtttctgaaaaaatgggagatgaatatgaagatttcggaaaggtttatcaagaatacgctgaggccatgaacattctctcactaaagatcatggagctgcttggaatgtgtcttgggatcgagaggagacattttagagacttttttgaagacaatgagtcaatattaaggttgaattactatccgcagtgcaagcaaccggagcttgcattagggacaggacctcactgcgacccaacatctctaacaatacttcatcaagaccaagtcgatggtcttcaagttttcgtggacaacaaatggcaatccattcctcctaaccctcaatcagtcgtggtcaacataggcgacaccttcatggcgttaacaaatggtatatacaagagttgtttacatcgagcggtggtgaacagcgagaaggataggaaaacattggcattcttcctatgcccgaaaaaagacaaaatagtgaagccaccagaagaactagtaagaatgatgtctggtgaaagagagtatcctgattttacatggtctatgtttcttgagttcacacaaaagcattatagatcagacatgaacactcttgaagagttctcaaattggcttaagaacagaagaagtttctaa

SEQ ID NO: 24911 - protein, 379 aa, Brassica napus
MAMGCITALPQRFSENKTKEDPSIFDANFLNQQSNHIPQQFVWPDHEKPSSDVQPLQVPLIDLDGFLSGDPFLVSEATRLVSEASKKHGFFLVTNHGVDDTLLSRAHLSMDSFFKAPASEKQKAKRTWGESSGYASSFVGRYSSKLPWKETLSFKFSPEEKCHSQNIKDFVSEKMGDEYEDFGKVYQEYAEAMNILSLKIMELLGMCLGIERRHFRDFFEDNESILRLNYYPQCKQPELALGTGPHCDPTSLTILHQDQVDGLQVFVDNKWQSIPPNPQSVVVNIGDTFMALTNGIYKSCLHRAVVNSEKDRKTLAFFLCPKKDKIVKPPEELVRMMSGEREYPDFTWSMFLEFTQKHYRSDMNTLEEFSNWLKNRRSF

SEQ ID NO: 24912 - DNA, 966 bp, Brassica napus
  CDS (1)..(966)
atggagaaaaacattaagtttcctgttgtagacttgtctaagctaaatggtgaagagagagaccaaaccatggctttgatcgacgatgcttgtcaaaactggggcttctttgagctgctaaaccatggaataccatatgatcttatggacaatattgagaggatgacaaaggaacactacaaaaaatttatggaacaaaagttcaaagaaatgcttcgttccaaaaatttagatactctggagactgaagttgagaatgttgattgggaaagtactttcttccttcaccatcttcctcagactaatctctacgacatccccgatatgtcagatgaataccgagcggccatgaaggactttgggaagaggctagagaacctagcggaagaactgttggatttgttgtgtgagaatctagggttggagaaagggtacttgaagaaggtgtttcgtgggacaaatggtccaacttttgggacaaaagttagcaactatccaccatgtcctaaaccggagatgatcaaagggcttagggctcacacggatgcaggaggcctcatattgctatttcaagacgataaggtcagtggacttcagcttctcaaagatggtgtttgggttgatgtccctcctctcaaacactccattgtcatcaatcttggtgaccaacttgaggtgataaccaacgggaagtacaagagcataatgcaccgtgtgatgacacaaaaagaaggaaacaggatgtctatagcgtcgttctacaaccctggaagtgatgcggagatctctcccgcaccatctctagtggagaaagactctgatgaatatccgagttttgtgtttgatgactacatgaagctatatgctggagtcaaatttcagcccaaggagccacgttttgaggcgatgaagaatgttgcagcaaccacggatttgaacccggtggccacagtcgagacgttctaa

SEQ ID NO: 24913 - protein, 321 aa, Brassica napus
MEKNIKFPVVDLSKLNGEERDQTMALIDDACQNWGFFELLNHGIPYDLMDNIERMTKEHYKKFMEQKFKEMLRSKNLDTLETEVENVDWESTFFLHHLPQTNLYDIPDMSDEYRAAMKDFGKRLENLAEELLDLLCENLGLEKGYLKKVFRGTNGPTFGTKVSNYPPCPKPEMIKGLRAHTDAGGLILLFQDDKVSGLQLLKDGVWVDVPPLKHSIVINLGDQLEVITNGKYKSIMHRVMTQKEGNRMSIASFYNPGSDAEISPAPSLVEKDSDEYPSFVFDDYMKLYAGVKFQPKEPRFEAMKNVAATTDLNPVATVETF

SEQ ID NO: 24914 - DNA, 1218 bp, Brassica napus
  CDS (1)..(1218)
atgaacaaccaagacaaaatcatgatcgagaaggagaccaccgacaagatcgagatcaagaccaagaacggcctcaacgaacaagaacaggaagtcaagatggacaacatgagcgacctagacaaaaccacgaatggcctcggcgaaaaatggccagaaccaatcatccgagtgcagtccctggccgagagcaacctcgccaccgtccccgaccgtttcatcaagccgccatctcaacgccctaatgaaaccatcactatcaaccaacaaccggaagatggcgccataaatatcccagtcatagacctaagcagcatcttatccggcaaccaagaggaaaaggagaggatctcggaagcatgccgtgagtttggcttctttcaggtgatcaaccatggggtgaggccggagctgatggccgccgctagagaagcttggagaagcttcttccatttgcctgtagaagccaaagaagcttactcaaactccccaagtacctatgaaggttacggaagcagattgggtgtggaaaaaggagcacttcttgattggaatgattattactttctaaattttcttcctcttgccttgaaggatctcaacaaatggccttctttaccatcaaacattagagaagtggtggacgagtacggtgaagaactagtgaagctaggcgagagacttatgaggatattatcgtcaaacttgggagtaaatgaagaacaacttcaagaagcatttggtggagaagactttagtgcatgtatgagggttaactattacccgaaatgccctcgaccagagcctgccctcggcctctcccctcattcagatcccggcggcattaccatcctcttgccggacgatcaagtcgccggccttcaagtccatcacggtgacacgtggattaccgtcaatgctctccccaacgcctttgccgtcaatctaggcgatcaaatgcagatactaagcaattcgatatacaagagttcggagcatcgagtgatagttaactcgcagaaagaaagggtttcacttgcattcttctataaccctaagagtgacattcctatccagccactggaacaacttatcagctctacaaatcctcctttatatcctcccatgtcctatgatcaatacagactcttcattcgaactcacggtccacgtggaaaatcctacgttgagtctcatgtatctcctcttgataattga

SEQ ID NO: 24915 - protein, 405 aa, Brassica napus
MNNQDKIMIEKETTDKIEIKTKNGLNEQEQEVKMDNMSDLDKTTNGLGEKWPEPIIRVQSLAESNLATVPDRFIKPPSQRPNETITINQQPEDGAINIPVIDLSSILSGNQEEKERISEACREFGFFQVINHGVRPELMAAAREAWRSFFHLPVEAKEAYSNSPSTYEGYGSRLGVEKGALLDWNDYYFLNFLPLALKDLNKWPSLPSNIREVVDEYGEELVKLGERLMRILSSNLGVNEEQLQEAFGGEDFSACMRVNYYPKCPRPEPALGLSPHSDPGGITILLPDDQVAGLQVHHGDTWITVNALPNAFAVNLGDQMQILSNSIYKSSEHRVIVNSQKERVSLAFFYNPKSDIPIQPLEQLISSTNPPLYPPMSYDQYRLFIRTHGPRGKSYVESHVSPLDN

SEQ ID NO: 24916 - DNA, 1077 bp, Brassica napus
  CDS (1)..(1077)
atggttgaagtagaaagagtcgagaatttagcaaagagcggaatcaaatcgatcccaaaagaatacatccgtccaaaagaagagctggagagcatcaacgacgttttccaagaagagaagaaagaagacggccctcaagtccccaccatcgacttacaaaacatcgagtcagaagatgaaacgctccgtgagcaatgcatagaggagctcaagacggctgctatggactggggagtgatgcatctggtcaaccacggcgtaccggttgacctgatggagcgtgtgaagaaagcaggagaagagttcttcggtttacccgtggaggagaaggagaagtacgcaaacgatcaagccacaggaaagatccaagggtatggaagtaaattagctaacaacgcgagtggacagctagagtgggaagactacttcttccatcttgtttatcctgaagacaagagagatctctcactttggcccaagacaccaagtgattacattgaagcgacgagtgagtacgctaagtgtcttcgtttgctagcaacaaaagtcttcaaggctctctctatcggtctaggcttagagcctgaccgtctagagaaagaagtgggcggtttagaagagcttctcctccaaatgaagataaactattacccgaaatgccctcagcctgagctagcacttggcgtggaagctcacaccgatgtaagcgctttgaccttcattctacacaacatggttccgggtttgcagctgttctacgagggtaaatgggtcattgcaaaatgtgttcctgattcgattgtgatgcacattggagatacgttggagattcttagtaatgggaagtttaagagtatacttcaccgtgggttggtgaacaaggagaaggtaaggatttcttgggctgtgttttgtgaaccaccaaaggataagattgttcttaagccgttgccggagatggtgagtgttgagtctccggctaagtttcctccaaggacgtttgctcagcatattgagcataagttgtttaggaacaagcaagaggagttggtaactgagaaaaaggatgaagtctga

SEQ ID NO: 24917 - protein, 358 aa, Brassica napus
MVEVERVENLAKSGIKSIPKEYIRPKEELESINDVFQEEKKEDGPQVPTIDLQNIESEDETLREQCIEELKTAAMDWGVMHLVNHGVPVDLMERVKKAGEEFFGLPVEEKEKYANDQATGKIQGYGSKLANNASGQLEWEDYFFHLVYPEDKRDLSLWPKTPSDYIEATSEYAKCLRLLATKVFKALSIGLGLEPDRLEKEVGGLEELLLQMKINYYPKCPQPELALGVEAHTDVSALTFILHNMVPGLQLFYEGKWVIAKCVPDSIVMHIGDTLEILSNGKFKSILHRGLVNKEKVRISWAVFCEPPKDKIVLKPLPEMVSVESPAKFPPRTFAQHIEHKLFRNKQEELVTEKKDEV

SEQ ID NO: 24918 - DNA, 1062 bp, Brassica napus
  CDS (1)..(1062)
atgggagtactcgacgaagcttttatccaagctccagaacacagacccaaaactcatctcacaaactccggtgactacattctctccaacgagatcccgaccatcgatctctcctctctccaagacccacactgcgacaagacagcgctagcggcagagattgcagaagcatgcatgagatggggctttttccaggtgatcaaccatggtttgtcgttggacttaatgcgtagggtggagaagacggtggccgagtttttcagtctaacgttggaggagaagagaagagtgaaaagagatgaagtgaaccctatgggttatcacgacggagaacataccaaaaacgttagagactggaaagagattttcgatttctttctgcaggactcgacgacggttccggcgactacagagccggaagataccgagctcaggaagctgactaacccgtggcctcaaaacccttccgacttcagagaggtgtgccaagaatatgcaagagaagttgagaagttagctttcaagcttttggaacttatctccattagcttgggtctacccggtgatcggttaacaggttacttcaaggaccaaacaagctttttgcggtttaaccattaccctccttgcccgaacccggagctagcattaggcgttggacgccacgcagacgcaggagttataaccgtcttggcacaagatagtgtgggtgggttacaagtgagccgtagatcagatggacaatggttctctgtgaaacccaaccctgatgctttcatcattaacattggcaactgcatgcaggtatggacaaatgacaagtattggagtgcagaacatagagtggtagtgaattcaagcaaagagagattctcaatgccattcttccttttcccatcccacgataccaacattgagccattgaaggagcttataagcgaagacaacccgccttgttacaaaaagtacaattggggcaagttctttgctgcaagaaacagaagtgattacaagaagctccaaactgagagcatccagattgatcgcttcaaggccgcttaa

SEQ ID NO: 24919 - protein, 353 aa, Brassica napus
MGVLDEAFIQAPEHRPKTHLTNSGDYILSNEIPTIDLSSLQDPHCDKTALAAEIAEACMRWGFFQVINHGLSLDLMRRVEKTVAEFFSLTLEEKRRVKRDEVNPMGYHDGEHTKNVRDWKEIFDFFLQDSTTVPATTEPEDTELRKLTNPWPQNPSDFREVCQEYAREVEKLAFKLLELISISLGLPGDRLTGYFKDQTSFLRFNHYPPCPNPELALGVGRHADAGVITVLAQDSVGGLQVSRRSDGQWFSVKPNPDAFIINIGNCMQVWTNDKYWSAEHRVVVNSSKERFSMPFFLFPSHDTNIEPLKELISEDNPPCYKKYNWGKFFAARNRSDYKKLQTESIQIDRFKAA

SEQ ID NO: 24920 - DNA, 1059 bp, Brassica napus
  CDS (1)..(1059)
atgggacgattcgacgaagctttcatccaagctccggagcacagacccatcaatcatctcacaaactccggtgaattcattttctccgacgagatcccgaccatcgacctctcttctctccaagatcccaattgcgacaagacaacgatcgccacagagattggtaaagcttgcgagagatggggatttttccaggtgatcaaccacggcttgcctttagacctaaggcgtcgcgtagagaacacggcggccgaattcttcaacctaacggcggaggagaagagaagattgagaagggacgaagtgaaccctatgggttatcacgacgaggaacacaccaagaacgttagagactggaaagagatctttgattttttcttgcaagacccgacaatcgttccggcgactccggagccggaagacaccgacaagagaaagcttactaaccagtggcctcaacacccttctgacttcagagagatatgccaagaatatgcaagggaggttgaaaagttagctttcaagattttggaacttatctccattagcttgggtttaccgggtgatcggttatcgggttacttcaaggaacaaacgagcattttgaggttcaaccattaccctccttgtcccaaccccgagctagcattaggcgttggacgtcacaaagatggaggagctcttaccgtcttggcccaagatagtgtagggggattacaagtgggccgtagatcggatggagaatggatcccagtgaaaccgatccccgatgctttgatcattaacattggcaactgcatgcaggtgtggacaaatgacaagtattggagtgcagaacatagagtggtagtgaacacaagcaaagagaggttctcagtaccgttcttctttttcccgtcgcatgaaaccaacattgagccattggaggagcttataagtgaagaaaacccgccttgttacaaaaagtgcaattggggaaagttctttgtttcgagaaacagaagtgatttcaagaagctcgaagttgaggacatccagattgatcacttcaaggcttaa

SEQ ID NO: 24921 - protein, 352 aa, Brassica napus
MGRFDEAFIQAPEHRPINHLTNSGEFIFSDEIPTIDLSSLQDPNCDKTTIATEIGKACERWGFFQVINHGLPLDLRRRVENTAAEFFNLTAEEKRRLRRDEVNPMGYHDEEHTKNVRDWKEIFDFFLQDPTIVPATPEPEDTDKRKLTNQWPQHPSDFREICQEYAREVEKLAFKILELISISLGLPGDRLSGYFKEQTSILRFNHYPPCPNPELALGVGRHKDGGALTVLAQDSVGGLQVGRRSDGEWIPVKPIPDALIINIGNCMQVWTNDKYWSAEHRVVVNTSKERFSVPFFFFPSHETNIEPLEELISEENPPCYKKCNWGKFFVSRNRSDFKKLEVEDIQIDHFKA

SEQ ID NO: 24922 - DNA, 1155 bp, Brassica napus
  CDS (1)..(1155)
atgagcaagagaaatcgatcaaaacaaaacaaaaagatgaacaagaacaagaaggatgtgaagatcgagacagagaaaagctcaatgatggacgagtggcctgagccaatcgtcagagtccagtccttagccgaaagcaacctctccactctccccgaccgctacatcaaaccagcatctcaacgccccaccacgacagaggacgctcccgcagcgaccaacataccaatcatagaccttgaaggactcttctcggaagacgggtcgccaaacgacgccatcatggctaagatatcggaggcttgccgtgagtggggattcttccaggtggtgaaccacggtgtgaggccagagctgatggacgccgccagagagaactggagagagtttttccacttgccggtcaatgagaaagagactcatacaaactcaccaaaaacctatgaaggatatggaagcagactaggagttgagaaaggagccattcttgactggagtgattattactatctccatcatcttcctcttcatttgaaagacttcaacaagtggccttcttttcctaccaccattagagaagagatcgatgaatatggcaaggaagtagtaaaactatgcgagagaatcatgaaggtattatcgtcaaacttaggactaaaggaagaaaagtttcaagaagcgtttggaggtaaaaacattggagcatgtttaagggttaattattacccaaaatgccctcgaccggagctggctctcggtctctcctcccactctgatcctggtggtatgaccattcttttaccagacgatcaagtctttggtctccaggtccgcaaagataatacgtggatcaccgtcaagcctcatccccatgcgttcatcgtcaatatcggtgatcaaatccagatactaagcaactcaacatacaagagtgtggagcatagagtgatagtgaactcggagaaagagagagtttcgcttgctttcttctacaatcctaaaagcgatataccaatccaaccattacaagaacttgtatccactcataatcctcctttatatcctccaatgacctttgatcaatatagactctttatcagaactcaaggtccacaaggcaaatctcatgttgaatctcatgcccctcctcgttaa

SEQ ID NO: 24923 - protein, 384 aa, Brassica napus
MSKRNRSKQNKKMNKNKKDVKIETEKSSMMDEWPEPIVRVQSLAESNLSTLPDRYIKPASQRPTTTEDAPAATNIPIIDLEGLFSEDGSPNDAIMAKISEACREWGFFQVVNHGVRPELMDAARENWREFFHLPVNEKETHTNSPKTYEGYGSRLGVEKGAILDWSDYYYLHHLPLHLKDFNKWPSFPTTIREEIDEYGKEVVKLCERIMKVLSSNLGLKEEKFQEAFGGKNIGACLRVNYYPKCPRPELALGLSSHSDPGGMTILLPDDQVFGLQVRKDNTWITVKPHPHAFIVNIGDQIQILSNSTYKSVEHRVIVNSEKERVSLAFFYNPKSDIPIQPLQELVSTHNPPLYPPMTFDQYRLFIRTQGPQGKSHVESHAPPR

SEQ ID NO: 24924 - DNA, 1029 bp, Brassica napus
  CDS (1)..(1029)
atggaaacagcgtcgagagtcgaagcagttaccaaaggcggcttgcctgtagtcccttcccagtacatccagccaccggaagctcgccccaacctcctccacgccggcgacgctgctccaatcccaaccatcgacctctctaactccgattccgtgacggaatcaatcggcgaagcttgccgcaactggggagccttccacgtggtcaaccatggcgtccccatccatctcctcgatcgcatgaagtctctaggcctctccttcttccaagactgtccattggaagagaagctccaatacgcctgcgactcaacctccgccgcctccgaaggttacggcagccgcatgctcctcggagccgaaggcgacgtcgttttggattggagagactactttgatcaccacacgttccctctctctcgccgcgacccttctcattggccgttacatcctcctcactacagacaagtagtggaagagtatggtaatgagatgaagaaactagctcagaagctgttggggatcatctcagagagcttgagtcttccatgctcatctatagaggaagctgttggagaaatctatcagaacattaccatgagttattaccctccttgtcctcagcctgagcttactcttggtctccagtcacattcagacatgggtgccatcactctcttgattcaagatgatgttggtggtcttcagctttacaaggatgatcaatggctaactgttcctcctatctctcacgccattcttgttcttatagccgaccaaaccgagatcataaccaatggcgtatacaaaagtgctcaacatagagcagtgactaatgcgaacagggcgaggttgtcagttgcgacgtttcatgatccttccaagactgcaaggatagcaccagcttctcaccttattgggcaacataccaaaccggcttacaaggaagttgtgtacggccagtatgtttcttcttggtactcaaagggtcctgtgggcaaacgaaaccttgacgctctcctctgctaa

SEQ ID NO: 24925 - protein, 342 aa, Brassica napus
METASRVEAVTKGGLPVVPSQYIQPPEARPNLLHAGDAAPIPTIDLSNSDSVTESIGEACRNWGAFHVVNHGVPIHLLDRMKSLGLSFFQDCPLEEKLQYACDSTSAASEGYGSRMLLGAEGDVVLDWRDYFDHHTFPLSRRDPSHWPLHPPHYRQVVEEYGNEMKKLAQKLLGIISESLSLPCSSIEEAVGEIYQNITMSYYPPCPQPELTLGLQSHSDMGAITLLIQDDVGGLQLYKDDQWLTVPPISHAILVLIADQTEIITNGVYKSAQHRAVTNANRARLSVATFHDPSKTARIAPASHLIGQHTKPAYKEVVYGQYVSSWYSKGPVGKRNLDALLC

SEQ ID NO: 24926 - DNA, 1095 bp, Brassica napus
  CDS (1)..(1095)
atggagtcgaagggtacattggtggacatgttggaccgtgccagtgaggtaaaaacattcgacgagatgaagatgggcgtgaagggtctcgtcgaagccggaatgacaaaaatccctcgcatattccataacccgcttgcctccgtaacaacccctaaacctccctcgacagtgaggatcccaactatcgatctcagaggtggcgtgttcgactccgaggtgacgcgacagagtgtggttgcgaaggttaaagaggcgatggagaagtttggtttttttcaggcaattaaccatgggattccactccatgtcatggaggaaatggaagctgggattcgtgggtttcacgggcaagatccagaagcgaggaaaatgttctacagccgagacaaaactaaaaaggtcaagtataacagtaatgttgatctctatgactctccggctgcgagttggagagataccttaagtcttttcttagctcctgatgttccaaaggcagaggacttgccagagatttgtggggagatcatactggagtactcacagggagtgatgaagcttgccgagttaatctttgagcttttatcagaatccttagggttgagtcgtaaccacctcaaagaactggattgcgcaaagggtttattgatgctctgtcattgctacccgccctgtcctgagccagacttaacactcggcgccactcagcacacagacagatctttcgtcactattcttcttcaagaccacattggaggacttcaagttctccatgatggatactggatcgatgttcctcctaatccgaatgctcttatccttaacactggagatctcctacagcttataacgaatgacaagtttgtaagtgtggagcatagagttttggcaaatggacgtaaagagccacgcacttcggtcgcatctttctttgtgcatcctccatcaataagtccgagagtatatggacccattaaagagcttttgtctgaagaaaaccctcccaagtacagggaaaccactccggaagcctccaaccactatgtggctagaaaaggtgatgggaacaattcgttgagccatttaaggatctga

SEQ ID NO: 24927 - protein, 364 aa, Brassica napus
MESKGTLVDMLDRASEVKTFDEMKMGVKGLVEAGMTKIPRIFHNPLASVTTPKPPSTVRIPTIDLRGGVFDSEVTRQSVVAKVKEAMEKFGFFQAINHGIPLHVMEEMEAGIRGFHGQDPEARKMFYSRDKTKKVKYNSNVDLYDSPAASWRDTLSLFLAPDVPKAEDLPEICGEIILEYSQGVMKLAELIFELLSESLGLSRNHLKELDCAKGLLMLCHCYPPCPEPDLTLGATQHTDRSFVTILLQDHIGGLQVLHDGYWIDVPPNPNALILNTGDLLQLITNDKFVSVEHRVLANGRKEPRTSVASFFVHPPSISPRVYGPIKELLSEENPPKYRETTPEASNHYVARKGDGNNSLSHLRI

SEQ ID NO: 24928 - DNA, 1026 bp, Brassica napus
  CDS (1)..(1026)
atggcggcaaagcttttatccaccggtttccgtcactctactttgccggaaaactatgtccggccactctctgaccgtccacgtctctcccaagtttctcagcttgaagatttccctctcatcgatatatcttcaacagatcgatctcggctcgtccaaaaaatccaccaagcttgcgcccgatttggtttctttcaggttataaatcatggtgttagcaaagcaactatagatgagatggtgagtgttgcgcatgagttttttggcatgcctatggacgaaaaaatgaagctatactcggacgatccaacaaagacaccgagattatcgacgagctttaatgtgaaggaagaagaggttaacaattggagagactatctaagactacattgttatcctatcgacaagtatgtccatgagtggccttcaaacccaccttctttcaaggaagttgtgagtaaatacagtacagaaataagagaattgggatttaaaatagaggaattgatatcagagagcttaggtttagaaaaagattacatgaagaaagtgcttggtgaacaaggtcaacacatggcagtcaactattatcctccatgtcctgagcctgagctcacctatggtttacctgctcataccgacccaaatgccctcaccattcttctccaagatgctaccgtttgcggtctccagatcttgatcgacggtcactggtttgctgttaatcctcgtcctgatgcttttgtcatcaacattggtgaccagttgcaggcattgagtaacggagtatacaaaagtgtttggcatcgagcagtgacaaacactgaaaacccgagactatcgatcgcatcatttatgtgccctgataacggtgctgtcataagcccggcaaagcccctgtgggaagccaaggaggaagaggccaagccaatctacagagactacacttatgcagagtactacaagaagttttggagtaggaatctggaccaagaacattgcctcgaaaactttctaaaccactag

SEQ ID NO: 24929 - protein, 341 aa, Brassica napus
MAAKLLSTGFRHSTLPENYVRPLSDRPRLSQVSQLEDFPLIDISSTDRSRLVQKIHQACARFGFFQVINHGVSKATIDEMVSVAHEFFGMPMDEKMKLYSDDPTKTPRLSTSFNVKEEEVNNWRDYLRLHCYPIDKYVHEWPSNPPSFKEVVSKYSTEIRELGFKIEELISESLGLEKDYMKKVLGEQGQHMAVNYYPPCPEPELTYGLPAHTDPNALTILLQDATVCGLQILIDGHWFAVNPRPDAFVINIGDQLQALSNGVYKSVWHRAVTNTENPRLSIASFMCPDNGAVISPAKPLWEAKEEEAKPIYRDYTYAEYYKKFWSRNLDQEHCLENFLNH

SEQ ID NO: 24930 - DNA, 1011 bp, Brassica napus
  CDS (1)..(1011)
atggagatcgagagagtccaagacatttcatcatcttccctccacaccgaagccatccctctcgagttcatcagatcggagaaagaacagccggcgatcaccactttccgaggtccggtgccggcgatccccgtcgtcgacctgagcgaccccgacgaagagagcgtggcgcgtgcggtggtgaaggcgagtgaagaatgggggattttccaggtggttaatcacgggattcccacggagctgataaaaaggttgcaggaagtggggagaacgttcttcgagcttccgtcggcggagaaagagtccggcgcgaagcccgttgatgccaaggacatcgaagggtacggaacgaagctacagaaagaagtagaaggtaagaaagcatgggttgatcatctcttccacaggatctggccaccgtcgtgcgttaactacagtttctggccaaagaatccacctgagtacagagaggtgaacgaagagtacgcgttgcatgtgaagaagctgtccgagacattgttaggtatactctcggaagggttaggcttacgtcgtgaggcgttgagagaaggtctcggcggagatctggcggagtatatgatgaagattaactattatccgccgtgtcctcggccggacttagccttgggagtaccggcacatactgatctaagtggaatcactctgcttgtacctaatgaagttcctggacttcaagtattcaaagacgatcactggttcgacgccgagtatattccttccgccgtcattgttcacatcggcgatcagatactgaggctgagtaatgggaggtataagaatgtgttgcataggacgacagtggataaggacaggacgaggatgtcgtggccagtgttcttggagccacaccgtgaaatgatagtcgggccattaccggagcttataagcgatgataatcctccaaagtacaagccttttgctttcaaggactacagttaccgtaagctcaataagcttcctctggactga

SEQ ID NO: 24931 - protein, 336 aa, Brassica napus
MEIERVQDISSSSLHTEAIPLEFIRSEKEQPAITTFRGPVPAIPVVDLSDPDEESVARAVVKASEEWGIFQVVNHGIPTELIKRLQEVGRTFFELPSAEKESGAKPVDAKDIEGYGTKLQKEVEGKKAWVDHLFHRIWPPSCVNYSFWPKNPPEYREVNEEYALHVKKLSETLLGILSEGLGLRREALREGLGGDLAEYMMKINYYPPCPRPDLALGVPAHTDLSGITLLVPNEVPGLQVFKDDHWFDAEYIPSAVIVHIGDQILRLSNGRYKNVLHRTTVDKDRTRMSWPVFLEPHREMIVGPLPELISDDNPPKYKPFAFKDYSYRKLNKLPLD

SEQ ID NO: 24932 - DNA, 1026 bp, Brassica napus
  CDS (1)..(1026)
atggcggcaaagcttttatccaccggtttccgtcactctactttgccggaaaactatgtccggccactctctgaccgtccacgtctctcccaagtttctcagcttgaagatttccctctcatcgatatatcttcaacagatcgatctcggctcgtccaaaaaatccaccaagcttgcgcccgatttggtttctttcaggttataaatcatggtgttagcaaagcaactatagatgagatggtgagtgttgcgcatgagttttttggcatgcctatggacgaaaaaatgaagctatactcggacgatccaacaaagacaccgagattatcgacgagctttaatgtgaaggaagaagaggttaacaattggagagactatctaagactccattgttatcctatcgacaagtatgtccatgagtggccttcaaacccaccttctttcaaggaagttgtgagtaaatatagtagagaaataagagaattgggatttaaaatagaggaattgatatcagagagcttaggtttagaaaaagattacatgaagaaagtgcttggtgaacaaggtcaacacatggcagtcaactattatcctccatgtcctgagcctgagctcacctatggtttacctgctcataccgacccaaatgccctcaccattcttctccaagatgctaccgtttgcggtctccagatcttgatcgacggtcactggtttgctgttaatcctcgtcctgatgcttttgtcatcaacattggtgaccagttgcaggcattgagtaacggagtatacaaaagtgtttggcatcgagcagtgacaaacactgaaaacccgagactatcgatcgcatcatttatgtgccctgataacggtgctgtcataagcccggcaaagcccttgtgggaagccaaggaggaagaggccaagccagtctacagagactacacttatgcagagtactacaagaagttttggagtaggaatctggaccaagaacattgccttgagaactttctaaaccactag

SEQ ID NO: 24933 - protein, 341 aa, Brassica napus
MAAKLLSTGFRHSTLPENYVRPLSDRPRLSQVSQLEDFPLIDISSTDRSRLVQKIHQACARFGFFQVINHGVSKATIDEMVSVAHEFFGMPMDEKMKLYSDDPTKTPRLSTSFNVKEEEVNNWRDYLRLHCYPIDKYVHEWPSNPPSFKEVVSKYSREIRELGFKIEELISESLGLEKDYMKKVLGEQGQHMAVNYYPPCPEPELTYGLPAHTDPNALTILLQDATVCGLQILIDGHWFAVNPRPDAFVINIGDQLQALSNGVYKSVWHRAVTNTENPRLSIASFMCPDNGAVISPAKPLWEAKEEEAKPVYRDYTYAEYYKKFWSRNLDQEHCLENFLNH

SEQ ID NO: 24934 - DNA, 1056 bp, Brassica napus
  CDS (1)..(1056)
atgcaaacttctacaacatccaagctcctcgtgtcagacatcgcctcctccgtggatcgcgtcccttcaagctatatccgacaaatctctgaccgcccaaatatttctgatgttgacattttcggcgattccatccctcttatcgatctccaggaactttatggacctagtcgagctaatattatccaccaatttgctcatgcatgctcatcttatagcttcttccagatcaagaaccatggagtaccagaaaaaacaatcgaaagaatgatgactgtggccagagagtttttccatcaaccagagagcgaaagagtgaagcattactctgcggatacaaaaaagacgacgagactctccacaagtttcaacgtcggatcagagaaagtctctaactggagagacttcctccgactccattgccttcccatcgaagattttatcaacgaatggccctcacatcccgtctcattcagagaaatcacagccgaatacgctacaagcgttagagccttggtcttgatacttcttgaggcaatctcagaaagcttaggccttgagaaagaccgtgtaagcaatacattaggcaaacacggtcaacacatggccttaaactactatcctccatgtcctcaacccgatctaacgttcggactacccggacataaagatccaaacttgatcactgtccttcttcaagacgaagtctctggtttacaggtctttaaagatggtaaatggatcgctgttcatcctattcccaacacttttattgtcaacatgggtgaccaaatgcaggttattagcaatgacaaatacaaaagtgtgctacacagagctgttgtgaacagcgacaaggagcggatatcgataccgaccttctactgtccttcttttgatgccgtggttggcccacaacaagagctgatcaatgaggaagaagattctccagctatttacagaagctttacgtatgctgagtattatgaaaagttttgggacagagcacttgcaactgagagctgtattgacacgttcaaaatttccaaaacctaa

SEQ ID NO: 24935 - protein, 351 aa, Brassica napus
MQTSTTSKLLVSDIASSVDRVPSSYIRQISDRPNISDVDIFGDSIPLIDLQELYGPSRANIIHQFAHACSSYSFFQIKNHGVPEKTIERMMTVAREFFHQPESERVKHYSADTKKTTRLSTSFNVGSEKVSNWRDFLRLHCLPIEDFINEWPSHPVSFREITAEYATSVRALVLILLEAISESLGLEKDRVSNTLGKHGQHMALNYYPPCPQPDLTFGLPGHKDPNLITVLLQDEVSGLQVFKDGKWIAVHPIPNTFIVNMGDQMQVISNDKYKSVLHRAVVNSDKERISIPTFYCPSFDAVVGPQQELINEEEDSPAIYRSFTYAEYYEKFWDRALATESCIDTFKISKT

SEQ ID NO: 24936 - DNA, 1029 bp, Brassica napus
  CDS (1)..(1029)
atggaaacagcgtcgagagtcgaagcagttaccaaaggcggcttgcctgtagtcccttcccagtacatccagccaccggaagctcgccccaacctcctccacgccggcgacgctgctccaatcccaaccatcgacctctctaactccgattccgtgacggaatcaatcggcgaagcttgccgcaactggggagccttccacgtggtcaaccatggcgtccccatccatctcctcgatcgcatgaagtctctaggcctctccttcttccaagactgtccattggaagagaagctccaatacgcctgcgactcaacctccgccgcctccgaaggttacggcagccgcatgctcctcggagccgaaggcgacgtcgttttggattggagagactactttgatcaccacacgttccctctctctcgccgcgacccttctcattggccgttacatcctcctgactacagacaagtagtggaagagtatggtaatgagatgaagaaactagctcagaagctgttggggataatctcagagagcttgagtcttccatgctcatctatagaggaagctgttggagaaatctatcagaacattaccatgagttattaccctccttgtcctcagcctgagcttactcttggtctccagtcacattcagacatgggtgccatcactctcttgattcaagatgatgttggtggtcttcagctttacaaggatgatcactggctcactgttcctcctatctcccatgccattcttgttcttatagccgatcaaaccgagatcataactaatggcgtttacaaaagtgctcaacatagagcagtgactaatgcgaacagggcgaggttatctgttgcaacgtttcatgatccttctaagacggcaaggatagcaccagcttctcaccttattggccaacacaccaaaccggcttacaaggaagttgtgtatggccaatatgtttcttcttggtactcaaagggtcctgagggtaaacgaaaccttgatgctctcctttgctaa

SEQ ID NO: 24937 - protein, 342 aa, Brassica napus
METASRVEAVTKGGLPVVPSQYIQPPEARPNLLHAGDAAPIPTIDLSNSDSVTESIGEACRNWGAFHVVNHGVPIHLLDRMKSLGLSFFQDCPLEEKLQYACDSTSAASEGYGSRMLLGAEGDVVLDWRDYFDHHTFPLSRRDPSHWPLHPPDYRQVVEEYGNEMKKLAQKLLGIISESLSLPCSSIEEAVGEIYQNITMSYYPPCPQPELTLGLQSHSDMGAITLLIQDDVGGLQLYKDDHWLTVPPISHAILVLIADQTEIITNGVYKSAQHRAVTNANRARLSVATFHDPSKTARIAPASHLIGQHTKPAYKEVVYGQYVSSWYSKGPEGKRNLDALLC

SEQ ID NO: 24938 - DNA, 963 bp, Brassica napus
  CDS (1)..(963)
atggagaagaacatcaagtttcctgttatagacctatctaagctcaatggtgaagagagagaccaaaccatggctttgatcgacgatgcttgccaaaactggggattctttgagctgctaaaccatggaataccatatgatcttatggacaacattgagaggatgacaaaggaacactacaagaaatttatggaacaaaaattcaaggaaatgcttcgttccaaaggtttagatactctcgagaccgaagtggaagatatagattgggaaagcactttcttccttcatcatctccctcagaccaatctttatgacatccctaacatgtcagacgaataccgaacggctatgaaggattttgggaagaggctagagaacctagcggaagaactgttggatttgctgtgtgagaatctagggttggagaaagggtacttgaagaaggtgtttcgtggtacgaagggtccaacttttgggacaaaggttagcaactatccaccatgtcctaatcctgagatgatcaaagggcttagggctcacacagatgcaggaggcctcatcttgttgtttcaagacgataaagtcagtggccttcagcttctcaaagatggtgattgggttgatgttcctccactcaagcactccattgtcatcaatcttggtgaccaacttgaggtgataacaaacgggaagtacaagagcgtaatgcatcgcgtcatgactcaaaaagaaggaaacaggatgtctattgcgtccttctacaaccctggaagcgatgctgagatctctccggcacaatctcttgtggacaaagaatcggagtacccgagttttgtgtttgacgactacatgaaactctactctggagtcaagtttcagcccaaggagccacggtttgaggccatgaagaatgctgctgtaaccacggatgtgaatccggtggccaccgtggagacattctaa

SEQ ID NO: 24939 - protein, 320 aa, Brassica napus
MEKNIKFPVIDLSKLNGEERDQTMALIDDACQNWGFFELLNHGIPYDLMDNIERMTKEHYKKFMEQKFKEMLRSKGLDTLETEVEDIDWESTFFLHHLPQTNLYDIPNMSDEYRTAMKDFGKRLENLAEELLDLLCENLGLEKGYLKKVFRGTKGPTFGTKVSNYPPCPNPEMIKGLRAHTDAGGLILLFQDDKVSGLQLLKDGDWVDVPPLKHSIVINLGDQLEVITNGKYKSVMHRVMTQKEGNRMSIASFYNPGSDAEISPAQSLVDKESEYPSFVFDDYMKLYSGVKFQPKEPRFEAMKNAAVTTDVNPVATVETF

SEQ ID NO: 24940 - DNA, 957 bp, Glycine max
  CDS (1)..(957)
atggagaagtttccagttgttgacatggggaaccttaataatgaagagagatcagcaaccatggagataatcaaagatgcctgtgagaactggggtttctttgagttggtgaaccatgggatatccatagagttgatggacaccgtggagaggatgacaaaagagcactacaaaaagtgtatggagcaaaggttcaaagaaatggtagcaagcaaaggtttggagtctgctcaatctgaaatcaatgatttggattgggaaagcactttctttttgcgccaccttcctgtctctaacatctcagagatccctgatcttgatgaagattacaggaaggtaatgaaggattttgccgtggaactggagaaactggcggagctagttcttgagttgctgtgtgagaatcttgggctagagaaagggtatctgaagaaggtgttctgtgggtcaaagggaccaaattttggaacaaaagtgagcaactaccctccatgtccgaagccagagctgataaaggggctgagagcccacacagatgctggtggcatcattctactcttccaagatcacaaggtcagtggattacagctcctcaaagatggccactggattgatgtcctcccaatgcgccactccattgtcatcaaccttggagaccaacttgaggtcatcaccaatggcaaatacaagagtgtgatgcaccgtgtgattactcaaacggatggtaacagaatgtccatagcctcgttttacaatccaggcaatgatgcattgatcgctccagcaccagccttggtgaaggaagatgagactagccaagtttatcccaagtttgtttttgatgattacatgaagctctatgctggccttaaatttcaggccaaagaaccaagatttcaagctatgaaggccacggagtcatccaacattaatttaggccccatagcaacggtctaa

SEQ ID NO: 24941 - protein, 318 aa, Glycine max
MEKFPVVDMGNLNNEERSATMEIIKDACENWGFFELVNHGISIELMDTVERMTKEHYKKCMEQRFKEMVASKGLESAQSEINDLDWESTFFLRHLPVSNISEIPDLDEDYRKVMKDFAVELEKLAELVLELLCENLGLEKGYLKKVFCGSKGPNFGTKVSNYPPCPKPELIKGLRAHTDAGGIILLFQDHKVSGLQLLKDGHWIDVLPMRHSIVINLGDQLEVITNGKYKSVMHRVITQTDGNRMSIASFYNPGNDALIAPAPALVKEDETSQVYPKFVFDDYMKLYAGLKFQAKEPRFQAMKATESSNINLGPIATV

SEQ ID NO: 24942 - DNA, 924 bp, Glycine max
  CDS (1)..(924)
atggcagttccagtgattgatttttcaaagctcaatggtgaagaaagaaccaaaactatggcacagattgctaatgggtgtgaagagtggggattttttcagttgatcaaccatggtattccagaggaactccttgagagggtgaagaaggttgcctctgagttctataagctggaaagagaggagaatttcaagaactccaaatcagtgaagctactaagcgattcagtcgaaaagaagagcagcgaaatggagcatgcggattgggaggatgttatcactctccttgatgataatgaatggccagaaaaaacaccaggattcagggaaaccatggcaaaatatcgagccgagctaaagaaattggcagagaaagtgatggaggtgatggatgagaatcttggcttaaccaaaggatacatcaagaaggcactgaatggtggagatggagaaaatgccttctttggcaccaaggtgagccactaccctccatgtccccatccagagctcgtgaagggtctgcgagctcacaccgatgcaggaggcgtaatcctactcttccaagatgacaaggttggtggccttcagatgctgaaagaagggcaatggattgatgtgcagcctttgccaaatgccattgtcatcaacactggtgatcagattgaggtcttgagcaatggtagatacaagagttgctggcacagggttctggccacaccagatgggaacagaagatcaattgcctccttctataatccttcattcaaggccaccatatgtcctgcaccacaacttgtggagaaagaagaccaacaagtagatgaaacttatcctaagtttgtttttggtgactacatgtctgtctatgctgagcagaagttccttcccaaggaaccaagattccaagctgttagggccatgtga

SEQ ID NO: 24943 - protein, 307 aa, Glycine max
MAVPVIDFSKLNGEERTKTMAQIANGCEEWGFFQLINHGIPEELLERVKKVASEFYKLEREENFKNSKSVKLLSDSVEKKSSEMEHADWEDVITLLDDNEWPEKTPGFRETMAKYRAELKKLAEKVMEVMDENLGLTKGYIKKALNGGDGENAFFGTKVSHYPPCPHPELVKGLRAHTDAGGVILLFQDDKVGGLQMLKEGQWIDVQPLPNAIVINTGDQIEVLSNGRYKSCWHRVLATPDGNRRSIASFYNPSFKATICPAPQLVEKEDQQVDETYPKFVFGDYMSVYAEQKFLPKEPRFQAVRAM

SEQ ID NO: 24944 - DNA, 1059 bp, Glycine max
  CDS (1)..(1059)
atgatggcggaatcgggcgaggaagagatagttggtaaacctgtccaagagctggttttgaatcccgaaaatctaccaaaaaattacatctacgaggaaggtggtgccggatttcgagatgctcttgtgccatcacaggatgatgatattccagtgatcgaccttcatcgcctctcatctccatctactgcactacaagagcttgctaaactccatcatgctctccattcatggggctgctttcaggcaataaaccatgggctgaaaagctcatttttggacaaggtgagagaagtttcaaagcaattctttcaacttccaaaggaagaaaagcaaaaatgggcaagggaaccaaacaatattgaaggatatggcaatgatataatatattcagaaaatcaaaggcttgactggactgacagagtttacctaaaggtgcttcctgaagatgagaggaagttcaaattttggccccaaaacccctatgatttcaggagtattgtcctacagtataccgaaagcatgcgactgctaagtgaagtaattattaaggccatggcaaagtcactgaacttggaagaggattgcttcctaaatgaatgtggagaaagagctgatatgtttctgagattcaactactaccctccatgtccaatgcctgatcatgttcttggcgtgaagccacatgcagatggatccaccataacttttctgttgcaagacaaagaagtagaaggcctccaagtcctcaaagatgatcagtggtttaaagttccaataatccctgatgctctcctcattaatgttggtgatcaaatagagataatgagcaatggaatttttcggagcccaatacacagggcagtgataaattcagcaaaggaaaggctcacagtggcaatgttctgcctcacggattcagagaaagagattaaaccggtggagaagctagtgaacgagtcaaggccaacgttatacagaccggtgaaaaattattctgagatctatttccagtattaccaacaaggaaaaagacctattgaagcttcaaagatttaa

SEQ ID NO: 24945 - protein, 352 aa, Glycine max
MMAESGEEEIVGKPVQELVLNPENLPKNYIYEEGGAGFRDALVPSQDDDIPVIDLHRLSSPSTALQELAKLHHALHSWGCFQAINHGLKSSFLDKVREVSKQFFQLPKEEKQKWAREPNNIEGYGNDIIYSENQRLDWTDRVYLKVLPEDERKFKFWPQNPYDFRSIVLQYTESMRLLSEVIIKAMAKSLNLEEDCFLNECGERADMFLRFNYYPPCPMPDHVLGVKPHADGSTITFLLQDKEVEGLQVLKDDQWFKVPIIPDALLINVGDQIEIMSNGIFRSPIHRAVINSAKERLTVAMFCLTDSEKEIKPVEKLVNESRPTLYRPVKNYSEIYFQYYQQGKRPIEASKI

SEQ ID NO: 24946 - DNA, 1017 bp, Glycine max
  CDS (1)..(1017)
atggacataaaagtgctttcttccggagttcagtactcaaatctaccggagagttacatccgacccgaatcggagcgacctcgtctttccgaggtttcggagtgcgaggatgttccaatcatcgacttgggttctcaaaatagagcccagattgttcaccaaatcggtgaagcctgcagaaactatggtttcttccaggtgattaatcacggggtggctttagaagcggcaaaggaaatggtagaagtggcacatggattcttcaagttaccagtggaggagaagctcaagttgtactcggaagacacatcaaagacaatgagactgtctactagttttaatgtgaaaaaagagacggtgcgtaattggagggattatcttaggcttcactgctatccattggagaaatatgcgcctgaatggccttctaatccaccctctttcaaggaaactgttacagaatactgcacaataattagggaattggggttgaggatacaggaatacatatcagagagtttgggcctagaaaaagactacataaagaatgtattaggggaacaagggcagcacatggctgtgaactactatccaccatgcccagaaccagaacttacctatggattgccagggcacactgacccaaatgcacttacaattctgcttcaagaccttcaagttgctggccttcaggttctcaaagatggcaagtggcttgccgttagtccccaacctaatgcctttgtcattaacattggcgatcaacttcaggctttgagtaatgggctttataagagtgtgtggcaccgtgctgttgtcaatgttgagaaaccaaggctttctgtggcttcatttctttgtccaaatgacgaggcattgataagccctgcaaaaccactcaccgaacatggatccgaagccgtatacagaggatttacatatgcagaatactataagaagttttggagcaggaacttagaccaagaacactgtttggaacttttcaagaacaagtaa

SEQ ID NO: 24947 - protein, 338 aa, Glycine max
MDIKVLSSGVQYSNLPESYIRPESERPRLSEVSECEDVPIIDLGSQNRAQIVHQIGEACRNYGFFQVINHGVALEAAKEMVEVAHGFFKLPVEEKLKLYSEDTSKTMRLSTSFNVKKETVRNWRDYLRLHCYPLEKYAPEWPSNPPSFKETVTEYCTIIRELGLRIQEYISESLGLEKDYIKNVLGEQGQHMAVNYYPPCPEPELTYGLPGHTDPNALTILLQDLQVAGLQVLKDGKWLAVSPQPNAFVINIGDQLQALSNGLYKSVWHRAVVNVEKPRLSVASFLCPNDEALISPAKPLTEHGSEAVYRGFTYAEYYKKFWSRNLDQEHCLELFKNK

SEQ ID NO: 24948 - DNA, 1125 bp, Glycine max
  CDS (1)..(1125)
atggtggccacaagcacaaatgagttggaggcaggaactgtttctaggtatgacaggaaaagtgaaatcaaggtattcgatgaatcaaaaactggggtccaaggactggtagaaaatggtgtgacaaaggttccacggatgttctattgtgaacactctaatctcagtgatggattaaccacagaatcaaattcaaacttcactatcccctccatagacctcactggcatcaatgatgaccctattttgagagatgctgttgtgggaaaagttagatatgcatgtgaaaagtggggcttctttcaggttacaaaccatggaattccaactcaagttttggatgagatgatcaaaggaactggcaggtttcatgaacaagatgccaaggtgaggaaagagtactacacccgtgatatgagcaggaaagttatttatctttccaactttagtctttatcaagatccatctgctgattggagggatacacttgcatttttttgggcgcctaattcacccaatgatgaagaattgcctgcagtttgtagagatattgtgcctgagtactcaacaaaagtaatggcacttgcttctactttgtttgagttactgtcagaggctcttggccttgatcgctttcaccttaaagaaatgggttgtgatgaagggcttcttcatctgtgtcactattacccagcatgccctgagccagaattaactatgggcactagcaggcacacagacggtaacttcatgacaatacttttgcaagaccaaatgggtggccttcaaattcttcatgaaaatcaatggattgatgtgcctgcagcacatggagctcttgtagtgaacattggagatcttctgcagctagtgactaatgaaaaattcatcagtgttcaacatagagttctagcaaaccatcaaggcccaagaacatcaattgcatccttttttagaattggtgatcagtcaccagagggactctcaagagtctttggtcccatcaaggaactgttatctgaacacaatccaccagtgtacagagaaacttctttaaaagactacttggcacatcaatacgcaaagagcatcggagcttcttcactgtcattattcaagttgtga

SEQ ID NO: 24949 - protein, 374 aa, Glycine max
MVATSTNELEAGTVSRYDRKSEIKVFDESKTGVQGLVENGVTKVPRMFYCEHSNLSDGLTTESNSNFTIPSIDLTGINDDPILRDAVVGKVRYACEKWGFFQVTNHGIPTQVLDEMIKGTGRFHEQDAKVRKEYYTRDMSRKVIYLSNFSLYQDPSADWRDTLAFFWAPNSPNDEELPAVCRDIVPEYSTKVMALASTLFELLSEALGLDRFHLKEMGCDEGLLHLCHYYPACPEPELTMGTSRHTDGNFMTILLQDQMGGLQILHENQWIDVPAAHGALVVNIGDLLQLVTNEKFISVQHRVLANHQGPRTSIASFFRIGDQSPEGLSRVFGPIKELLSEHNPPVYRETSLKDYLAHQYAKSIGASSLSLFKL

SEQ ID NO: 24950 - DNA, 1023 bp, Glycine max
  CDS (1)..(1023)
atgtccagcgttaaggagttagttgaatctaagtgtctgagttctgttccctccaactacatttgccttgaaaaccccgaagattctatattgtattatgaagctgataatattccaaccattgatttttcccaactcacctcttcaaatctcaatgaacgctccaagggaatcaaacaactaggagatgcttgccgcgattggggtttctttaagctaattaatcacggtgtgtcggagatactaagggatgaggtgattaggacaagccagggcttttttgatctgactgagaaagaaaaaatggagcacgcaggaaggaacctatttgatccaataagatatgggacaagcttcaatctcatggtggacaagacccttttctggagagattatctcaaatgtcatgttcaccctcactttaatgctccttccaagcctcctggttttagccaaactttagaggaatacattaccaagggcagggaactgggtgaagagttgctagaaggaatatctctaagcttagggcttgaagaaaacttcatacataaaaggatgaatctagacttgggatcccagttgctggttatcaactgttacccaccatgtcctaaccctgagcttgttatgggccttcctgcacacacagaccatgggcttctgaccctcctaatgcaaaacgagcttggagggcttcaaattcaacacaatggcaagtggattcctgtccaccccttacccaactcctttctcatcaacactggggatcacatggagatactgaccaatgggaaatacaagagtgttgttcatcgagctgtagcgaacacgaaagccactaggatttccgttggtacagcacacggacccaagcttgacaccattgtggggcccgcaccagagcttgttggcgatgataatactgcttcataccgtgccatcaaatacagtgattacatcgagcttcagcaaaaccatgaactcgacggaaagtcgtgcttggatcgtattcgcatttga

SEQ ID NO: 24951 - protein, 340 aa, Glycine max
MSSVKELVESKCLSSVPSNYICLENPEDSILYYEADNIPTIDFSQLTSSNLNERSKGIKQLGDACRDWGFFKLINHGVSEILRDEVIRTSQGFFDLTEKEKMEHAGRNLFDPIRYGTSFNLMVDKTLFWRDYLKCHVHPHFNAPSKPPGFSQTLEEYITKGRELGEELLEGISLSLGLEENFIHKRMNLDLGSQLLVINCYPPCPNPELVMGLPAHTDHGLLTLLMQNELGGLQIQHNGKWIPVHPLPNSFLINTGDHMEILTNGKYKSVVHRAVANTKATRISVGTAHGPKLDTIVGPAPELVGDDNTASYRAIKYSDYIELQQNHELDGKSCLDRIRI

SEQ ID NO: 24952 - DNA, 981 bp, Glycine max
  CDS (1)..(981)
atggtgttgctgtccaaagcaacaacagaacaatactcctacatcaagaactacatgccaactgcattctcctcaacaattcccatagtggacctctccaaacccgatgcaaagaccctcatagtgaaggcttgtgaggagtttggattcttcaaagtcatcaaccatggtgttcccattgaagctatatcccaattggaatctgaagccttcaagttcttctctatgccactcaatgagaaggaaaaagcaggccctcccaaaccatttgggtatggtagcaagaaaattggacacaatggggatgttggttgggttgagtaccttcttctcaacaccaatcaagaacacaacttctctgtttatggcaaaaacgctgagaaatttaggtgtttgttgaacagttacatgtcttctgtgaggaaaatggcatgtgagattcttgagctgatggcagaaggattgaagatacaacaaaaaaatgtgtttagcaagcttcttatggataaagagagtgactctgtttttagggtgaatcactaccctgcttgccctgaacttgtgaatggtcaaaacatgatagggtttggagaacacacggacccacaaatcatttctctacttaggtccaacaatacttcaggccttcagatttttcttagagatggaaactggatttcagtcccacctgatcacaaatctttcttcataaatgttggtgattctcttcaggttatgaccaatggaaggtttcgaagtgtgaaacacagagttttgacaaatggatttaagtctagactctcaatgatttactttggaggtccaccattgagtgagaaaatagtaccattatcttcacttatgaaaggaaaagaaagcttatacaaagagtttacgtggttcgagtataaaaatttaacctatgcttcaagattggctgataataggcttggacattttgagagaattgttgcttcataa

SEQ ID NO: 24953 - protein, 326 aa, Glycine max
MVLLSKATTEQYSYIKNYMPTAFSSTIPIVDLSKPDAKTLIVKACEEFGFFKVINHGVPIEAISQLESEAFKFFSMPLNEKEKAGPPKPFGYGSKKIGHNGDVGWVEYLLLNTNQEHNFSVYGKNAEKFRCLLNSYMSSVRKMACEILELMAEGLKIQQKNVFSKLLMDKESDSVFRVNHYPACPELVNGQNMIGFGEHTDPQIISLLRSNNTSGLQIFLRDGNWISVPPDHKSFFINVGDSLQVMTNGRFRSVKHRVLTNGFKSRLSMIYFGGPPLSEKIVPLSSLMKGKESLYKEFTWFEYKNLTYASRLADNRLGHFERIVAS

SEQ ID NO: 24954 - DNA, 984 bp, Glycine max
  CDS (1)..(984)
atggtgttgttgtccaaagcaacaacagaacaatactcctacattaagaactgcatgccaaccaaattttcctcaacaattcccatagtggacctctccaaacctgatgcaaagacccttatagtgaaggcttgtgaggagtttggattcttcaaagtcatcaatcatggtgtctccatggaagctatatccgaattggaatatgaagccttcaaattcttctctatgtcactcaatgaaaaggaaaaagtaggacctcccaatccatttgggtatggtagcaagaaaattggacacaatggggacgttggttggattgagtaccttcttctcaacaccaatcaagaacacaacttctctgtttatggcaaaaaccctgagaaattcaggtgtctgttgaacagttacatgtcttctgtgaggaagatggcatgtgagattcttgagttgatggcagaagggttgaagattcagcaaaaggatgtgtttagcaagcttctaatggataaacaaagtgactctattttcagggtgaatcattaccctgcttgtcctgaaatgactctgaatgatcagaacttgattgggtttggagaacacacagacccacaaatcatctctctgttaagatccaacaacacttcaggccttcagatttatcttagagatggaaattggatttcagtcccaccagatgacaaatccttttttattaacgttggtgattctcttcaggttatgacaaatggaaggttccgaagtgtgagacacagagtgttggcaaatgggttcaagtccaggctttcaatgatttactttggaggtccacctttgagtgagaaaatagcaccattatcctctctcatgaaaggaaaagaaagtctatataaagagtttacctggtttgagtacaaaaaatcaatctacggttcaagattatctaaaaatagacttgaacattttgaaagaattgcagcttcgtaa

SEQ ID NO: 24955 - protein, 327 aa, Glycine max
MVLLSKATTEQYSYIKNCMPTKFSSTIPIVDLSKPDAKTLIVKACEEFGFFKVINHGVSMEAISELEYEAFKFFSMSLNEKEKVGPPNPFGYGSKKIGHNGDVGWIEYLLLNTNQEHNFSVYGKNPEKFRCLLNSYMSSVRKMACEILELMAEGLKIQQKDVFSKLLMDKQSDSIFRVNHYPACPEMTLNDQNLIGFGEHTDPQIISLLRSNNTSGLQIYLRDGNWISVPPDDKSFFINVGDSLQVMTNGRFRSVRHRVLANGFKSRLSMIYFGGPPLSEKIAPLSSLMKGKESLYKEFTWFEYKKSIYGSRLSKNRLEHFERIAAS

SEQ ID NO: 24956 - DNA, 948 bp, Glycine max
  CDS (1)..(948)
atgactaacttcccattgatcaacttggagaagctcagtggtgaggaaagaaacgataccatggaaaaaattaaagatgcttgtgaaaactggggattctttgagctggtgaatcatggcattcctcatgacatattggacactgtggagaggttgaccaaagagcactacaggaaatgcatggaagagaggttcaaggaatttatggcaagcaaaggtctagatgctgtccaaactgaggtcaaggatatggattgggagagcaccttccacttgcgtcacctccctgaatcaaacatctcagagatccctgatctcattgatgagtacaggaaagtgatgaaggattttgctttgaggttagagaaactagcagagcagctgttggacttgttgtgtgagaatcttggcctagagaaagggtacctcaagaaggctttctatggatcaagaggaccaacttttggcaccaaggttgccaactaccctccatgccccaacccagagctggtgaagggtcttcgtccccacactgatgccggtggaattatccttctcttccaggatgacaaggtcagtggactgcagcttctcaaagatggccagtgggttgatgtgcctcctatgcgccactccattgttgttaacattggtgatcagcttgaggttatcaccaatggtaagtacaagagtgtggagcaccgtgtgatagcacaaacagatgggaccagaatgtccattgcctcattctataaccctggcagtgatgctgtcatctaccctgctccagaattgttggagaaagaggcagaggagaaaagccagctctaccctaaatttgtgtttgaagactacatgaagctctatgctaagttgaagttccaggccaaggagccaagatttgaagcctttaaagcatcaaattttggtccaattgcaactgtttaa

SEQ ID NO: 24957 - protein, 315 aa, Glycine max
MTNFPLINLEKLSGEERNDTMEKIKDACENWGFFELVNHGIPHDILDTVERLTKEHYRKCMEERFKEFMASKGLDAVQTEVKDMDWESTFHLRHLPESNISEIPDLIDEYRKVMKDFALRLEKLAEQLLDLLCENLGLEKGYLKKAFYGSRGPTFGTKVANYPPCPNPELVKGLRPHTDAGGIILLFQDDKVSGLQLLKDGQWVDVPPMRHSIVVNIGDQLEVITNGKYKSVEHRVIAQTDGTRMSIASFYNPGSDAVIYPAPELLEKEAEEKSQLYPKFVFEDYMKLYAKLKFQAKEPRFEAFKASNFGPIATV

SEQ ID NO: 24958 - DNA, 957 bp, Glycine max
  CDS (1)..(957)
atggcaaactttccagttgttgacatggggaagcttaacaccgaagagagacctgcagccatggagattataaaagatgcctgtgagaactggggtttctttgagttggtgaaccatgggatatccattgagcttatggacacagtggagaagctcacaaaagagcattacaagaagactatggagcaaaggttcaaagaaatggtgaccagcaaaggtcttgagtcagttcagtcagaaatcaatgacttggactgggaaagcacctttttcctgcgccatcttccactctccaacgtttcagacaacgcagatcttgatcaagattacaggaagacaatgaagaaatttgctctggaactggagaaacttgcagagcagcttctagacttgctatgcgagaatctgggcctggagaaagggtacctgaagaaggtgttctacggatccaagggtccaaattttgggacaaaagtgagcaactaccctccttgtcccacccctgatctcatcaagggcctaagagctcacactgatgctggtggcataatcctactgttccaagatgacaaggttagtggattgcagcttctcaaggatgatcagtggatcgatgtcccaccaatgcgtcactccattgtaatcaaccttggtgaccaacttgaggtcataaccaatggcaagtacaagagtgtcatgcaccgagtgattgcccaagccgatgataccagaatgtccatagcttctttctacaaccctggtgatgatgctgtcatttctcctgcaccggctttggtgaaggaattagatgagacaagccaagtgtacccgaaatttgtgtttgatgattacatgaagctctatgctggtctcaagtttcaggctaaagagccaaggtttgaagctatgaaggccaatgcaagcgtggttgatgtgggggccatagccacagtttga

SEQ ID NO: 24959 - protein, 318 aa, Glycine max
MANFPVVDMGKLNTEERPAAMEIIKDACENWGFFELVNHGISIELMDTVEKLTKEHYKKTMEQRFKEMVTSKGLESVQSEINDLDWESTFFLRHLPLSNVSDNADLDQDYRKTMKKFALELEKLAEQLLDLLCENLGLEKGYLKKVFYGSKGPNFGTKVSNYPPCPTPDLIKGLRAHTDAGGIILLFQDDKVSGLQLLKDDQWIDVPPMRHSIVINLGDQLEVITNGKYKSVMHRVIAQADDTRMSIASFYNPGDDAVISPAPALVKELDETSQVYPKFVFDDYMKLYAGLKFQAKEPRFEAMKANASVVDVGAIATV

SEQ ID NO: 24960 - DNA, 966 bp, Brassica napus
  CDS (1)..(966)
atggagaagaacattaagtttcctgttgtagacttgtctaagctaaatggtgaagagagagaccaaaccatggctttgatcgacgatgcttgtcaaaactggggcttctttgagctgctaaaccatggaataccatatgatcttatggacaatattgagaggatgacaaaggaacactacaaaaaatttatggaacaaaagttcaaagaaatgctttcttccaaaaatttagatactctggagactgaagttgagaatgttgattgggaaagtactttcttccttcaccatcttcctcacactaatctctacgacatccccgatatgtcagatgaataccgagcggccatgaaggactttgggaagaggctagagaacctagcggaagaactgttggatttgttgtgtgagaatctagggttggagaaagggtacttgaagaaggtgtttagtgggacaaagggtccaacttttgggacaaaggttagcaactatccaccatgtcctaaaccggagatgatcaaagggcttagggctcacacggatgcaggaggcctcatattgctatttcaagacgataaggtcagtggtcttcagcttctcaaagatggtgtttgggttgatgtccctcctctcaaacactccattgtcatcaatcttggtgaccaacttgaggtgataaccaacgggaagtacaagagcataatgcaccgtgtgatgacacaaaaagaaggaaacaggatgtctatagcgtcgttctacaaccctggaagtgatgcggagatctctcccgcaccatctctagtggagaaagactctgatgaatatccgagttttgtgtttgatgactacatgaagctatatgctggagtcaagtttcagcccaaggagccacgttttgaggcgatgaagaatgttgcagcaaccacggatttgaacccggtggccacagtcgagacgttctaa

SEQ ID NO: 24961 - protein, 321 aa, Brassica napus
MEKNIKFPVVDLSKLNGEERDQTMALIDDACQNWGFFELLNHGIPYDLMDNIERMTKEHYKKFMEQKFKEMLSSKNLDTLETEVENVDWESTFFLHHLPHTNLYDIPDMSDEYRAAMKDFGKRLENLAEELLDLLCENLGLEKGYLKKVFSGTKGPTFGTKVSNYPPCPKPEMIKGLRAHTDAGGLILLFQDDKVSGLQLLKDGVWVDVPPLKHSIVINLGDQLEVITNGKYKSIMHRVMTQKEGNRMSIASFYNPGSDAEISPAPSLVEKDSDEYPSFVFDDYMKLYAGVKFQPKEPRFEAMKNVAATTDLNPVATVETF

SEQ ID NO: 24962 - DNA, 1056 bp, Glycine max
  CDS (1)..(1056)
atgtcttccactcccaccaatctcattgatttcttggtgaaccaagccaatggagtgaagggtctcgctgatttgaacctctcaagtgttcctcaccaatacattcaacccctccaagccagattagaccacaccaaaattgtccctcagaaatcaatacccatcattgatttcacaaaatgggaagacccagatgtccaagattccatctttgatgctgcaaccaagtggggtttcttccaaattgtgaaccatggtataccctctgaggttcttgacgatctcaaggatgctgtgcacaggttctttgaattgccagctgaggaaaagcagtgtcttaaagacaactcaccccctgaagttgtcaggttggcctctagttttagcccctatgctgagtcggtgttggagtggaaagattatctgcaacttgtgtatgcctcagaggaaaaaattcatgcatattggcctcctatatgcaaggaccaggcactggaatatatgaagcatgctgaagctttaattagaaaattgttaaaggtgcttcttaagaaactgaatgtgaaggagttagataaagcaagagaacacactctaatgggggcaatgatattgggtttcaattactacccagcttgccctgaccctgaagttgtagcaggggtaggtcctcattctgatgtatcatccattactgtccttctacaggatgatattggagggctttatgtaagaggcagtgatggtattagttggatctatgttcctcctgttgagggagctttagtaatcaatattggggatgtgctacagataatgagcaatgaaagatgcaaaagcatagagcataaagtggttgcaaatagaagcaagaccaggatctccattccaatctttgtcaacccggcacctgatgctgttattggtcctttgtcggaagtgttggatgatggtgatgaaccaaaatataaacaacttttgtactctgactatttcaagtatttcttcagcaaggctcatgatgggaagaaaactattgaatttgccatgatatga

SEQ ID NO: 24963 - protein, 351 aa, Glycine max
MSSTPTNLIDFLVNQANGVKGLADLNLSSVPHQYIQPLQARLDHTKIVPQKSIPIIDFTKWEDPDVQDSIFDAATKWGFFQIVNHGIPSEVLDDLKDAVHRFFELPAEEKQCLKDNSPPEVVRLASSFSPYAESVLEWKDYLQLVYASEEKIHAYWPPICKDQALEYMKHAEALIRKLLKVLLKKLNVKELDKAREHTLMGAMILGFNYYPACPDPEVVAGVGPHSDVSSITVLLQDDIGGLYVRGSDGISWIYVPPVEGALVINIGDVLQIMSNERCKSIEHKVVANRSKTRISIPIFVNPAPDAVIGPLSEVLDDGDEPKYKQLLYSDYFKYFFSKAHDGKKTIEFAMI

SEQ ID NO: 24964 - DNA, 1077 bp, Brassica napus
  CDS (1)..(1077)
atggttgcagttgaaagagttgagagcttagcaaaaagcggaatcagctcaatcccaaaagaatacatccgtccaaaagaagagctcgagagcatcaacgacgtgttccaagaagagaagaaagaagacggtccacaagtccccaccatcgatctccaagacatcgagtcagaagacgaaaccatccgtgagaaatgcatagaggagctcaagaaggcggctatggattggggagtgatgcatttgatcaaccatggtatacctgttgaactaatggagcgtgtgaagaagtcaggagaagagttcttcggtttgcccgtggaagagaaggagaagtatgcaaacgatcaagccagcggaaagattcaagggtatggaagcaagttagctaataacgcgagtggacagcttgagtgggaagattacttctttcatcttgtgtatcctgaagacaagagagatctctcactttggcctaagacaccaactgattacattgaagctacgagtgagtacgctaagtgtcttcgtttgctagcaacaaaagtcttcaaggctctctctatcgccctaggcttagagcctgaccgtctagagaaagaagtgggcggtatagaagagcttctcctccaaatgaagatcaattattacccgaaatgccctcagcctgagctagcacttggcgtggaagctcacaccgatgtaagcgctctgaccttcattctacacaacatggttccgggtttgcagctgttctacgagggtaaatggatcattgcaaaatgtgttcctgattcgattgtgatgcatattggagatacgttagagattcttagtaacgggaggtttaagagtatacttcaccgtggattggtgaataaggagaaggtaaggatttcttgggctgtgttttgtgaaccaccaaaggataagattgtgcttaagccgttgccggagatggtgagtgttgagtctccggctaagtttcctccaaggacgtttgctcagcatattgagcataagttgtttaggaacaagcaagaggagttggtaactgagaaaaaggatgaagtctga

SEQ ID NO: 24965 - protein, 358 aa, Brassica napus
MVAVERVESLAKSGISSIPKEYIRPKEELESINDVFQEEKKEDGPQVPTIDLQDIESEDETIREKCIEELKKAAMDWGVMHLINHGIPVELMERVKKSGEEFFGLPVEEKEKYANDQASGKIQGYGSKLANNASGQLEWEDYFFHLVYPEDKRDLSLWPKTPTDYIEATSEYAKCLRLLATKVFKALSIALGLEPDRLEKEVGGIEELLLQMKINYYPKCPQPELALGVEAHTDVSALTFILHNMVPGLQLFYEGKWIIAKCVPDSIVMHIGDTLEILSNGRFKSILHRGLVNKEKVRISWAVFCEPPKDKIVLKPLPEMVSVESPAKFPPRTFAQHIEHKLFRNKQEELVTEKKDEV

SEQ ID NO: 24966 - DNA, 948 bp, Glycine max
  CDS (1)..(948)
atgactaacttcccattgatcaacttggagaagctcagtggtgaggaaagaaacgataccatggaaaaaattaaagatgcttgtgaaaactggggattctttgagctggtgaatcatggcattcctcatgacatattggacactgtggagaggttgaccaaagagcactacaggaaatgcatggaagagaggttcaaggaatttatggcaagcaaaggtctagatgctgtccaaactgaggtcaaggatatggattgggagagcaccttccacttgcgtcacctccctgaatcaaacatctcagagatccctgatctcattgatgagtacaggaaagtgatgaaggattttgctttgaggttagagaaactagcagagcagctgttggacttgttgtgtgagaatcttggcctagagaaagggtacctcaagaaggctttctatggatcaagaggaccaacttttggcaccaaggttgccaactaccctccatgccccaacccagacctggtgaagggtcttcgtccccacactgatgccggtggaattatccttctcttccaggatgacaaggtcagtggactgcagcttctcaaagatggccagtgggttgatgtgcctcctatgcgccactccattgttgttaacattggtgatcagcttgaggttatcaccaatggtaagtacaagagtgtggagcaccgtgtgatagcacaaacagatgggaccagaatgtccattgcctcattctataaccctggcagtgatgctgtcatctaccctgctccagaattgttggagaaagaggcagaagagaaaaaccagctctacccaaaatttgtgtttgaagactacatgaagctatatgctaagttgaagttccaggccaaggagccaagatttgaagcctttaaagcatcaaattttggtccaattgcaactgtttaa

SEQ ID NO: 24967 - protein, 315 aa, Glycine max
MTNFPLINLEKLSGEERNDTMEKIKDACENWGFFELVNHGIPHDILDTVERLTKEHYRKCMEERFKEFMASKGLDAVQTEVKDMDWESTFHLRHLPESNISEIPDLIDEYRKVMKDFALRLEKLAEQLLDLLCENLGLEKGYLKKAFYGSRGPTFGTKVANYPPCPNPDLVKGLRPHTDAGGIILLFQDDKVSGLQLLKDGQWVDVPPMRHSIVVNIGDQLEVITNGKYKSVEHRVIAQTDGTRMSIASFYNPGSDAVIYPAPELLEKEAEEKNQLYPKFVFEDYMKLYAKLKFQAKEPRFEAFKASNFGPIATV

SEQ ID NO: 24968 - DNA, 1101 bp, Brassica napus
  CDS (1)..(1101)
atggtgaccaaaaactctgttgaattcgatccgtatatcgaacgaaaggctttcgatgagacgcaagaaggagtcaaagggctggtcgacgccaaaatcgccgaagtccctcgtatcttccacattcctcaagcttccttgaccgaaaagaaaccttctgtctctgtttcagatctagagatccctatcatcgactttgcaagcgtccacgtggacacagcgtcacgtgaagccgtggtagagaaggttaaatacgcggcggagaagtggggattcttccaggtcatcaaccatggtgttcctttgaacgttcttgaagagattcaagatggagttcgtaggtttcacgaggaagatcctgaggtcaagaaacaatacttctcccgtgataacgccaacaaaaagtttgtctacaatagtaactttgatctatacagttcctcgccatctgttaactggagagatactttcacttgttacctagctccagatcctccatctcctgaggaactcccagtgacttgcagggatgctgtgttcgaatactcaaaacatgtgatgagtttaggtggtttactctgcgaacttttttcagaagcactaggtctagaatctgagatacttaagagcaaggggtgcttgaagactttgtttatggtctgccattattacccaccttgtccaaaacctgacctaactttggggataagtaaacactcagacaactccttcctcacggttcttcttcaagacaacatcggtggtctacaaattcttcatcaagactcttgggttgatgtggctcctcttcctggatctctcgtcatcaacattggagatttcttgcagctgataacgaacgataagtttgtaagtttggagcatagagtgcttgcgaatagacaaggaccaaggatttcaattgcatgcttttttagctcaagtaaacatgccaattccacagtttatggaccaatgaaagagcttgtgtctgaagaaaaccctccaaaatacagagacattaccataaaagaatacacagaaggatactttgagaaaggtctggatggaacatcacatctcttgaatttcaggatatga

SEQ ID NO: 24969 - protein, 366 aa, Brassica napus
MVTKNSVEFDPYIERKAFDETQEGVKGLVDAKIAEVPRIFHIPQASLTEKKPSVSVSDLEIPIIDFASVHVDTASREAVVEKVKYAAEKWGFFQVINHGVPLNVLEEIQDGVRRFHEEDPEVKKQYFSRDNANKKFVYNSNFDLYSSSPSVNWRDTFTCYLAPDPPSPEELPVTCRDAVFEYSKHVMSLGGLLCELFSEALGLESEILKSKGCLKTLFMVCHYYPPCPKPDLTLGISKHSDNSFLTVLLQDNIGGLQILHQDSWVDVAPLPGSLVINIGDFLQLITNDKFVSLEHRVLANRQGPRISIACFFSSSKHANSTVYGPMKELVSEENPPKYRDITIKEYTEGYFEKGLDGTSHLLNFRI

SEQ ID NO: 24970 - DNA, 1134 bp, Brassica napus
  CDS (1)..(1134)
atggaatgcatcacaaagctccctttcaatgaaaatgaaaccgaagatagccttttgacgacctttgattcaatggtcctacatgatcaagaaaaccaagtacctcaagagtttgtatggcccgaccatcagaaaccctctccaaacgttccaatcctccaagtccctctcattgaccttgctggcttcctctccgaggacccattcttggtctcggaggctacaagacttgtggcagaaggtgcaaagcaacatggtttcttcttggtcaccaaccatggagtcgatgagaggctcctgtccagtgcctatacatctatggacaaattctttttgtcaccgacttgtgagaaacagaaggctctgggggagtggcgtgaaagctggggttacgctaatagctatttcgggaaatacaagaagaatctaccctggaaggaaatgctgtcgttttctttctccccggaggagaagaccgataaccactctcaaatcgtcaaagatttcattattgaaaaaatgggtgacggatacaatgattttgggagggtatatcaagaatacggcgaggccatgagcaatctctcattgaagatcatggagcttcttggaatgagtcttggccttaatagaagccatttcaaagatttttttgaagacaatgaatcgatattgagattgaattactatccaaagtgcaagcaaccagatgttgtactagggacaggaccacactgcgacccaacctctctaaccatacttcaacaagaccacgtcagtggtcttcaagttttagtggacaaccaatggcattctgtccctcctaaccctcaagcgttggtggttaacattggcgacactttcagggctcttaccaacggaatatacaagagttctttgcatcaggcggtagtgaatagcgagacggaaagaaagacaattgcattcttcctatctccaaaagtggacaaagtggtgaagccaccagaggaattagaaggtgaaagagtgtatccagattttacatggtctatgcttcatgagttcgtaaagaaacactataaaacagacgagaacacgcttgaagagttcacaaaatggctcaaaaaggcggaaacctctaatgaaggataa

SEQ ID NO: 24971 - protein, 377 aa, Brassica napus
MECITKLPFNENETEDSLLTTFDSMVLHDQENQVPQEFVWPDHQKPSPNVPILQVPLIDLAGFLSEDPFLVSEATRLVAEGAKQHGFFLVTNHGVDERLLSSAYTSMDKFFLSPTCEKQKALGEWRESWGYANSYFGKYKKNLPWKEMLSFSFSPEEKTDNHSQIVKDFIIEKMGDGYNDFGRVYQEYGEAMSNLSLKIMELLGMSLGLNRSHFKDFFEDNESILRLNYYPKCKQPDVVLGTGPHCDPTSLTILQQDHVSGLQVLVDNQWHSVPPNPQALVVNIGDTFRALTNGIYKSSLHQAVVNSETERKTIAFFLSPKVDKVVKPPEELEGERVYPDFTWSMLHEFVKKHYKTDENTLEEFTKWLKKAETSNEG

SEQ ID NO: 24972 - DNA, 1062 bp, Brassica napus
  CDS (1)..(1062)
atgggagtactcgacgaagcttttatccaagctccagaacacagacccaaaactcatctcacacactccggtgactacattctctccaaggagatcccgaccatcgatctctcctctctccaagacccaaactgcgacaagacagcgctagcgacagagattgcagaagcatgcatgagatggggctttttccaggtgatcaaccatggtttgtcgttggacttaatgcgtagggtggagaagacggtggccgagtttttcagtctaacgttggaggagaagagaagagtgaaaagagatgaagtgaaccctatgggttatcacgacggagaacataccaaaaacgttagagactggaaagagattttcgatttctttctgcaggactcgacgacggttccggcgactacagagccggaagataccgagctcaggaagctgactaacccgtggcctcaaaacccttccgacttcagagaggtgtgccaagaatatgcaagagaagttgagaagttagctttcaagcttttggaacttatctccattagcttgggtctacccggtgatcggttaacaggttacttcaaggaccaaacaagctttttgcggtttaaccattaccctccttgcccgaacccggagctagcattaggcgttggacgccacgcagacgcaggagttataaccgtcttggcacaagatagtgtgggtgggttacaagtgagccgtagatcagatggacaatggttctctgtgaaacccaaccctgatgctttcatcattaacattggcaactgcatgcaggtatggacaaatgacaagtattggagtgcagaacatagagtggtagtgaattcaagcaaagagagattctcaatgccattcttccttttcccatcccacgataccaacattgagccattgaaggagcttataagcgaagacaacccgccttgttacaaaaagtacaattggggcaagttctttgctgcaagaaacagaagtgattacaagaagctccaaactgagagcatccagattgatcgcttcaaggccgcttaa

SEQ ID NO: 24973 - protein, 353 aa, Brassica napus
MGVLDEAFIQAPEHRPKTHLTHSGDYILSKEIPTIDLSSLQDPNCDKTALATEIAEACMRWGFFQVINHGLSLDLMRRVEKTVAEFFSLTLEEKRRVKRDEVNPMGYHDGEHTKNVRDWKEIFDFFLQDSTTVPATTEPEDTELRKLTNPWPQNPSDFREVCQEYAREVEKLAFKLLELISISLGLPGDRLTGYFKDQTSFLRFNHYPPCPNPELALGVGRHADAGVITVLAQDSVGGLQVSRRSDGQWFSVKPNPDAFIINIGNCMQVWTNDKYWSAEHRVVVNSSKERFSMPFFLFPSHDTNIEPLKELISEDNPPCYKKYNWGKFFAARNRSDYKKLQTESIQIDRFKAA

SEQ ID NO: 24974 - DNA, 966 bp, Brassica napus
  CDS (1)..(966)
atggagagttttccaatcatcaatctcgagaagcttaatggagaagagagaggactcacgatggagaagatcaaagacgcttgtgaaaactgggggttctttgagtgcgtgaaccatgggattccacatgaactacttgacagagtggagaagatgaccaaggaacactacaagaagtgcatggaagacagattcaaggagtccattaagaacagaggactcgactctgttcggtctgaagtcaatgacgttgactgggagtcaactttctaccttaagcaccttcctgcctccaatatatcccatgtccctgatctcgacgacgattacaggacgttgatgaaagagttcgccggtaagatagagatgttgtcggaggagctattggatctgctttgcgagaatcttggattggagaagggttatctgaagaaggtgttttacgggtcgaaaagcccgacttttggaaccaaagtgagcaactatccaccttgtcctaaaccggatttaataaaggggctccgcgcacataccgacgcaggcggcatcatcctcctcttccaggacgataaagtcagtggacttcagctccttaaggacggcgagtgggtcgatgttcctccggttaagcattctatcgtcgttaatctcggtgaccagcttgaggtgataaccaatgggaagtacaagagcgtggagcatagagtgatagctcagacggacggagaaggaagaatgtccattgcatcattctacaaccctggaagcgactctgttatttttccggcgccggagttgatcggaaaagagaatgagaagaaggataactatccaaaatttgtgtttgaggattacatgaaactttactctgctgtcaagtttcaggccaaagaaccaaggtttgaagccatgaaggctatggagacaactgtggccaacaatgttggaccattggccactgcctaa

SEQ ID NO: 24975 - protein, 321 aa, Brassica napus
MESFPIINLEKLNGEERGLTMEKIKDACENWGFFECVNHGIPHELLDRVEKMTKEHYKKCMEDRFKESIKNRGLDSVRSEVNDVDWESTFYLKHLPASNISHVPDLDDDYRTLMKEFAGKIEMLSEELLDLLCENLGLEKGYLKKVFYGSKSPTFGTKVSNYPPCPKPDLIKGLRAHTDAGGIILLFQDDKVSGLQLLKDGEWVDVPPVKHSIVVNLGDQLEVITNGKYKSVEHRVIAQTDGEGRMSIASFYNPGSDSVIFPAPELIGKENEKKDNYPKFVFEDYMKLYSAVKFQAKEPRFEAMKAMETTVANNVGPLATA

SEQ ID NO: 24976 - DNA, 1134 bp, Glycine max
  CDS (1)..(1134)
atggtagtcacaaacacaaaccagttaggggaaaccattgattccacttatgataggaaagctgaaaagaaagcctttgatgattcaaaagctggtgttagaggtcttgtagagtccggagtgacgaagattcctcgcatgtttcatgctggcaagctggatgtcattgaaacctcacctagtcacaccaagttgagtatccccatcatagacctcaaggacatacactctaatccagctctgcatacacaagtaatgggcaaaattcgaagtgcatgccatgagtggggatttttccaggtgattaatcatggaattccaatcagtgtcttggatgagatgattggtggaattcgtagatttcatgaacaagatgctgaggtaaggaaagagttctacactcgggatacaaagaaaaaagttgcgtactattccaaccataacttgcacagtgacaaacctgttaattggagagatacatttggttttgctgttgctcctgatccacccaaacctgaagaaataccatctgtatgcagggatattgtgattgagtatacaaagaaaataagggatgtgggttttacaatctttgagttattgtcagaagctttgggacttaactcttcttaccttaaagaattgaattgtggtgaaggactctttactgtgggtaactactatccagcatgccctgaacctgaattaactatgggcactaccaagcacacagatagtaacttcatgactttacttctacaagaccaaattggtggtcttcaagttcttcatcaaaatcaatgggtcaatgttcctccggtacatggagctcttgttgtaaacataggagatcttctacagcttatcacaaatgacaagtttgtcagtgtgtatcaccgtgtcttatcacagaacacaggcccaagaatatctgtagcaagcttctttggaaccttctttggacattcacatgacccagttgaaggtacacaaaagatatatggtccaattaaggaactaatttcagaagaaaacccaccaatctacagagacacaaccataaaagagttcgtggcatactactatgcaaaggcccttgatggaaaatcttccttgaaccccttcagggtgtga

SEQ ID NO: 24977 - protein, 377 aa, Glycine max
MVVTNTNQLGETIDSTYDRKAEKKAFDDSKAGVRGLVESGVTKIPRMFHAGKLDVIETSPSHTKLSIPIIDLKDIHSNPALHTQVMGKIRSACHEWGFFQVINHGIPISVLDEMIGGIRRFHEQDAEVRKEFYTRDTKKKVAYYSNHNLHSDKPVNWRDTFGFAVAPDPPKPEEIPSVCRDIVIEYTKKIRDVGFTIFELLSEALGLNSSYLKELNCGEGLFTVGNYYPACPEPELTMGTTKHTDSNFMTLLLQDQIGGLQVLHQNQWVNVPPVHGALVVNIGDLLQLITNDKFVSVYHRVLSQNTGPRISVASFFGTFFGHSHDPVEGTQKIYGPIKELISEENPPIYRDTTIKEFVAYYYAKALDGKSSLNPFRV

SEQ ID NO: 24978 - DNA, 1071 bp, Glycine max
  CDS (1)..(1071)
atgatggcggaatcgggcgaggaagagatagttggtaaacctgtccaagagctgctgttgaatcccgaaaatctaccaaaaaattacatctacgaggaaggtggtgctggatttcgtgatgctcttgtgccatcacaggatgatgatattccggtgatcgaccttcatcgcctttcatcttcatccatctcacaacaagagcttgctaaactccaccatgcactccattcatggggctgcttccaggcaataaaccatggaatgaaaagctcatttctggacaaggtgagagaagtttcaaagcaattctttcaacttccaaaagaagaaaagcaaaaatgtgcgagggaaagggaaccaaacaatattgaagggtatggcaatgatgtaatatattcaaaaaaccaaaagcttgactggactgacagaatttacctaaaaatgttgcctgaagatgagaggaagttcaatttttggccccaaacccctaatgatttcaggagtactgtcctacagtataccgaaagcctaaggctgctaagtgaagtaatccttaaagccatggcaaagtcactgaacttggaagaggattgcttcctaaacgaatgtggagagagatctaatatgattgtgagggtcaactactaccctccatgtccaatgcctgatcatgttcttggcgtgaagccacatgcagatggatccaccataacttttctgttgcaagacaaagaagtagaaggcctccaagtcctcaaagatgatcagtggtttaaagttccaataatccctgatgctctcctgattaatgtcggtgaccaaatagagataatgagcaatggaatcttccggagcccagtacatagggtagtgataaataaagcgaaggaaaggctcacagtagcaatgttctgcgtcccggattcagaaaaagagattaaaccagtggataagctagtcaacgagtcaaggccagtgttatacagaccggtgaaaaattatgttgaaatctatttccagtattaccagcaaggaaaaagaccaatcgaagcttcaaaaattaccttttga

SEQ ID NO: 24979 - protein, 356 aa, Glycine max
MMAESGEEEIVGKPVQELLLNPENLPKNYIYEEGGAGFRDALVPSQDDDIPVIDLHRLSSSSISQQELAKLHHALHSWGCFQAINHGMKSSFLDKVREVSKQFFQLPKEEKQKCAREREPNNIEGYGNDVIYSKNQKLDWTDRIYLKMLPEDERKFNFWPQTPNDFRSTVLQYTESLRLLSEVILKAMAKSLNLEEDCFLNECGERSNMIVRVNYYPPCPMPDHVLGVKPHADGSTITFLLQDKEVEGLQVLKDDQWFKVPIIPDALLINVGDQIEIMSNGIFRSPVHRVVINKAKERLTVAMFCVPDSEKEIKPVDKLVNESRPVLYRPVKNYVEIYFQYYQQGKRPIEASKITF

SEQ ID NO: 24980 - DNA, 1122 bp, Glycine max
  CDS (1)..(1122)
atgacggcatgccaagattggccagagccagtgattcgagtccaagccttggctgcaagtggcttaaccacaatccccgaacgtttcataaagcctaagtcccaaagacccactaatagtaacaattatgctccaaagaccaatttctctcaaattggtcatcataagaacaataccaccaacagcaacatcccagtgattgacatgaagcacatctacagtggtgacgagggaaggagggctgagacgctccggctcgtgtcggaggcatgccaggaatggggttttttccaggtggtgaaccatggggtgagccatgagttgatgaagggggcgagggaggtgtggagggagttctttcagcagccacttgaggtgaaagaggtgtatgccaatacacccctcacttatgaagggtatggaagcaggttgggagtgaacaaaggggccattttggattggagtgactacttctttctccatcacatgccttgttcccttagggaccaagccaagtggccggccctcccaacatccttaaggaacattatctctgaatatggtgagcaagttgttatgctaggaggaaggatacttgagatattgtccataaatcttgggcttagagaggattttctcctaaatgcatttggtggggaaaatgaccttggtgcttgcttaagggtgaatttctaccctaaatgcccacaacctgacctcactcttggcttgtcctctcactcagatcctggtggcatgaccattcttctccctgatgaaaatgtatcaggacttcaagtacgcagaggagaagattgggtcactgttaagccagtcccaaatgctttcatcatcaacatgggtgaccaaattcaggtgctgagcaatgcaacttacaagagtatagagcacagggtgatcgtgaactcagacaaagatcgcgtttcattggcctttttctataaccccaggagcgatataccgatccaaccagccaaggagcttgtgactaaggataggccagcactatacccaccaatgacatttgatgagtatagactttacattaggacaagaggaccaagtggaaaagctcaagttgaatctttgacttccaaatga

SEQ ID NO: 24981 - protein, 373 aa, Glycine max
MTACQDWPEPVIRVQALAASGLTTIPERFIKPKSQRPTNSNNYAPKTNFSQIGHHKNNTTNSNIPVIDMKHIYSGDEGRRAETLRLVSEACQEWGFFQVVNHGVSHELMKGAREVWREFFQQPLEVKEVYANTPLTYEGYGSRLGVNKGAILDWSDYFFLHHMPCSLRDQAKWPALPTSLRNIISEYGEQVVMLGGRILEILSINLGLREDFLLNAFGGENDLGACLRVNFYPKCPQPDLTLGLSSHSDPGGMTILLPDENVSGLQVRRGEDWVTVKPVPNAFIINMGDQIQVLSNATYKSIEHRVIVNSDKDRVSLAFFYNPRSDIPIQPAKELVTKDRPALYPPMTFDEYRLYIRTRGPSGKAQVESLTSK

SEQ ID NO: 24982 - DNA, 939 bp, Brassica napus
  CDS (1)..(939)
atggcgattcctgggattgatttctccaagatcaatggcgaaaaaagggaaaagacactctctgaaatcgctaaagcttgcgaagaatggggattttttcagctggtgaaccatgggattccattggagcttcttaacaaggtgaaaaagctggcctcagactgctacaaaacggagagagaagaagcgttcaaaacctcaactcccgtgaagctactcaacgaactgcttgagaaaaactctggagagaagctcaagaacgttgactgggaagatgtcttcactctcttagaccacagccaaaacgaatggccatcaaacacttccaacttcaaagagacgatggtagaatacagaggagaagtgaggaagctagcgagcaagatgatggaagtgatggacgagaacttgggcttacctaaaggttacataaagaaagcttttaacgaagggatggaagatggagaagagacggctttctttggaaccaaagtcagccattacccaccttgtcctcatcctgagctcgtcaatggccttcgagctcatactgatgcaggaggtgtcgttttgctgttccaagacgatgagtacgatggtcttcaggtgttgaaagatggagagtggatcgatgttcagccgctgcctaatgctattgttatcaacactggtgatcagattgaagttcttagcaatggaaggtacaagagtgcatggcacagagtgttggccagggaaaatggaaaccggaggtcaatagcttccttctacaacccgtcgtacaaggcggccattggtccaccggagatgacggcagcggcggaggaaggaagtgagaagaagtatccaaagtatgtgtttggagattatatggatgtctatgcaaaccagaagttcatgcctaaagagcctcgttttctagctgtaaagactctctga

SEQ ID NO: 24983 - protein, 312 aa, Brassica napus
MAIPGIDFSKINGEKREKTLSEIAKACEEWGFFQLVNHGIPLELLNKVKKLASDCYKTEREEAFKTSTPVKLLNELLEKNSGEKLKNVDWEDVFTLLDHSQNEWPSNTSNFKETMVEYRGEVRKLASKMMEVMDENLGLPKGYIKKAFNEGMEDGEETAFFGTKVSHYPPCPHPELVNGLRAHTDAGGVVLLFQDDEYDGLQVLKDGEWIDVQPLPNAIVINTGDQIEVLSNGRYKSAWHRVLARENGNRRSIASFYNPSYKAAIGPPEMTAAAEEGSEKKYPKYVFGDYMDVYANQKFMPKEPRFLAVKTL

SEQ ID NO: 24984 - DNA, 1149 bp, Glycine max
  CDS (1)..(1149)
atgagttgccaagcatggcccgaacccatagttcgagtccaatccttagctgaaagtggcctaagttcaatcccttcacgctacattaggcctcactcccaaagaccctccaataccacttcttttccaactcctaaaccttttcaaactgatcatcatcatggtcatgatcagaaaacttccgatcatgaccatgatcatgatcatgttaacattcccgtcattgacctgaaacatgttttctcggaggatccgatcctccgagaaaagatattccgacacgtggacgaggcgtgtcgggagtgggggttcttccaggtggtgaaccatggggttagccatgagttgatgaaaagttctagggaactgtggcgcgagttcttcaaccagccacttgaggtgaaggaggagtatgccaactcccccaccacttatgagggctatggaagtcgcttgggagtgcagaaaggtgccaccttggactggagtgactacttctttctccattacaggcctccctcacttaggaaccaagctaagtggcttgcatttccacaatcctttaggaaagtgattgctgaatatggggaggaagtggttaagctaggaggaaggatactcaaaatgatgtcaataaaccttggtttgaaagaagatttccttctcaatgcatttgggggagagagtgaggttggtgcatgcctaagggtgaatttctatccaaagtgccctcaacctgacctcacttttggactctcccctcactcagaccctggtggcatgaccattcttctctctgatgattttgtgtctggccttcaagtaagaagaggagatgaatgggtcatagttaagcctgtcccaaatgcattcgtcatcaacattggtgaccaaattcaggtgctgagcaatgcaatatacaagagtgtagaacacagggtgattgtgaactcaaacaaagatcgtgtgtccttggccttgttctacaacccgaggagtgatttactcattcaacctgccaaggagcttgtgacagaggagaagccagccttgtactcaccaatgacctatgatgaatacagactttacattaggctaaatggaccttgtggaaaggcccaagttgaatcattggcctcccaaacatga

SEQ ID NO: 24985 - protein, 382 aa, Glycine max
MSCQAWPEPIVRVQSLAESGLSSIPSRYIRPHSQRPSNTTSFPTPKPFQTDHHHGHDQKTSDHDHDHDHVNIPVIDLKHVFSEDPILREKIFRHVDEACREWGFFQVVNHGVSHELMKSSRELWREFFNQPLEVKEEYANSPTTYEGYGSRLGVQKGATLDWSDYFFLHYRPPSLRNQAKWLAFPQSFRKVIAEYGEEVVKLGGRILKMMSINLGLKEDFLLNAFGGESEVGACLRVNFYPKCPQPDLTFGLSPHSDPGGMTILLSDDFVSGLQVRRGDEWVIVKPVPNAFVINIGDQIQVLSNAIYKSVEHRVIVNSNKDRVSLALFYNPRSDLLIQPAKELVTEEKPALYSPMTYDEYRLYIRLNGPCGKAQVESLASQT

SEQ ID NO: 24986 - DNA, 1059 bp, Glycine max
  CDS (1)..(1059)
atgggagaggtagacccagctttcatccaagacctagaacacagaccaaagctctctcccaaccaagcagaaggaattcccataattgacctctctccaatatccaaccacacagtttcagatccatcttccattgaaaacttagtgaagcagatagaaagtgcatgcaaggagtggggtttcttccaagtaaccaaccatggggtgcccctcactctaaggcaaaacattgagaaagcctcaagattgttctttgcacagaatttggaggagaaaagaaaggttagcagagatgagagttctccaaatggttactatgacacagaacacaccaagaacattagggactggaaagaagtctttgattttcaagccaaagaccccactttcatccctgtcacttttgatgaacatgatgatcgagtcactcactggactaatcattctcctcaataccctccaaactttagggatataatcgaagagtatgttcaagaggtggaaaagctgtcctttaagctgttggagattatagctctgagcttaggccttgaggcaaagaggtttgaagagtttttcatcaaagatcaaactagctttattcgactcaaccactatcctccatgcccttcccctcatctagctcttggtgttggccgacacaaggatggtggagccttaaccgttcttgcacaagatgaggttggaggacttgaagtgaaacgcaaagcagatcaagagtggataagagtgaaacctacaccagatgcttatataatcaacgttggtgatcttattcaggtttggagcaatgatgcctatgagagtgtggaacacagagtgatggttaactctgagaaagaaaggttttctattccgtttttcttcaaccctgcacatgacatagaagtcaagcctttggaggagttgacaaatgaacacaatccttcaaaatataggccatacaaatggggcaagtttcttgttcacagaaagggaagcaatttcaagaaacagaatgtggaaaacattcagatttatcattataagatagcctaa

SEQ ID NO: 24987 - protein, 352 aa, Glycine max
MGEVDPAFIQDLEHRPKLSPNQAEGIPIIDLSPISNHTVSDPSSIENLVKQIESACKEWGFFQVTNHGVPLTLRQNIEKASRLFFAQNLEEKRKVSRDESSPNGYYDTEHTKNIRDWKEVFDFQAKDPTFIPVTFDEHDDRVTHWTNHSPQYPPNFRDIIEEYVQEVEKLSFKLLEIIALSLGLEAKRFEEFFIKDQTSFIRLNHYPPCPSPHLALGVGRHKDGGALTVLAQDEVGGLEVKRKADQEWIRVKPTPDAYIINVGDLIQVWSNDAYESVEHRVMVNSEKERFSIPFFFNPAHDIEVKPLEELTNEHNPSKYRPYKWGKFLVHRKGSNFKKQNVENIQIYHYKIA

SEQ ID NO: 24988 - DNA, 1059 bp, Glycine max
  CDS (1)..(1059)
atgggagaggttgacgcagcattcatccaagacccaccacacaggccaaagctctccaccatccaagccgaaggaattcccataattgatctctctccaataaccaaccacagagtttcagacccttctgctattgaaggcttagtgaaggagataggtagtgcatgcaacgagtggggtttcttccaagtaacaaaccatggagtgcccctcactctaaggcaaaacattgagaaagcctcaaaattgttctttgcacagagtgcggaggaaaagagaaaggttagcagaaatgagagctctccagcgggttattatgacacagaacacaccaaaaacgttagggactggaaagaagtctttgattttctagccaaagaacccactttcattcctgtcacttctgatgaacatgatgatcgagtcaatcagtggactaatcaatcccctgaataccctctaaactttagggttgtaacacaagagtatattcaagagatggaaaagctgtcctttaagattttagagcttatagctttgagcttaggccttgaagcaaagaggtttgaagaatttttcatcaaagaccaaactagctttattcgactcaaccactatcctccatgcccttatcctgaccttgctcttggcgtcggtcgacacaaggaccctggtgccttgaccattcttgcacaggacgaagttggaggacttgaagtgagacgtaaacgggatcaagagtggattagagtgaaaccaaccccaaatgcttatattatcaacattggtgatactgttcaggtttggagcaatgatgcatatgagagtgtggatcacagagtggtggtcaactctgagaaggaaaggctttccattccgttcttcttcttccctgcacacgacaccgaagtaaagcctttggaggagctgataaatgagcaaaacccttcaaaatataggccatacaattggggcaagtttcttgtccacagagggaacagcaatttcaagaagcaaaatgaggagaacattcaaatttatcattacaagatagcttaa

SEQ ID NO: 24989 - protein, 352 aa, Glycine max
MGEVDAAFIQDPPHRPKLSTIQAEGIPIIDLSPITNHRVSDPSAIEGLVKEIGSACNEWGFFQVTNHGVPLTLRQNIEKASKLFFAQSAEEKRKVSRNESSPAGYYDTEHTKNVRDWKEVFDFLAKEPTFIPVTSDEHDDRVNQWTNQSPEYPLNFRVVTQEYIQEMEKLSFKILELIALSLGLEAKRFEEFFIKDQTSFIRLNHYPPCPYPDLALGVGRHKDPGALTILAQDEVGGLEVRRKRDQEWIRVKPTPNAYIINIGDTVQVWSNDAYESVDHRVVVNSEKERLSIPFFFFPAHDTEVKPLEELINEQNPSKYRPYNWGKFLVHRGNSNFKKQNEENIQIYHYKIA

SEQ ID NO: 24990 - DNA, 1038 bp, Zea mays
  CDS (1)..(1038)
atggagaatatgctccacctagccccgtcgtcgtcccaggcattggccttggaccgctcctccgtcttctcgcgtgagcacgtgccgccggccgtctccgctgtcacctccctgccagttatcgacatgtctcgcagccgcgacgaggtccgccgcgctatcctcgacgccggcatggagttcggcttcttcctggtggtggagcacggcatcccagaggaggtgatgcgcgacatgctggaggtgtgcgaggagttcttccagctgccggcggcgagcaaggcgtacatgtactcggaggacagtcagaggcccaaccggatcttctccggcacaacctacgacacgggcggcgacaagtactggcgggactgcctccgcctcgcctgcccctcgtccttcccggtcggcagcggcacaagggacgactggccgcacacgccccagcggctgaggggtgtcgtggagcgtttcaccgctctgaccagagggctgggggtggagctgctgcggctgctgtccgaggccatggggatccggcccgactacttcgagggcgacatcagcgccggcgacgtggtcctcaacgtcaaccactaccctccgtgccccagcccggagaagacgctcggcctgccgccacattgcgaccgcaacctcatcaccctcctcctccaaggctccgtctacggcctcgacgtcgcctacaggggagagtggataaaggtcgagcccatgcccggtgccttcgtcgtcaacttcggccagcaactcgaggtggtgaccaacggattgctgaagagcgttgagcaccgcgtggtgaccagctcgacgctggcgcggacggcggtggccacattcatcatgcccaccccagactgcctcatcggcccgtcaaaggagttcctcgccggggacaagccaccgtgctaccgcaccatcaggttcggtgacttcatgcgcatgtacaacactgtcaagctggggtcatccatcaaccagactacagatcttaagaatatccagaagaagatatga

SEQ ID NO: 24991 - protein, 345 aa, Zea mays
MENMLHLAPSSSQALALDRSSVFSREHVPPAVSAVTSLPVIDMSRSRDEVRRAILDAGMEFGFFLVVEHGIPEEVMRDMLEVCEEFFQLPAASKAYMYSEDSQRPNRIFSGTTYDTGGDKYWRDCLRLACPSSFPVGSGTRDDWPHTPQRLRGVVERFTALTRGLGVELLRLLSEAMGIRPDYFEGDISAGDVVLNVNHYPPCPSPEKTLGLPPHCDRNLITLLLQGSVYGLDVAYRGEWIKVEPMPGAFVVNFGQQLEVVTNGLLKSVEHRVVTSSTLARTAVATFIMPTPDCLIGPSKEFLAGDKPPCYRTIRFGDFMRMYNTVKLGSSINQTTDLKNIQKKI

SEQ ID NO: 24992 - DNA, 996 bp, Zea mays
  CDS (1)..(996)
atggtggtgctcgccaaaccgcctgtcgtcgaccagatcccgctcctgcggtccccgggccccagggacagcttctcgggagtgccggtcgtcgacctgtccagccacggcgcggcgcgggcgatcgtcgacgcctgcgagcgcttcgggttcttcaaggtcgtcaaccacggcgtggccgcggccaccatggacagggccgagtccgaggccgtcaggttcttcgcgcaggcgcaggcggacaaggaccgcgcggggccggcgtacccgttcgggtacggcagcaagcggatcgggctcaatggcgacatggggtggctcgagtacctcctcctcgccgtcgacgccgcgtcgctctccgacgcctgccccgtgccctccagcgccgcgttccggagcgcgctgaacgagtacgtcgcggccgtgcggaaggtggcggcgcgtgtgctggaggcgatggcggagggcctgggcattgcggacgcggacgcgctgagctccatggtgagcggcgccgggagcgaccaggtgttccgcgtgaaccactacccgccctgccccgcgctgcagggcctgggctgcagcaccacgggcttcggcgagcacaccgacccgcagatcatctccgtgctccgctccaacggcacctccggcctgcagatcgcgctccgcgacggcgcgcagtgggtctccgtgccctccgaccgcgacgccttcttcgttaacgtcggcgactcgttgcaggtgctgaccaacgggaggttcaggagcgtgaagcaccgggtggtgaccaacagcctcaagtccagagtttccttcatctacttcgcggggccgccgctggggcagcggatcgcgccgctgccgcaggtgctggcggagggagaggagagcctgtacaaggagttcacgtggggcgagtacaagaaggccgcgtacaagacgaggctcggcgacaacaggctggcccagtttgagaagcgtagcaacatctag

SEQ ID NO: 24993 - protein, 331 aa, Zea mays
MVVLAKPPVVDQIPLLRSPGPRDSFSGVPVVDLSSHGAARAIVDACERFGFFKVVNHGVAAATMDRAESEAVRFFAQAQADKDRAGPAYPFGYGSKRIGLNGDMGWLEYLLLAVDAASLSDACPVPSSAAFRSALNEYVAAVRKVAARVLEAMAEGLGIADADALSSMVSGAGSDQVFRVNHYPPCPALQGLGCSTTGFGEHTDPQIISVLRSNGTSGLQIALRDGAQWVSVPSDRDAFFVNVGDSLQVLTNGRFRSVKHRVVTNSLKSRVSFIYFAGPPLGQRIAPLPQVLAEGEESLYKEFTWGEYKKAAYKTRLGDNRLAQFEKRSNI

SEQ ID NO: 24994 - DNA, 957 bp, Glycine max
  CDS (1)..(957)
atggagaactttccagttgttgacatggggaaccttaataatgaagagagatcagcaaccatggagataatcaaagatgcctgtgagaactggggtttctttgagttggtgaaccatgggatatccatagagttgatggacaccgtggagaggatgacaaaagagcactacaaaaagtgtatggagcaaaggttcaaagaaatggtagcaagcaaaggtttggagtctgctcaatctgaaatcaatgatttggattgggaaagcactttctttttgcgccaccttcctgcctctaacatctcagagatccctgatcttgatgaagattacaggaaggtaatgaaggattttgctgtggaactggagaaactggcggagctagttcttgagttgctgtgtgagaatcttgggctagagaaagggtatctgaagaaggtgttctgtgggtcaaagggaccaaattttggaacaaaagtgagcaactaccctccatgtccgaagccagagctgataaaggggctgagagcccacacagatgctggtggcatcattctactcttccaagatcacaaggtcagtggattgcagctcctcaaggatgcccactggattgatgtccccccaatgcgccactccattgtcatcaaccttggagatcaacttgaggtcatcaccaatggcaaatacaagagtgtgatgcaccgtgtaattactcaaacggatggtaatagaatgtccatagcctcgttttacaatccaggcaatgatgcattgatcgctccagcaccggccttggtgaaggaagatgagactagccaagtttatcctaagtttgtttttgatgattacatgaagctctatgctggccttaaattccaggacaaagagccaagatttgaagctatgaaggccacggagtcatccaacattaatttagggcccatagcaacggtctaa

SEQ ID NO: 24995 - protein, 318 aa, Glycine max
MENFPVVDMGNLNNEERSATMEIIKDACENWGFFELVNHGISIELMDTVERMTKEHYKKCMEQRFKEMVASKGLESAQSEINDLDWESTFFLRHLPASNISEIPDLDEDYRKVMKDFAVELEKLAELVLELLCENLGLEKGYLKKVFCGSKGPNFGTKVSNYPPCPKPELIKGLRAHTDAGGIILLFQDHKVSGLQLLKDAHWIDVPPMRHSIVINLGDQLEVITNGKYKSVMHRVITQTDGNRMSIASFYNPGNDALIAPAPALVKEDETSQVYPKFVFDDYMKLYAGLKFQDKEPRFEAMKATESSNINLGPIATV

SEQ ID NO: 24996 - DNA, 1059 bp, Glycine max
  CDS (1)..(1059)
atgggtacggtggctccaagagttgaaagcttggcgagcagcgggataaagtgtatcccgaaggaatacgtgaggcctcaagaagagctcaagagcatagggaacgtgtttgaggaggaaaagaaggaagggctacaggttccgacaattgacttgagagagatagattcggaggacgaggttgttcgagggaaatgtcgtgagaagctgaagaaagcggcggaggaatggggtgtgatgcacttggtgaaccatgggatccccgatgagctgatagagcgggtgaagaaagcaggggaaacgttctttggtctggcggttgaggaaaaggagaagtacgccaatgatcaggagtctggcaagattcaaggctatggaagcaagctggccaacaatgccagtggccaactcgagtgggaagattacttcttccaccttgctttccctgaggacaagcgtgacctctccttctggccaaagaaacccgctgattatattgaggtcacaagcgagtatgcaaagcgactgagggggcttgcgaccaagatattggaggcactctctattggattggggttggaaggacggaggttggagaaggaagttggtgggatggaagagcttctacttcaattgaagatcaactactaccctatttgtccccagccagaacttgctctgggagttgaagcccacactgatgtgagttcactcactttcctccttcacaacatggtgccaggtctgcagctattctacgaaggccaatgggtcacagcaaaatgtgtccccgattccattctcatgcacattggtgacaccattgagatcctgagcaacggcaagtacaagagcattcttcatagggggttggtgaacaaggaaaaggttagaatatcgtgggcagtgttctgtgaaccccccaaggagaagatcatcctgcagccacttcccgagcttgtcactgagacagagccagcacgctttccacctcgcacttttgctcagcatattcaccacaaactattcagaaaggatcaggaaggtctcccaaattga

SEQ ID NO: 24997 - protein, 352 aa, Glycine max
MGTVAPRVESLASSGIKCIPKEYVRPQEELKSIGNVFEEEKKEGLQVPTIDLREIDSEDEVVRGKCREKLKKAAEEWGVMHLVNHGIPDELIERVKKAGETFFGLAVEEKEKYANDQESGKIQGYGSKLANNASGQLEWEDYFFHLAFPEDKRDLSFWPKKPADYIEVTSEYAKRLRGLATKILEALSIGLGLEGRRLEKEVGGMEELLLQLKINYYPICPQPELALGVEAHTDVSSLTFLLHNMVPGLQLFYEGQWVTAKCVPDSILMHIGDTIEILSNGKYKSILHRGLVNKEKVRISWAVFCEPPKEKIILQPLPELVTETEPARFPPRTFAQHIHHKLFRKDQEGLPN

SEQ ID NO: 24998 - DNA, 1059 bp, Glycine max
  CDS (1)..(1059)
atgggagaggtagacacagctttcatccaagaaccagaacacaggccaaagctctctcccaaccaagcagaaggaattcccataattgacctctctccaataaccaaccacgcagtttcagatccatctgccattgaaaacttagtgaaggagatagaaagtgcatgcaaggagtggggtttcttccaagtaaccaaccatggggtgcccctcactctaaggcaaaacattgagaaagcctcaagactgttctttgaacagactcaggaggagaagaagaaggttagcagagacgagaaatccacaactggttactatgacacagaacacaccaagaacgttagggactggaaagaagtgtttgattttctagccaaagatcccacttttattcctgtcacttctgatgaacatgatgatcgagtcactcactggactaatgtatcccctgaataccctccaaactttagggatataatggaagagtatattcaagaggtggaaaagctgtcctttaagctgttggagattatagctctgagcttaggccttgaggcaaagaggtttgaagagtttttcatcaaagatcaaactagctttattcgactcaaccactatcctccatgcccttcccctcatctagctcttggtgttggtcgacacaaggacattggagccttaaccattcttgcacaagatgatgttggaggacttgaagtcaaacgcaaagcagatcaagagtggataagagtgaaacctacaccaggtgcttatataatcaacgttggtgatcttattcaggtttggagcaatgacttatatgagagtgtggaacacagagcgatggttaactctgagaaagaaaggttttccataccttttttcttattccctgcacactacactgaagtcaagcctttggaggagttgacaaatgaccaaaaccctgcaaaatataggccatacaattggggcaagtttcttgtccgtagaaagggcagcaatttcaagaaactaaatgtggagaatattcagatttatcattataagatagcttaa

SEQ ID NO: 24999 - protein, 352 aa, Glycine max
MGEVDTAFIQEPEHRPKLSPNQAEGIPIIDLSPITNHAVSDPSAIENLVKEIESACKEWGFFQVTNHGVPLTLRQNIEKASRLFFEQTQEEKKKVSRDEKSTTGYYDTEHTKNVRDWKEVFDFLAKDPTFIPVTSDEHDDRVTHWTNVSPEYPPNFRDIMEEYIQEVEKLSFKLLEIIALSLGLEAKRFEEFFIKDQTSFIRLNHYPPCPSPHLALGVGRHKDIGALTILAQDDVGGLEVKRKADQEWIRVKPTPGAYIINVGDLIQVWSNDLYESVEHRAMVNSEKERFSIPFFLFPAHYTEVKPLEELTNDQNPAKYRPYNWGKFLVRRKGSNFKKLNVENIQIYHYKIA

SEQ ID NO: 25000 - DNA, 948 bp, Glycine max
  CDS (1)..(948)
atgactaacttcccattgatcaacttggagaagctcagtggtgaggaaagaaacgataccatggaaaaaattaaagatgcttgtgaaaactggggattctttgagctggtgaatcatggcattcctcatgacatattggacactgtggagaggttgaccaaagagcactacaggaaatgcatggaagagaggttcaaggaattagtggcaagcaaaggtctagatgctgtccaaactgaggtcaaggatatggactgggagagcaccttccacttgcgtcacctccctgaatcaaacatctcagagatccctgatctcattgatgagtacaggaaggtgatgaaggattttgctttgaggttagagaaattagcagagcagctgctggacttgttgtgtgagaatcttggcctagagaaagggtacctcaagaaggctttctatggatcaagaggaccaacttttggcaccaaggttgccaactaccctccatgccccaacccagagctggtgaagggtcttcgtccccacactgatgccggtggaattatccttctcttccaggatgacaaggtcagtggactgcagcttctcaaagatggccagtgggttgatgtgcctcctatgcgccactccattgttgttaacattggtgatcagcttgaggttatcaccaatggtaagtacaagagtgtggagcaccgtgtgatagcacaaacagatgggaccagaatgtccattgcctcattctataaccctggcagtgatgctgtcatctaccctgctccagaattgttggagaaagaggcagaagagaaaaaccagctctacccaaaatttgtgtttgaagactacatgaagctatatgctaagttgaagttccaggccaaggagccaagatttgaagcctttaaagcatcaaattttggtccaattgcaactgtttaa

SEQ ID NO: 25001 - protein, 315 aa, Glycine max
MTNFPLINLEKLSGEERNDTMEKIKDACENWGFFELVNHGIPHDILDTVERLTKEHYRKCMEERFKELVASKGLDAVQTEVKDMDWESTFHLRHLPESNISEIPDLIDEYRKVMKDFALRLEKLAEQLLDLLCENLGLEKGYLKKAFYGSRGPTFGTKVANYPPCPNPELVKGLRPHTDAGGIILLFQDDKVSGLQLLKDGQWVDVPPMRHSIVVNIGDQLEVITNGKYKSVEHRVIAQTDGTRMSIASFYNPGSDAVIYPAPELLEKEAEEKNQLYPKFVFEDYMKLYAKLKFQAKEPRFEAFKASNFGPIATV

SEQ ID NO: 25002 - DNA, 1101 bp, Glycine max
  CDS (1)..(1101)
atggttcgttcttatccaatgcaagtagtaagcgacgaagccatcatgacgacgagggtgcaatccctggcccaatcgggtctctcccgggtcccaccccaatacatccaaccccctcaaacccgacccgtccgccacaccgcacccgaacccgattccattcccgtcatcgacctctcctccttcgaccccacccaacgcgcctccacccgcgactccatagctcgcgcctgccgcgaatggggcgccttccacgtcacgaaccacggcgtccccccttccctcctcgcctccctccgccgcgccggcctctccttcttctccgacacccccattcctgacaagctccgctactcctgctccgccgccgcctccgagggctacggcagcaaaatgctcgcaacaactacctccgatcaaaacgacgccgttcaggtcctcgattggagggactacttcgaccaccacacgctccccctctctcgccggaaccctacccggtggccggagtctccctccgattaccgtgagctggtggcgaggtacagcgacgagatgaatgttctggcgcaaaagttgctggctttgatttcggagagtcttgggttgcgagcttcgtgcattgaagatgctgttggggagttttatcagaacattacgattagttattaccctccgtgccccgaaccggatcttactctcgggttgcaatcgcattctgatatgggagcaatcacgcttctgattcaggatgatgtggggggtcttcaggttctcaagggtagtgacaagtgggtcactgttcagcctttgtcagatgctgttcttgttctattggctgaccaaactgagattataaccaatggaaagtacaggagctgtgagcatagggcaattactaatcctgatagagcaaggctctctgtggcaacatttcatgaccctgctaagacagccaagatctcccctgcttctgaactgataaacgactcatcgccggctaaataccgtgatgttgtttatggagactatgtttcatcatggtataccaaaggccctggaggaaaacgaaatattgatgcacttgtactggatccttaa

SEQ ID NO: 25003 - protein, 366 aa, Glycine max
MVRSYPMQVVSDEAIMTTRVQSLAQSGLSRVPPQYIQPPQTRPVRHTAPEPDSIPVIDLSSFDPTQRASTRDSIARACREWGAFHVTNHGVPPSLLASLRRAGLSFFSDTPIPDKLRYSCSAAASEGYGSKMLATTTSDQNDAVQVLDWRDYFDHHTLPLSRRNPTRWPESPSDYRELVARYSDEMNVLAQKLLALISESLGLRASCIEDAVGEFYQNITISYYPPCPEPDLTLGLQSHSDMGAITLLIQDDVGGLQVLKGSDKWVTVQPLSDAVLVLLADQTEIITNGKYRSCEHRAITNPDRARLSVATFHDPAKTAKISPASELINDSSPAKYRDVVYGDYVSSWYTKGPGGKRNIDALVLDP

SEQ ID NO: 25004 - DNA, 1128 bp, Glycine max
  CDS (1)..(1128)
atgccttctctctcggaagcctttagaggtcaccccgtgtaccttcatcagaaacaccacgacttcaactcacttcaagaactccctgactcttacgcttggacacaacctgatgatgatgatcaccgtctcacaaattacccttccaacaataagactaagaccgttgtccccatcatcgatttgaacgacccaaatgctccaaacctcataggccatgcatgcaaaacatggggtgtgttccaagtggtgaaccatggcatccccacgagcctcttcagtgacattcagagggctagtcttgctctattctcccttcctcttcaccagaagctcaaagcagctcgctcccccgacggcgtctccggctacggccgcgctcgcatttcctccttttttcccaagctcatgtggtctgagtgcttcacaattctcgattcccctctagatcttttcctcaaactctggccacaagactatgctaaatactgtgatattgtcgtggaatatgaagcagccatgaaaaagctagcagcgaagttaatgtgccttatgttggcttcccttggtattcccaaggaagacattaaatgggctgggccgaaaggagaattcaacggggcttgtgcggctttgcattggaattcttacccgagttgcccggatccggatcgggccatgggtctggccgcgcacacggactccactctcctcacaatcctgcaccaaaacaatgtcaatgggcttcaggttctcaaggaaggggaagggtgggtggcggtgcctccgcttcccggagggctcgtgatcaacgtcggcgatctgctccacattttgtcaaacgggttgtacccgagtgtgctgcatcgagttcgggtgaaccgaacccggcagaggttctcggttgcttatctatatgggcccccaacaaacgtccaaatcagtccacaagtaaaattggtaggcccaacaaggcccgttctttatcgatcagtgacttggaacgagtaccttggcaccaaagcaaagctttttaataaggctctttcagctgttaggctttcttcatctattaacggtttgtttgatgtaaacgaggataagagtaacgactttcaagtgggctag

SEQ ID NO: 25005 - protein, 375 aa, Glycine max
MPSLSEAFRGHPVYLHQKHHDFNSLQELPDSYAWTQPDDDDHRLTNYPSNNKTKTVVPIIDLNDPNAPNLIGHACKTWGVFQVVNHGIPTSLFSDIQRASLALFSLPLHQKLKAARSPDGVSGYGRARISSFFPKLMWSECFTILDSPLDLFLKLWPQDYAKYCDIVVEYEAAMKKLAAKLMCLMLASLGIPKEDIKWAGPKGEFNGACAALHWNSYPSCPDPDRAMGLAAHTDSTLLTILHQNNVNGLQVLKEGEGWVAVPPLPGGLVINVGDLLHILSNGLYPSVLHRVRVNRTRQRFSVAYLYGPPTNVQISPQVKLVGPTRPVLYRSVTWNEYLGTKAKLFNKALSAVRLSSSINGLFDVNEDKSNDFQVG

SEQ ID NO: 25006 - DNA, 1134 bp, Glycine max
  CDS (1)..(1134)
atgacggcatgccaagattggccagagccagtgattcgagtccaagccttggctgaaagtggcttaaccacaatccctgaacgtttcataaagcccaagtcccaaagacccactaataataacaactatgctccaaaggtcaatttctctcaaattggtcatcatgagaacaccaccacgaccaacaacaacaacaccaacatcccggtgattgacatgaagcacatctatggcggggatgagaggcggagggcggagacgctccggctcgtgtcggaggcatgccgggaatggggtttttttcaggtggtgaaccatggggtgagccatgagttgatgaagggggcgagggaggtgtggagggagttctttcagcagccacttgaggtgaaagaggtgtatgccaatacacccctcacttatgaagggtatggaagcaggttgggagtgaacaaaggggccattttggattggagtgactacttctttctccatcacatgccttgttcccttagggaccaagccaagtggccggccctcccaacatccttaaggaacattatctctgaatatggtgagcaagttgttatgctaggaggaaggatacttgagatattgtccataaatcttgggcttagagaggattttctcctaaatgcatttggtggggaaaatgaccttggtgcttgcttaagggtgaatttctaccctaaatgcccacaacctgacctcactcttggcttgtcccctcactcagaccctggtggcatgaccattcttctccctgatgaaaatgtgtcaggacttcaagtacgcagaggagaagattggatcactgttaagccagtcccaaatgctttcatcatcaacatgggtgaccaaattcaggtgctaagcaatgcaatttacaagagtatagagcacagggtgatcgtgaactcaaacaaagatcgagtttcattggcctttttctataaccccaggagcgatatacctatccaaccagccaaggagcttgtgactaaggataggccagcactatacccaccaatgacatttgatgagtatagactttacattaggacaagaggacctagtggaaaagctcaagttgaatctttgacttccgaatga

SEQ ID NO: 25007 - protein, 377 aa, Glycine max
MTACQDWPEPVIRVQALAESGLTTIPERFIKPKSQRPTNNNNYAPKVNFSQIGHHENTTTTNNNNTNIPVIDMKHIYGGDERRRAETLRLVSEACREWGFFQVVNHGVSHELMKGAREVWREFFQQPLEVKEVYANTPLTYEGYGSRLGVNKGAILDWSDYFFLHHMPCSLRDQAKWPALPTSLRNIISEYGEQVVMLGGRILEILSINLGLREDFLLNAFGGENDLGACLRVNFYPKCPQPDLTLGLSPHSDPGGMTILLPDENVSGLQVRRGEDWITVKPVPNAFIINMGDQIQVLSNAIYKSIEHRVIVNSNKDRVSLAFFYNPRSDIPIQPAKELVTKDRPALYPPMTFDEYRLYIRTRGPSGKAQVESLTSE

SEQ ID NO: 25008 - DNA, 1128 bp, Glycine max
  CDS (1)..(1128)
atggtggccacaagcacaaatcaatccgagttagaaacaagtaagaaggattccacttatgacagaatagctgaagtcaaagcctttgatgaaacaaaacttggtgtgaaaggcctcttcgattctgggatcacaaagataccacgcatgttccatcatgccaaggtggaggaccacactgaaaccatgccaaatgactcaaacttcagtgtccccatcatagatctccaagatatagacacaaactcatcccttcgtgtgaaagcacttgacaagattcgaagtgcatgcaaggagtgggggtttttccaggtggtgaatcatggtattgctgttgatcttttggatgagatgatatgtggaatccgtaggtttcatgaacaagatgctgaggtgagaaaacgcttttactcgagggatatgaataagaaagttagatatttctccaatggtactctttatagagaccctgctgctaactggagagacacaattgctttttttcgtactcctgatcctcctaatccagaagaaataccatcagtatgcagagacattgtgattggttattcagagaaagtaagggcattaggctttacaatctttgagctattctcagaggctcttggccttcattcttcttatcttaaagaattggactccgttgatggacaatttcttttgtgtcactactatcctccatgccctgaacccgaattaactatgggtacttcaaagcacactgatattagcttcatgacaattcttctgcaagaccagatgggtggtcttcaagttcttcatcagaatcaatgggttgatgttcctccagtgcatggatctcttgttgtaaacattggggattttctgcagcttatatcaaatgatatgttcgttagtgtctatcatcgggtcttatcaagtcatacaggccccagaatttcagttgcaagtttctttgcaaactcatttcaacagagttcattgaaggttgttggtccaataaaagagttgttatcagaagacaatccaccaatctatagggacactactgttaaagatgtcaaagcacattattttgagaaaggccttgatgggaacaattccttgcacccctttaggttgtga

SEQ ID NO: 25009 - protein, 375 aa, Glycine max
MVATSTNQSELETSKKDSTYDRIAEVKAFDETKLGVKGLFDSGITKIPRMFHHAKVEDHTETMPNDSNFSVPIIDLQDIDTNSSLRVKALDKIRSACKEWGFFQVVNHGIAVDLLDEMICGIRRFHEQDAEVRKRFYSRDMNKKVRYFSNGTLYRDPAANWRDTIAFFRTPDPPNPEEIPSVCRDIVIGYSEKVRALGFTIFELFSEALGLHSSYLKELDSVDGQFLLCHYYPPCPEPELTMGTSKHTDISFMTILLQDQMGGLQVLHQNQWVDVPPVHGSLVVNIGDFLQLISNDMFVSVYHRVLSSHTGPRISVASFFANSFQQSSLKVVGPIKELLSEDNPPIYRDTTVKDVKAHYFEKGLDGNNSLHPFRL

SEQ ID NO: 25010 - DNA, 1197 bp, Glycine max
  CDS (1)..(1197)
atgcactatcttgctttcaatccaagttcactttggtggcagttgaacgagtttgcaaccccacacacaaaaaccaaacccttaaaaatgtcatccccctcgccggtggccacggtggtctccgccgccgcgctgtacgaccgcgccaaagccgtgaaagaattcgacgaaaccaaggtcggagtcaaaggtttgatcgattcgggaatcagaaccatcccccctttcttcgtccacccgcccgaaaccctagcggacctcaagcgcggaaccaaacccgggtccgcgccggagatccccacggtggacctcgccgccgaggagagctcccgcgccgccgtggtggagcaggtccggcgggcggcgagcaccgtgggattcttccaggtggtcaaccacggcgtcccggaggagctgctattgcgaacgctggcggcggtgaaggcgttccacgagcagcccgcggaggagagggcgcgggtgtaccgtagggagatggggaagggtgtgtcgtatatttccaacgtggatctcttccaatcaaaagccgccagctggcgcgacaccatccagattaggatggggccaaccgcagtggattcgagcgagattccagaagtgtgtaggaaagaggtaatggagtgggacaaggaggtggcgcgtgtggctcgtgtgttatacggtttactgagtgaagggctgggattgggtacggagaggctcacggagatgggtttggtggaagggagggttatggtggggcactattacccgttttgtcctcaacctgatctaacggtggggcttaactcgcatgcggatccaggggctcttacggtgttgctgcaggaccatattggggggttgcaggttgagactgaacagggttggatccatgtcaagcctcagcctaacgccttggttattaacattggagatttccttcagataatttctaatgaaacatacaagagtgctcatcatcgggtgttagccaattattctaacgagccacgagtctctattgccgttttcctcaacccaagtgatagggagaaacattttggaccattaccagagctaacatcaacagagaaaccagctctttataggaacttcacgttccatgaatttatgacaaggttcttcacgaaagagttggacggtaaatcattgacaaatttcttcaggcagtga

SEQ ID NO: 25011 - protein, 398 aa, Glycine max
MHYLAFNPSSLWWQLNEFATPHTKTKPLKMSSPSPVATVVSAAALYDRAKAVKEFDETKVGVKGLIDSGIRTIPPFFVHPPETLADLKRGTKPGSAPEIPTVDLAAEESSRAAVVEQVRRAASTVGFFQVVNHGVPEELLLRTLAAVKAFHEQPAEERARVYRREMGKGVSYISNVDLFQSKAASWRDTIQIRMGPTAVDSSEIPEVCRKEVMEWDKEVARVARVLYGLLSEGLGLGTERLTEMGLVEGRVMVGHYYPFCPQPDLTVGLNSHADPGALTVLLQDHIGGLQVETEQGWIHVKPQPNALVINIGDFLQIISNETYKSAHHRVLANYSNEPRVSIAVFLNPSDREKHFGPLPELTSTEKPALYRNFTFHEFMTRFFTKELDGKSLTNFFRQ

SEQ ID NO: 25012 - DNA, 1104 bp, Glycine max
  CDS (1)..(1104)
atggtgttctctcaatcagcaatattacgtgaggaagttgaagaagcgatgagaattcaggagctcattaagaaaccactcacttcagttcctcaacgttacattcaactacacaataatgaaccttcacttctcgcaggtgaaacctttagtcacgcactcccaaccatcaacctgaaaaaattgatccatggagaagatatagaacttgagttagaaaaattgacctcagcttgtagggattggggtttctttcagttggtggagcatggaataagctcagtagtgatgaaaacacttgaagatgaagttgagggattcttcatgctccccatggaagaaaagatgaaatacaaggtaaggccaggtgatgttgaaggctacggaactgtgattggatcagaggatcaaaagcttgattggggtgataggttattcatgaaaatcaaccctcgtagtattagaaatccacatctttttcccgagctcccttcatcactcaggaatatcttagagttatacattgaggaattgcaaaaccttgcaatgatacttatggggttgctagggaaaaccctgaagatagagaagagagagttggaagtgtttgaggatgggatacaaaacatgaggatgacatactaccctccatgccctcaaccagagttagttatgggcctctctgctcattctgatgcaacaggaataaccattcttaaccaaatgaatggagtgaatgggctgcaaattaagaaagatggggtttggattccagtgaacgtcatctcagaagcccttgttgtcaacattggggacattatagagattatgagcaatggggcatacaaaagtgttgagcacagggcaacagtgaattcagaaaaggaaaggatatccgttgctatgttctttctccccaagtttcaatctgagattggacctgcagttagcctcacaaacccagaacatcccccgttgttcaaaaggattgtagtagaggagtatatcaaagattacttcactcataataagttgaatggaaagtcctacttggagcatatgaggatcacagacgatgaaaaatttaccaacgcctctatctag

SEQ ID NO: 25013 - protein, 367 aa, Glycine max
MVFSQSAILREEVEEAMRIQELIKKPLTSVPQRYIQLHNNEPSLLAGETFSHALPTINLKKLIHGEDIELELEKLTSACRDWGFFQLVEHGISSVVMKTLEDEVEGFFMLPMEEKMKYKVRPGDVEGYGTVIGSEDQKLDWGDRLFMKINPRSIRNPHLFPELPSSLRNILELYIEELQNLAMILMGLLGKTLKIEKRELEVFEDGIQNMRMTYYPPCPQPELVMGLSAHSDATGITILNQMNGVNGLQIKKDGVWIPVNVISEALVVNIGDIIEIMSNGAYKSVEHRATVNSEKERISVAMFFLPKFQSEIGPAVSLTNPEHPPLFKRIVVEEYIKDYFTHNKLNGKSYLEHMRITDDEKFTNASI

SEQ ID NO: 25014 - DNA, 1056 bp, Glycine max
  CDS (1)..(1056)
atgtcttccactcccaccaatctcattgatttcttggtgaaccaagccaatggagtgaagggtctcgctgatttgaacctcgcaagtgttcctcaccaatacattcaacccctccaagccagattagaccacaccaaaattgtcactcagaaatcaatacccatcattgatttcacaaaatgggaagacccagatgtccaagattccatctttgatgctgcaaccaagtggggtttcttccaaattgtgaaccatgggataccctctgaggttcttgacgatctcaaggatgctgtgcacaggttctttgaattgccagctgaggaaaagcagtgtcttaaagacaactcaccccctgaagttgtcaggttggcctctagttttagcccctatgctgagtcggtgttggagtggaaagattatctgcaacttgtgtatgcctcagaggaaaaaattcatgcatattggcctcctatatgcaaggaccaggcactggaatatatgaagcatgctgaagctttaattagaaaattgttaaaggtgcttcttaagaaactgaatgtgaaggagttagataaagcaagagaacacactctaatgggggcaatgatattgggtttcaattactacccagcttgccctgaccctgaagttgtagcaggggtaggtcctcattctgatgtatcatccattactgtccttctacaggatgatattggagggctttatgtaagaggcagtgatggtattagttggatctatgttcctcctgttgagggagctttagtaatcaatattggggatgtgctacagataatgagcaatgaaagatgcaaaagcatagagcatagagtggttgcaaatagaagcaagaccaggatctccattccaatctttgtcaacccggcacctgatgctgttattggtcctttgtcggaagtgttggatgatggtgatgaaccaaaatataaacaacttttgtactctgactatttcaagtatttcttcagcaaggctcatgatgggaagaaaactattgaatttgccatgatatga

SEQ ID NO: 25015 - protein, 351 aa, Glycine max
MSSTPTNLIDFLVNQANGVKGLADLNLASVPHQYIQPLQARLDHTKIVTQKSIPIIDFTKWEDPDVQDSIFDAATKWGFFQIVNHGIPSEVLDDLKDAVHRFFELPAEEKQCLKDNSPPEVVRLASSFSPYAESVLEWKDYLQLVYASEEKIHAYWPPICKDQALEYMKHAEALIRKLLKVLLKKLNVKELDKAREHTLMGAMILGFNYYPACPDPEVVAGVGPHSDVSSITVLLQDDIGGLYVRGSDGISWIYVPPVEGALVINIGDVLQIMSNERCKSIEHRVVANRSKTRISIPIFVNPAPDAVIGPLSEVLDDGDEPKYKQLLYSDYFKYFFSKAHDGKKTIEFAMI

SEQ ID NO: 25016 - DNA, 981 bp, Glycine max
  CDS (1)..(981)
atggtgttgctgtccaaggcaacaacagaacaatactcctacatcaagaactacatgccaacggcattctcctcaacaattcccgtagtggacctctccaaaccagatgcaaagaccctcatagtgaaggcttgtgaggaatttggattcttcaaagtcatcaaccatggtgttcccatggaaactatatcccaattggaatctgaagccttcaagttcttctctatgccactcaatgagaaggaaaaagtaggccctcccaaaccatatgggtatggtagcaagaaaattggacacaatggggatgttggttgggttgagtaccttcttctcaacaccaatcaagaacacaacttctctgtttatggcaaaaacgctgagaaatttaggtgtttgttgaacagttacatgtcttctgtgaggaaaatggcatgtgagattcttgagctgatggcagaaggattgaagatacaacaaaaaaatgtgtttagcaagcttcttatggataaagagagtgactctgtttttagggtgaatcactaccctgcttgccctgaacttgtgaatggtcaaaacatgatagggtttggagaacacacggacccacaaatcatttctctacttaggtccaacaatacttcaggccttcagatttttcttagagatggaaactggatttcagtcccacctgatcacaaatctttcttcataaatgttggtgattctcttcaggttatgaccaatggaaggtttcgaagtgtgaaacacagagttttgacaaatggatttaagtctagactctcaatgatttactttggaggtccaccattgagtgagaaaatagtaccattatcttcacttatgaaaggaaaagaaagcttatacaaagagtttacgtggttcgagtataaaaatttaacctatgcttcaagattggctgataataggcttggacattttgagagaattgttgcttcataa

SEQ ID NO: 25017 - protein, 326 aa, Glycine max
MVLLSKATTEQYSYIKNYMPTAFSSTIPVVDLSKPDAKTLIVKACEEFGFFKVINHGVPMETISQLESEAFKFFSMPLNEKEKVGPPKPYGYGSKKIGHNGDVGWVEYLLLNTNQEHNFSVYGKNAEKFRCLLNSYMSSVRKMACEILELMAEGLKIQQKNVFSKLLMDKESDSVFRVNHYPACPELVNGQNMIGFGEHTDPQIISLLRSNNTSGLQIFLRDGNWISVPPDHKSFFINVGDSLQVMTNGRFRSVKHRVLTNGFKSRLSMIYFGGPPLSEKIVPLSSLMKGKESLYKEFTWFEYKNLTYASRLADNRLGHFERIVAS

SEQ ID NO: 25018 - DNA, 1017 bp, Glycine max
  CDS (1)..(1017)
atggacataaaagtgctttcttccggagttcagtactcaaatctaccggagagttacatccgacccgaatcggagcgacctcgtctttccgaggtttcggagtgcgaggatgttccaatcatcgacttgggttctcaaaatagagcccagattgttcaccagatcggtgaagcctgcagaaactatggttttttccaggtgattaatcacggggtggctttagaagccgcaaaggaaatggaagaagtggcacatggattcttcaagttaccagtggaggagaagctcaaattgtactcggaagacacatcaaagacaatgagactgtccactagttttaatgttaaaaaagagacggtgcataattggagggattatcttaggcttcactgctatccattggacaaatatgcgcctgaatggccttctaatccaccctctttcaaggaaactgttacagaatactgcacaataattagggaattggggttgaggatacaggaatacatatcagagagtttgggcctagaaaaagactacataaagaatgtattaggggaacaagggcagcacatggctgtgaactactatccaccatgcccagaaccagaacttacctatggattgccagggcacactgacccaaatgcacttacaattctgcttcaagaccttcaagttgctggccttcaggttctcaaagatggcaagtggcttgccgttagtccccaacctaatgcctttgtcattaacattggcgatcaacttcaggctttgagtaatgggctttataagagtgtgtggcaccgtgctgttgtcaatgttgagaaaccaaggctttctgtggcttcatttctttgtccaaatgacgaggcattgataagccctgcaaaaccactcaccgaacatggatccgaagccgtatacagaggatttacatatgcagaatactataagaagttttggagcaggaacttagaccaagaacactgtttggaacttttcaagaacaagtaa

SEQ ID NO: 25019 - protein, 338 aa, Glycine max
MDIKVLSSGVQYSNLPESYIRPESERPRLSEVSECEDVPIIDLGSQNRAQIVHQIGEACRNYGFFQVINHGVALEAAKEMEEVAHGFFKLPVEEKLKLYSEDTSKTMRLSTSFNVKKETVHNWRDYLRLHCYPLDKYAPEWPSNPPSFKETVTEYCTIIRELGLRIQEYISESLGLEKDYIKNVLGEQGQHMAVNYYPPCPEPELTYGLPGHTDPNALTILLQDLQVAGLQVLKDGKWLAVSPQPNAFVINIGDQLQALSNGLYKSVWHRAVVNVEKPRLSVASFLCPNDEALISPAKPLTEHGSEAVYRGFTYAEYYKKFWSRNLDQEHCLELFKNK

SEQ ID NO: 25020 - DNA, 1059 bp, Glycine max
  CDS (1)..(1059)
atgggagaggttgacgcagcattcatccaagacccaccacacaggccaaagctctccaccatccaagccgaaggaattcccataattgatctctctccaataaccaaccacagagtttcagacccttctgctattgaaggcttagtgaaggagataggtagtgcatgcaacgagtggggtttcttccaagtaacaaaccatggagtgcccctcactctaaggcaaaacattgagaaagcctcaaaattgttctttgcacagagtgcggaggaaaagagaaaggttagcagaaatgagagctctccagcgggttattatgacacagaacacaccaaaaacgttagggactggaaagaagtctttgattttctagccaaagaacccactttcattcctgtcacttctgatgaacatgatgatcgagtcaatcagtggactaatcaatcccctgaataccctctaaactttagggttgtaacacaagagtatattcaagagatggaaaagctgtcctttaagattttagagcttatagctttgagcttaggccttgaagcaaagaggtttgaagaatttttcatcaaagaccaaactagctttattcgactcaaccactatcctccatgcccttatcctgaccttgctcttggcgtcggtcgacacaaggaccctggtgccttaaccattcttgcacaggatgaggttggaggacttgaagtgagacgtaaagcagatcaagagtggataagagtgaaacccaccccagatgcttatattatcaacattggtgacactgttcaggtttggagcaatgatgcatatgagagtgtggatcacagagtggtggtcaactctgagaaggaaaggttttccattcctttcttcttcttccctgcacacgacaccgaagttaagcctttggaggagctgataaatgagcaaaacccttcaaaatataggccatacaagtggggcaagtttcttgtccacagagggaacagcaattttaagaagcaaaatgaggagaacattcaaatttatcattacaagatagcttaa

SEQ ID NO: 25021 - protein, 352 aa, Glycine max
MGEVDAAFIQDPPHRPKLSTIQAEGIPIIDLSPITNHRVSDPSAIEGLVKEIGSACNEWGFFQVTNHGVPLTLRQNIEKASKLFFAQSAEEKRKVSRNESSPAGYYDTEHTKNVRDWKEVFDFLAKEPTFIPVTSDEHDDRVNQWTNQSPEYPLNFRVVTQEYIQEMEKLSFKILELIALSLGLEAKRFEEFFIKDQTSFIRLNHYPPCPYPDLALGVGRHKDPGALTILAQDEVGGLEVRRKADQEWIRVKPTPDAYIINIGDTVQVWSNDAYESVDHRVVVNSEKERFSIPFFFFPAHDTEVKPLEELINEQNPSKYRPYKWGKFLVHRGNSNFKKQNEENIQIYHYKIA

SEQ ID NO: 25022 - DNA, 1131 bp, Glycine max
  CDS (1)..(1131)
atgatgagttgccaagcatggcctgaacccatagttcgagtccaatccttagctgacagtggcctaagctcaatcccttcacgctatattaggccacactcccaaagaccctccaacaccacttcttttaaactttcacaaaccgaacatgatcatggtcacggtcgagagactcgtgaccatgatcatgttaacatccccgttattgacctggaacatcttttctcggaggatgaaatcctccgagaaaagatattccgacacgtggacgaggcgtgtcgggagtgggggttcttccaggtggtgaaccatggggttagccatgagttgatgaaaagttctagggaactgtggcgcgagttcttcaaccagccacttgaggtgaaggaggagtatgccaactcccccaccacttatgagggctatggaagtcgcttgggagtgcagaaaggtgccaccttggactggagtgactacttctttctccattacaggcctccctcacttaggaaccaagctaagtggcttgcatttccacaatcctttaggaaagtgattgctgaatatggggaggaagtggttaagctaggaggaaggatactcaaaatgatgtcaataaaccttggcttgaaagaagatttccttctcaatgcatttgggggagagagtgaggttggtgcatgcctaagggtgaatttctatccaaagtgccctcaacctgacctcacttttggactctcccctcactcagaccctggtggcatgaccattcttctctctgatgattttgtgtctggccttcaagtaagaagaggagatgaatgggtcatagttaagcctgtcccaaatgcattcatcatcaacattggtgaccaaattcaggtgctgagcaatgcaatatacaagagtgtagaacacagggtgattgtgaactcaaacaaagatcgtgtgtccttggccttgttctacaacccgaggagtgatttactcattcaacctgccaaggagcttgtgacagaggagaagccagccttgtactcaccaatgacctatgatgaatacagactttacattaggctaaatggaccttgtggaaaggcccaagttgaatcactggctttccaaccatga

SEQ ID NO: 25023 - protein, 376 aa, Glycine max
MMSCQAWPEPIVRVQSLADSGLSSIPSRYIRPHSQRPSNTTSFKLSQTEHDHGHGRETRDHDHVNIPVIDLEHLFSEDEILREKIFRHVDEACREWGFFQVVNHGVSHELMKSSRELWREFFNQPLEVKEEYANSPTTYEGYGSRLGVQKGATLDWSDYFFLHYRPPSLRNQAKWLAFPQSFRKVIAEYGEEVVKLGGRILKMMSINLGLKEDFLLNAFGGESEVGACLRVNFYPKCPQPDLTFGLSPHSDPGGMTILLSDDFVSGLQVRRGDEWVIVKPVPNAFIINIGDQIQVLSNAIYKSVEHRVIVNSNKDRVSLALFYNPRSDLLIQPAKELVTEEKPALYSPMTYDEYRLYIRLNGPCGKAQVESLAFQP

SEQ ID NO: 25024 - DNA, 1005 bp, Glycine max
  CDS (1)..(1005)
atggaggtgctaagggtgcaaaccatagcttccaaatccaaagatgctgccatcccagccatgtttgttagggcagagacagagcaaccaggcatcacaaccgttcaaggggtgaaccttgaggtgccaattattgattttagtgacccagatgaagggaaagtggtgcatgagattttggaggcaagtagggactggggcatgttccaaattgtgaaccatgacatacctagtgatgttataagaaagttgcaaagtgttgggaaaatgttctttgagttgccacaagaggaaaaagagttgattgctaagcctgctgggtctgattctattgaagggtatggcacaaagcttcagaaagaggtgaatggcaagaaagggtgggtggatcatttgttccacattgtgtggcctccttcctccatcaactacagtttctggccccaaaaccccccttcttacagggaagttaatgaggaatattgcaagcacctaagaggagtggtagacaaattgttcaaaagtatgtcggtagggttggggcttgaagagaatgagctaaaggagggtgcaaatgaagatgacatgcattatcttttaaaaatcaattattacccaccttgtccatgtcctgatctggtcttgggtgtgccaccacacacagacatgtcctacctcacaattctggtgcctaacgaggtgcagggccttcaagcatgtagggatggccattggtacgatgttaagtatgtccccaatgccctcgttattcacattggcgaccaaatggagatactgagcaatggaaaatataaggcagtttttcacagaacaacagtgaacaaagatgagacaagaatgtcgtggcccgtgttcatagaacccaaaaaggaacaagaagttggtcctcacccaaagttggttaaccaagacaatccaccaaaatacaaaaccaagaaatacaaggattatgcttattgtaagctcaataagatccctcaatga

SEQ ID NO: 25025 - protein, 334 aa, Glycine max
MEVLRVQTIASKSKDAAIPAMFVRAETEQPGITTVQGVNLEVPIIDFSDPDEGKVVHEILEASRDWGMFQIVNHDIPSDVIRKLQSVGKMFFELPQEEKELIAKPAGSDSIEGYGTKLQKEVNGKKGWVDHLFHIVWPPSSINYSFWPQNPPSYREVNEEYCKHLRGVVDKLFKSMSVGLGLEENELKEGANEDDMHYLLKINYYPPCPCPDLVLGVPPHTDMSYLTILVPNEVQGLQACRDGHWYDVKYVPNALVIHIGDQMEILSNGKYKAVFHRTTVNKDETRMSWPVFIEPKKEQEVGPHPKLVNQDNPPKYKTKKYKDYAYCKLNKIPQ

SEQ ID NO: 25026 - DNA, 1053 bp, Glycine max
  CDS (1)..(1053)
atgtccaagtatggaacttctctattggtgccttctgttcatgaacttgtgaagcaacctatcaccaaagttccagatcaatatcttcatccaaatcaagatcctcctgatatatctaacacaaccttaccacaagttccagtcatcgaccttagtaaattgttatctgaagatgtcactgagctagagaagctagacgatgcatgcaaggaatgggggttcttccagctgattaatcatggagtcaacccttcaatggtggaaaacgtgaagagagatgttcaagagtttttaaatcttccaatggaaaagaagaagcaattttggcaaatcccagatgaattggagggttttggccagttgtttgttgtatctgaggatcaaaagctagaatgggcagatatgttcttcattcacactcttccaataaacgcaaggaatcttcgcttatttcctaactttcctcaaccattgagggataatatagagaactattcttcgcaattgaaaaagctttgcctcacaatcattgagcgtatggcgatggctcttaagattgaatcgaatgaactgctagattacgtgtttgaagatgtatttcaaacaatgagatggacttactaccctccatgccctcaaccagaaaatgtcattggaataaatcctcattcagatgcttgtgctcttaccattctactccaagccaatgaaacagaaggcctacaaataaaaaaagatggaaattggatccctgtcaaacccttgcctaatgcttttgtcatcaacgttggagacattttggagatattgaccaatgggatttaccggagcatcgagcatcgagcaactattaacaaagagaaagagagaatttccgttgccacatttcacaggcctctaatgaacaaagttataggtccaacacccagccttgttacttctgaaagagctgcagtgttcaaaagaattgctgttgaagattattacaaagcatacttttctcgcgggctaaaaggaaaatcatgccttgatttgatcagggtccaaaaatga

SEQ ID NO: 25027 - protein, 350 aa, Glycine max
MSKYGTSLLVPSVHELVKQPITKVPDQYLHPNQDPPDISNTTLPQVPVIDLSKLLSEDVTELEKLDDACKEWGFFQLINHGVNPSMVENVKRDVQEFLNLPMEKKKQFWQIPDELEGFGQLFVVSEDQKLEWADMFFIHTLPINARNLRLFPNFPQPLRDNIENYSSQLKKLCLTIIERMAMALKIESNELLDYVFEDVFQTMRWTYYPPCPQPENVIGINPHSDACALTILLQANETEGLQIKKDGNWIPVKPLPNAFVINVGDILEILTNGIYRSIEHRATINKEKERISVATFHRPLMNKVIGPTPSLVTSERAAVFKRIAVEDYYKAYFSRGLKGKSCLDLIRVQK

SEQ ID NO: 25028 - DNA, 1125 bp, Glycine max
  CDS (1)..(1125)
atgagtctcaatgtagatgaagatgagttagtgactgaaatggaggaagcacccactttagctccatctataccattagaaaatgttcaagaaatggtaaggaatgatccttttcatgtgcctataggatatgtgacgagtcaagaagaattggagaaagccaattatatgcctcacctttcatctgagatccctgtcattgatttagcactgctctcaaatggaaacaaagaggagttgttaaaattggacgtagcatgcaaagagtggggcttctttcagatagtaaatcatggtgttcaagaacacctgcagaaaatgaaggatgcatcatctgagtttttcaaacttccaatagaagagaagaacaagtatgcatcggcctcaaatgacacacatggctatgggcaggcttatgtagtttctgaggagcagacactagactggtcagatgcattgatgttaatcacgtaccccacccggtacaggaagcttcaattttggcctaaaactccagagggattcatggatataatagatgcatatgcaagtgaagttagacgagttggtgaggaactgattagttcattgtcagtgattatggggatgcagaagcatgttcttcttggactacataaagaatcgcttcaagctttacgtgtgaactattaccctccttgcagcacacctgagcaagtgctgggtttgagtccacactctgacgcgagcaccatcaccttgcttatgcaagatgatgatgtaactggcttagaaattcaacaccaaggaggatgggtgccggtgaccccaataccagatgctctagttgtcaatgttggagatgtgattgagatctggagtaatggcaaatacaagagtgtagaacacagagcagtgacaagtaagaaaaagagaaggatttcttatgcattatttttgtgcccacgagatgatgtggaaattgagccccttgatcatatgatagatgctcaaaaacccaagttgtatcagaaagtcaggtatggagattatctgagacaatctatgaagaggaaaatggagggaaaaacacacatggatgtggcaaggatagaggattctcatctcacgaaaaaagatgattaa

SEQ ID NO: 25029 - protein, 374 aa, Glycine max
MSLNVDEDELVTEMEEAPTLAPSIPLENVQEMVRNDPFHVPIGYVTSQEELEKANYMPHLSSEIPVIDLALLSNGNKEELLKLDVACKEWGFFQIVNHGVQEHLQKMKDASSEFFKLPIEEKNKYASASNDTHGYGQAYVVSEEQTLDWSDALMLITYPTRYRKLQFWPKTPEGFMDIIDAYASEVRRVGEELISSLSVIMGMQKHVLLGLHKESLQALRVNYYPPCSTPEQVLGLSPHSDASTITLLMQDDDVTGLEIQHQGGWVPVTPIPDALVVNVGDVIEIWSNGKYKSVEHRAVTSKKKRRISYALFLCPRDDVEIEPLDHMIDAQKPKLYQKVRYGDYLRQSMKRKMEGKTHMDVARIEDSHLTKKDD

SEQ ID NO: 25030 - DNA, 1086 bp, Glycine max
  CDS (1)..(1086)
atgttaaaaaaccaaccacaaccagattggcctgagcccattgtccgggttcagtccttatccgaaaactgcgaagattcaatccctgaaaggtacatcaagccttctactgatagaccatccataaaaagttctaattttgatgatgccaatattccaatcatcgaccttgggggactatttggtgctgaccaacatgtctcagcctcaattcttaagcaaatctcagatgcttgcaaagaatggggcttcttccaagtcactaatcatggtgtcaaccctgatttgatggacaaggtcagggaaacttggcgtgaattctttcacatgcccatggaggtgaagcagcaatatgcaaactcgccaaaaacctatgaaggctacggaagcagacttggaattgagaaaggtgctattcttgattggagtgattactactttcttcactatcttcccttgccactcaaggactataacaaatggcctgcctcgcctccctcttgcaggaaagtgtttgatgagtatgggagagagttagtgaagctatgtgggaggttgatgaaggctttgtcaataaaccttggattagatgaaaaaattcttcaaaatggttttgggggagaagacataggggcatgtctaagagtgaatttttaccctaaatgtccacggccagagttgacgttgggtttgtcatcacactcagaccctggaggaatgactatgttgcttccagatgatcaagttcctggtcttcaagttcgaaaatgtgataattggattaccgtgaagcctgcacgccatgcttttatcgtcaatatcggagaccaaattcaggttctaagcaatgcaatttacaagagtgtggagcacagagtgatagtaaattcagataaagagagagtttctctggcatttttctacaaccccaaaagtgatatacccattgagccaataaaagagctggtaacaccggaaaagccctcactctacccagcaatgaccttcgatgaatacagactcttcattagaatgagaggacctcgaggcaaatctcaagttgaatctttaaagtctcccagatga

SEQ ID NO: 25031 - protein, 361 aa, Glycine max
MLKNQPQPDWPEPIVRVQSLSENCEDSIPERYIKPSTDRPSIKSSNFDDANIPIIDLGGLFGADQHVSASILKQISDACKEWGFFQVTNHGVNPDLMDKVRETWREFFHMPMEVKQQYANSPKTYEGYGSRLGIEKGAILDWSDYYFLHYLPLPLKDYNKWPASPPSCRKVFDEYGRELVKLCGRLMKALSINLGLDEKILQNGFGGEDIGACLRVNFYPKCPRPELTLGLSSHSDPGGMTMLLPDDQVPGLQVRKCDNWITVKPARHAFIVNIGDQIQVLSNAIYKSVEHRVIVNSDKERVSLAFFYNPKSDIPIEPIKELVTPEKPSLYPAMTFDEYRLFIRMRGPRGKSQVESLKSPR

SEQ ID NO: 25032 - DNA, 1071 bp, Glycine max
  CDS (1)..(1071)
atggaagtaacagctgctccagtgccttatgtccaagaaattgcaaaggaggcattgaccatagtgcctgagcgttatgttcgaccagttcatgaacgtcctatattatctaactctacacctttacctgaaattcctgtcattgacttgagcaaattgttgtctcaagaccacaaggagcatgaactcgacaggcttcactatgcatgcaaagaatggggtttctttcagctaattaatcacggagtggactcttcattggtggaaaaagtgaagagaggtgctcaaggattattcgatcttccaatggaagagaagaaaaagtttgggcagagagaaggagaagctgagggatatggtcaactcttcgtggtttcagaggaacagaagttagagtgggcagatttgtttttcatgttcactttgccaccaaacaagaggaaaccccacttattccccaaccttcccctgccattcaggggtgatttagacgcctattgtgaagaattaagaaaacttgcaatccagatccttgaccagatggccaattctcttgcaatagacccaatggaaataagagagttatttggtgaagcagaacaatcaatgaggatgaattattatccaccatgtccccaaccagagcttgtgatgggactcaatcctcattctgatggtggaggcctcaccatccttctccaagccaatgaagtggaaggtcttcaaataagaaaagatggactgtggattccagttaaaccccttcccaatgctttcatcataaaccttggtgacatgttggaggtgatgagtaatggaatctaccaaagcatagagcacagggcaacagttaactcagagaaagagagactttccatagccacattttatagcactgctatagatgcaattatatgtccagcaccaagccttgtaactccaaaaacaccagcaatgttcaaaccaatcagcgcgggagattacttcaaaggataccttgcacaagaacttcgcgggaaatctttccttgacaccataagaattcatgctgaaaatgagaatagctcttag

SEQ ID NO: 25033 - protein, 356 aa, Glycine max
MEVTAAPVPYVQEIAKEALTIVPERYVRPVHERPILSNSTPLPEIPVIDLSKLLSQDHKEHELDRLHYACKEWGFFQLINHGVDSSLVEKVKRGAQGLFDLPMEEKKKFGQREGEAEGYGQLFVVSEEQKLEWADLFFMFTLPPNKRKPHLFPNLPLPFRGDLDAYCEELRKLAIQILDQMANSLAIDPMEIRELFGEAEQSMRMNYYPPCPQPELVMGLNPHSDGGGLTILLQANEVEGLQIRKDGLWIPVKPLPNAFIINLGDMLEVMSNGIYQSIEHRATVNSEKERLSIATFYSTAIDAIICPAPSLVTPKTPAMFKPISAGDYFKGYLAQELRGKSFLDTIRIHAENENSS

SEQ ID NO: 25034 - DNA, 1086 bp, Glycine max
  CDS (1)..(1086)
atggcattacaggcagttaatgacagaaaagctgaagttcaagcatttgatgattctaaaacgggtgtaaaaggtgtcctagattctggggtaacaaagatccctaccatgttccatgtcaagttagactcaactcacacctcaccaactcactccaacttcaccatcccaatcatagatcttcagaacataaacagcaattcaactctgcatgctgaagtggttgaccagcttaggagtgcatctcagaagtggggatttttccaagtgatcaatcatggcgttcctgtggaggttttggatgagatgatcagtggaatccgcaggtttcatgagcaagatgctgaggcaaggaagcccttttactcgagagatagcagtaagaaagtcaggtatttttctaatgggaagctgttcagagacatggctggtacttggagggacacaattgcatttgatgtgaatcctgatcccccaaacccacaagatataccagcagtgtgtagagatattgtggctgaatattcaaaacaagtaaaagcgttaggtaccacgatctttgagctactgtcagaggctcttggccttgatccttcttaccttgaagaaatggactgcactaaagcactttatgttatgggtcagtactatccaaaatgccctgaacctgaattaactatgggaatttcaaagcacactgattgtgacttcataacaatacttttgcaagatcagattggtggtcttcaagttcttcatgagaatcattgggttaatgctcctccagtgcgaggagctcttgttgtcaacattggagatattctgcagcttatgactaatgacaagttcatcagtgtttatcaccgggtcttgttgaggaatatgggccctagaatttctgtagcaaccttcttcatgaattttaccatatctaaatgtacatcgaagagttatggtccaataaaggaattgttatcagaagaaaaccccccagtctatagggacatgaatatgaaagaaatcttgacaaattattatgcaaaaggccttgatgggagctcctacttgctgcctttaaggttgtga

SEQ ID NO: 25035 - protein, 361 aa, Glycine max
MALQAVNDRKAEVQAFDDSKTGVKGVLDSGVTKIPTMFHVKLDSTHTSPTHSNFTIPIIDLQNINSNSTLHAEVVDQLRSASQKWGFFQVINHGVPVEVLDEMISGIRRFHEQDAEARKPFYSRDSSKKVRYFSNGKLFRDMAGTWRDTIAFDVNPDPPNPQDIPAVCRDIVAEYSKQVKALGTTIFELLSEALGLDPSYLEEMDCTKALYVMGQYYPKCPEPELTMGISKHTDCDFITILLQDQIGGLQVLHENHWVNAPPVRGALVVNIGDILQLMTNDKFISVYHRVLLRNMGPRISVATFFMNFTISKCTSKSYGPIKELLSEENPPVYRDMNMKEILTNYYAKGLDGSSYLLPLRL

SEQ ID NO: 25036 - DNA, 1053 bp, Glycine max
  CDS (1)..(1053)
atgaagacctttcagttagcaaatgagtcttcttctctactttccttatctcctaaatttatcctcccagaagatgaaagaccacaactttcagaggttacttctctggactcaattcccataattgatttgagtgatcacagttatgatggtaataatcattcatcctcattggtggttcagaagatttcacaagcttgtgaggaatatggattctttcagatagtgaaccatggtattcctgaacaagtttgcaacaaaatgatgacagcaattactgacatctttaatctgcctccagagcaaacaggacagctctacacaacagatcataccaagaacacaaaactttacaactattaccttaatgtggagggtggagagaaggtgaaaatgtggagtgaatgtttcagtcattattggtaccctattgaggatatcattcatcttctgccacaagaaatagggactcaatatggggaggctttcagtgaatatgcaagggagattggttcattggtgagaaggcttctaggtttgttatcaatagggcttggaatagaagaggatttcttactgaaaatatttggggatcagcctagactaagagcacaagcaaatttctatccaccatgtccagatccagagttgaccttaggtcttcctgtgcatactgatttcaatgctctcacaattgttttgcagtcacaagtttctggtctccaagtgatcaaagatgggaaaaggattgcattaccttttattcccaatgcatttgttatcaacctgggagatcaaattcaggttcttagcaacggaagattcaaaagtgtacatcacagggctgttactaacaaattgagtccacgggtgtcgatggcaatgttttatgggccaaacgtggacactacaattggcccaatccaggacttgatagatgaagaacaccctcccagataccgaaattatcgcttctctgagtttcttgaagaattcttcaaacaagaaggcacgaggaggatggttaaagaagtctttgagttgccatgttag

SEQ ID NO: 25037 - protein, 350 aa, Glycine max
MKTFQLANESSSLLSLSPKFILPEDERPQLSEVTSLDSIPIIDLSDHSYDGNNHSSSLVVQKISQACEEYGFFQIVNHGIPEQVCNKMMTAITDIFNLPPEQTGQLYTTDHTKNTKLYNYYLNVEGGEKVKMWSECFSHYWYPIEDIIHLLPQEIGTQYGEAFSEYAREIGSLVRRLLGLLSIGLGIEEDFLLKIFGDQPRLRAQANFYPPCPDPELTLGLPVHTDFNALTIVLQSQVSGLQVIKDGKRIALPFIPNAFVINLGDQIQVLSNGRFKSVHHRAVTNKLSPRVSMAMFYGPNVDTTIGPIQDLIDEEHPPRYRNYRFSEFLEEFFKQEGTRRMVKEVFELPC

SEQ ID NO: 25038 - DNA, 1107 bp, Glycine max
  CDS (1)..(1107)
atggcagccacaagcacggataagttggaggcaggaacagtttcaagttatgacaggaaaagtgaaatcaaggcatttgatgattcaaagactggtgtccaaggactggtagaaaatggtgtaacaaaagttccacttatgttctatagtgaaaactctaatctcaatgatggcgtaaccggtgcatcatattcaaagatcagcatccccataattgacctcacaggcatccatgatgatcctattttgagagatcatgttgtgggaaaagttagatatgcatgtgagaagtggggcttctttcaggttataaatcatggaattccaactcatgttttggatgagatgatcaaaggaacttgcaggtttcaccaacaagatgcaaaggtgaggaaagagtactacactcgcgaagtaagccgaaaagttgcttatctttccaattatactctttttgaagacccttctgctgattggagggatacacttgcattttccttggcacctcatccacccgaagctgaagaatttcctgcagtttgtagagatattgtgaatgaatactcaaagaaaataatggctcttgcttatgctttgtttgagttactgtcagaggctcttggccttaatcgcttttaccttaaagaaatggattgtgctgaagggcaacttcttctctgtcactattacccagcatgtcctgagcctgaattaacaatgggaaataccaagcactcagatggtaacaccataacaatacttttgcaagaccagattggtggccttcaagttcttcatgacagtcaatggattgatgtacctcccatgcatggggctctagtagtgaacattggggatattatgcagctcatgactaatgacaagttcattagtgttcaacatagagttttagcaaaggatcaaggtcctagaatttcggttgcatcctttttcagaacaggtatatcaagagtctttggtccaatcaaagaattgttatctgaagaacatccaccagtatacagagacatttctttaaaagattacatggcgcatcgttatacaagtggcagtggaacttctgcactgttacacttcaagttgtga

SEQ ID NO: 25039 - protein, 368 aa, Glycine max
MAATSTDKLEAGTVSSYDRKSEIKAFDDSKTGVQGLVENGVTKVPLMFYSENSNLNDGVTGASYSKISIPIIDLTGIHDDPILRDHVVGKVRYACEKWGFFQVINHGIPTHVLDEMIKGTCRFHQQDAKVRKEYYTREVSRKVAYLSNYTLFEDPSADWRDTLAFSLAPHPPEAEEFPAVCRDIVNEYSKKIMALAYALFELLSEALGLNRFYLKEMDCAEGQLLLCHYYPACPEPELTMGNTKHSDGNTITILLQDQIGGLQVLHDSQWIDVPPMHGALVVNIGDIMQLMTNDKFISVQHRVLAKDQGPRISVASFFRTGISRVFGPIKELLSEEHPPVYRDISLKDYMAHRYTSGSGTSALLHFKL

SEQ ID NO: 25040 - DNA, 1062 bp, Glycine max
  CDS (1)..(1062)
atggaagagttcttcaacccattagggacttcacttttggtaccatcagtgcaagagttggctaaacagaatttgtctaccgttccacatagatacattcagcctcaaaatgaagaagctattagtatccctgagattccaattattgacatgcagagcttgctctctgtagaatcttgtagttctgaattagccaagcttcaccttgcatgcaaagaatggggattcttccagctgataaaccatggtgttagctcatccttgctcgagaaagtaaagttggagattcaagacttcttcaaccttccaatgtcagagaaaaaaaagttttggcaaactccacagcatatggaaggatttggacaagcatttgttgtgagtgaagaccagaaacttgattggggcgatatgttcaatatgacaacccttccaacacaatcgagaatgccccacttatttccacaactccctcttcctttcagagacactctagaactttactcacacaaaatgaaaaatatagccatggcaattattggccagatgggaaaagctttgaagatagaagaaatgaaaataagagagttatttgaagatgggatacaattgatgaggatgaattattacccaccatctcctcaacctgaaaaggttattggactcacaaatcattcagatgcaacagctctcactatcctcttacaagtcaatgaagtagaagggctacagataaggaaagatgacatgtgggttccagttaggcccatgccaaacgcctttgtcgttaatgttggggatatcttggagattaatactaatgggacatatcgaagtattgaacaccgagcaacggtgaactctgaaaaggaaaggctttcaattgcaacattctatagcccaagacaagatggtgtgataggtccatggccaagtttgatcactaaacaaacaccagcacaattcaaaagaatcggagtaaaggaatactttaagaatttcttcgcccgtaaacttgaaggaaagtctaacagagatgccttgagaatagagcatcacaactga

SEQ ID NO: 25041 - protein, 353 aa, Glycine max
MEEFFNPLGTSLLVPSVQELAKQNLSTVPHRYIQPQNEEAISIPEIPIIDMQSLLSVESCSSELAKLHLACKEWGFFQLINHGVSSSLLEKVKLEIQDFFNLPMSEKKKFWQTPQHMEGFGQAFVVSEDQKLDWGDMFNMTTLPTQSRMPHLFPQLPLPFRDTLELYSHKMKNIAMAIIGQMGKALKIEEMKIRELFEDGIQLMRMNYYPPSPQPEKVIGLTNHSDATALTILLQVNEVEGLQIRKDDMWVPVRPMPNAFVVNVGDILEINTNGTYRSIEHRATVNSEKERLSIATFYSPRQDGVIGPWPSLITKQTPAQFKRIGVKEYFKNFFARKLEGKSNRDALRIEHHN

SEQ ID NO: 25042 - DNA, 924 bp, Glycine max
  CDS (1)..(924)
atggagaacttccccgtgatcaacttggacaatctcaacggtgaggagaggaaagctacactagaccagattgaagacgcttgccagaactggggattttttgagttggtgaatcatggaataccccttgagcttttggatactgtggaaaggttgacaaaagagcattataggaaatgcatggagaacaggttcaaggaggcagtcgcaagcaaggccttagaagttgaagtgaaggacatggattgggagagtaccttcttcttgcgccatcttccaacctccaacatctctgaaatccctgatctctgccaagagtatagggatgcaatgaaggaatttgcaaagaaattggaggagcttgcagaggagttgctagacctgttatgtgaaaatcttggattagagaaagggtacctgaagaatgcattttatggatcaaagggtccaaattttgggacaaaggtagcaaactaccctgcatgcccaaagccagagttggtgaagggtcttcgtgcacatacggatgcgggtgggattatccttctcttgcaagatgacaaggtcagtggccttcagcttctcaaagatgaccaatgggtggatgtgcctcctatgcgccattccattgttgttaaccttggtgaccaaattgaggtaatcacgaatgggagatataagagtgtggagcatcgtgtggttgctcgaactgatgggaccagaatgtccgtagcctcattctacaatccagccaatgatgctgttatctaccctgcaccagcattgttggagaaagaggcacaggagacagagcaagtgtacccaaaatttgtatttgaggattacatgaagctctatgctacgctaaagttccagccaaaggagccaagatttcaagccataaaggcagtgaactcattttag

SEQ ID NO: 25043 - protein, 307 aa, Glycine max
MENFPVINLDNLNGEERKATLDQIEDACQNWGFFELVNHGIPLELLDTVERLTKEHYRKCMENRFKEAVASKALEVEVKDMDWESTFFLRHLPTSNISEIPDLCQEYRDAMKEFAKKLEELAEELLDLLCENLGLEKGYLKNAFYGSKGPNFGTKVANYPACPKPELVKGLRAHTDAGGIILLLQDDKVSGLQLLKDDQWVDVPPMRHSIVVNLGDQIEVITNGRYKSVEHRVVARTDGTRMSVASFYNPANDAVIYPAPALLEKEAQETEQVYPKFVFEDYMKLYATLKFQPKEPRFQAIKAVNSF

SEQ ID NO: 25044 - DNA, 1023 bp, Glycine max
  CDS (1)..(1023)
atgtccagcgttaaggagttagttgaatctaagtgtctgagttctgttccctccaactacatttgccttgaaaatcccgaagattctatattgaattatgaaacagataatattccaaccattgatttttcccaactcacctcttctaatcccagtgtacgctccaaggcaatcaaacaactaggagatgcttgccgcgattggggtttctttatgctaatcaatcacggtgtgtcggagatactaagggatgaggtgattaggacaagccagggcttttttgatctgactgagaaagaaaaaatggagcacgcaggaaggaacctatttgatccaataagatatgggacaagcttcaatgtcacggtggacaagacccttttctggagagattatctcaaatgtcatgttcaccctcactttaatgctccttccaagcctcctggttttagccaaactttagaggaatacattaccaagggcagggaagtggttggagagttgctaaaaggaatatctctaagcttagggcttgaagaaaactacatacataaaaggctgaatgtagagttgggctcccagttgcttattctcaacttttacccaccttgtcctaagcctgaacttgtaatgggccttcctgcacacacagaccatgggcttctgaccctcctgatgcaaaacgagcttggagggcttcaaattcaacacaatggcaagtggattcctgtccaccccttacccaactcctttctcatcaacactggggatcacatggagatactgaccaatgggaaatacaagagtgttgttcatcgagctgtagtgaacacgaaagccactaggatttccgttggtacagcacacgggcccaagcttgacaccattgtggggcccgcaccggagcttgttggagatgataatcctgctgcataccgtgccatcaaatacagagattacatacagcttcagcaaaaccatgaactcgacggaaagtcatgcttggatcgtattcgaatttga

SEQ ID NO: 25045 - protein, 340 aa, Glycine max
MSSVKELVESKCLSSVPSNYICLENPEDSILNYETDNIPTIDFSQLTSSNPSVRSKAIKQLGDACRDWGFFMLINHGVSEILRDEVIRTSQGFFDLTEKEKMEHAGRNLFDPIRYGTSFNVTVDKTLFWRDYLKCHVHPHFNAPSKPPGFSQTLEEYITKGREVVGELLKGISLSLGLEENYIHKRLNVELGSQLLILNFYPPCPKPELVMGLPAHTDHGLLTLLMQNELGGLQIQHNGKWIPVHPLPNSFLINTGDHMEILTNGKYKSVVHRAVVNTKATRISVGTAHGPKLDTIVGPAPELVGDDNPAAYRAIKYRDYIQLQQNHELDGKSCLDRIRI

SEQ ID NO: 25046 - DNA, 1155 bp, Glycine max
  CDS (1)..(1155)
atggcaatagactgcataacaagcatacccatgatgcctcaaccaccaacccaagaaacaaccaaagaacaagaacagcagcagccactggtgtttgatgcctcagtcctcagacaccaacttcacataccctcacaattcatctggcccgatgaagaaaaagcatgcttggacgaacccgagttgttggtcccattcattgacttgggagggttcctctctggtgacccagttgccgcaacggaagcctcgaggcttgctggtgaagcatgccaaaagcatggcttttttctggttgtgaatcacgggattgatcaacggttgatatctgatgctcatctttacatggagcacttctttgggcttcccctgtctcagaaacagagggcacagaggaagccaggggagcactgtggttatgctagtagcttcactggcaggttctcctcaaagctcccttggaaagagacactttcctttcagtactcagctgacaaaaactcatcaccaactcttgtcaaagactacttgtgcagtaaaatgggcaatgagtttgagcaatttgggaaggtttaccaggactattgtgatgccatgagcaatctttctttggggataatggaacttttgggaatgagtcttggagttggtaaagcatgttttagagagttctttgaagagaataactcaataatgaggctcaattactaccctccttgtcaaaagcctgacctcactttgggcactggacctcactgtgacccaacatctttgaccattcttcaccaagaccaagtgggaggcctccaagtttttgttgacaatgagtggcattccattagcccaaatttcaatgcttttgttgtcaacataggtgacaccttcatggctctttcaaatggaaggtacaagagttgcttgcatagggcagtggtgaacagcaagaccacaagaaaatctcttgctttctttttgtgtccaaaaggtgataaggtggttagtccaccaagtgaattggtggatgatttgacaccaaggatataccctgattttacatggcctatgctgcttgagtttactcagaaacattatagagctgacatgaaaacccttgaggcattcaccaactggcttcttcaacggaaaatgagctga

SEQ ID NO: 25047 - protein, 384 aa, Glycine max
MAIDCITSIPMMPQPPTQETTKEQEQQQPLVFDASVLRHQLHIPSQFIWPDEEKACLDEPELLVPFIDLGGFLSGDPVAATEASRLAGEACQKHGFFLVVNHGIDQRLISDAHLYMEHFFGLPLSQKQRAQRKPGEHCGYASSFTGRFSSKLPWKETLSFQYSADKNSSPTLVKDYLCSKMGNEFEQFGKVYQDYCDAMSNLSLGIMELLGMSLGVGKACFREFFEENNSIMRLNYYPPCQKPDLTLGTGPHCDPTSLTILHQDQVGGLQVFVDNEWHSISPNFNAFVVNIGDTFMALSNGRYKSCLHRAVVNSKTTRKSLAFFLCPKGDKVVSPPSELVDDLTPRIYPDFTWPMLLEFTQKHYRADMKTLEAFTNWLLQRKMS

SEQ ID NO: 25048 - DNA, 1023 bp, Glycine max
  CDS (1)..(1023)
atgtccagcgttaaggagttagttgaatctaagtgtctgagttctgttccctccaactacatttgccttgaaaatcccgaagattctatattgaattatgaaacagataatattccaaccattgatttttcccaactcacctcttctaatcccagtgtacgctccaaggcaatcaaacaactaggagatgcttgccgcgattggggtttctttatgctaatcaatcacggtgtgtcggagatactaagggatgaggtgattaggacaagccagggcttttttgatctgactgagaaagaaaaaatggagcacgcaggaaggaacctatttgatccaataagatatgggacaagcttcaatgtcacggtggacaagacccttttctggagagattatctcaaatgtcatgttcaccctcactttaatgctccttccaagcctcctggttttagccaaactttagaggaatacattaccaagggcagggaactggttggagagttgctaaaaggaatatctctaagcttagggcttgaagaaaactacatacataaaaggctgaatgtagagttgggctcccagttgcttattctcaacttttacccaccttgtcctaagcctgaacttgtaatgggccttcctgcacacacagaccatgggcttctgaccctcctgatgcaaaacgagcttggagggcttcaaattcaacacaatggcaagtggattcctgtccaccccttacccaactcctttctcatcaacactggggatcacatggagatactgaccaatgggaaatacaagagtgttgttcatcgagctgtagtgaacacgaaagccactaggatttccgttggtacagcacacgggcccaagcttgacaccattgtggggcccgcaccggagcttgttggagatgataatcctgctgcataccgtgccatcaaatacagagattacatacagcttcagcaaaaccatgaactcgacggaaagtcctgcttggatcgtattcgcatttga

SEQ ID NO: 25049 - protein, 340 aa, Glycine max
MSSVKELVESKCLSSVPSNYICLENPEDSILNYETDNIPTIDFSQLTSSNPSVRSKAIKQLGDACRDWGFFMLINHGVSEILRDEVIRTSQGFFDLTEKEKMEHAGRNLFDPIRYGTSFNVTVDKTLFWRDYLKCHVHPHFNAPSKPPGFSQTLEEYITKGRELVGELLKGISLSLGLEENYIHKRLNVELGSQLLILNFYPPCPKPELVMGLPAHTDHGLLTLLMQNELGGLQIQHNGKWIPVHPLPNSFLINTGDHMEILTNGKYKSVVHRAVVNTKATRISVGTAHGPKLDTIVGPAPELVGDDNPAAYRAIKYRDYIQLQQNHELDGKSCLDRIRI

SEQ ID NO: 25050 - DNA, 1116 bp, Glycine max
  CDS (1)..(1116)
atggaggtttctattacagatgaaattgcaggcactatggagctcaaccctgataggctgggtgagctcaaagcatttgatgacacaaaagctggtgtgaaaggccttgttgatgaaggggtcgcaaagatcccaagattatttcatcatccacctgatgaatttgtcatggcttcaaagttaggcaacacagaatacactatacctgttatagaccttgcagaagttggcaaagatccaagttcacgccaagaaattataggcagaataagggaagcttctgagagatggggtttctttcaggtggtcaaccatggcatccctgtgactgttctagaggacttgaaagatggggtgcaaaggtttcatgaacaagatattgaggagaagaaagagctatatacccgtgaccatatgaaacctctggtgtataatagcaattttgatctgtacagttcaccagccctcaattggagggacagtttcatgtgttacctggctcctaatcctcccaaacctgaagacttgccagtagtatgcagggatatacttttggaatatgggacatatgtaatgaagcttggaattgctctatttgaattattatcagaagctcttgggctgcacccagaccatttaaaagacttgggttgtgctgagggacttatttcactttgccattactaccctgcatgccctgaaccagatttaactttgggaaccacaaagcattctgataattgtttcctcacagtgcttctccaggatcatattggtggcctgcaggttctttaccagaacatgtggattgatataaccccagaacctggggctcttgttgttaacattggtgatcttctacagcttataacaaatgacagattcaagagcgtagaacatagagtacaggcaaatctcataggtccaagaatatctgttgcatgctttttcagcgaaggtcttaaatcatcaccaaaaccctatggacctataaaagaattattgacagaagacaatcctcccaaatacagagaaaccacagttgcggagtatgtacggtatttcgaagctaaaggtcttgatggaacctctgcacttcaacacttcaagatttga

SEQ ID NO: 25051 - protein, 371 aa, Glycine max
MEVSITDEIAGTMELNPDRLGELKAFDDTKAGVKGLVDEGVAKIPRLFHHPPDEFVMASKLGNTEYTIPVIDLAEVGKDPSSRQEIIGRIREASERWGFFQVVNHGIPVTVLEDLKDGVQRFHEQDIEEKKELYTRDHMKPLVYNSNFDLYSSPALNWRDSFMCYLAPNPPKPEDLPVVCRDILLEYGTYVMKLGIALFELLSEALGLHPDHLKDLGCAEGLISLCHYYPACPEPDLTLGTTKHSDNCFLTVLLQDHIGGLQVLYQNMWIDITPEPGALVVNIGDLLQLITNDRFKSVEHRVQANLIGPRISVACFFSEGLKSSPKPYGPIKELLTEDNPPKYRETTVAEYVRYFEAKGLDGTSALQHFKI

SEQ ID NO: 25052 - DNA, 1134 bp, Glycine max
  CDS (1)..(1134)
atgacggcatgccaagattggccagagccagtgattcgagtccaagccttggctgaaagtggcttaaccacaatccctgaacgtttcataaagcccaagtcccaaagacccactaataataacaactatgctccaaaggtcaatttctctcaaattggtcatcatgagaacaccaccacgaccaacaacaacaacaccaacatcccggtgattgacatgaagcacatctatggcggggatgagaggcggagggcggagacgctccggctcgtgtcggaggcatgccgggaatggggtttttttcaggtggtgaaccatggggtgagccatgagttgatgaagggggcgagggaggtgtggagggagttctttcagcagccacttgaggtgaaagaggtgtatgccaatacacccctcacttatgaagggtatggaagcaggttgggagtgaacaaaggggccattttggattggagtgactacttctttctccatcacatgccttgttcccttagggaccaagccaagtggccggccctcccaacatccttaaggaacattatctctgaatatggtgagcaagttgttatgctaggaggaaggatacttgagatattgtccataaatcttgggcttagagaggattttctcctaaatgcatttggtggggaaaatgaccttggtgcttgcttaagggtgaatttctaccctaaatgcccacaacctgacctcactcttggcttgtcccctcactcagaccctggtggcatgaccattcttctccctgatgaaaatgtgtcaggacttcaagtacgcagaggagaagattggatcactgttaagccagtcccaaatgctttcatcatcaacatgggtgaccaaattcaggtgctaagcaatgcaatttacaagagtatagagcacagggtgatcgtgaactcaaacaaagatcgagtttcattggcctttttctataaccccaggagcgatatacctatccaaccagccaaggagcttgtgactaaggataggccagcactatacccaccaatgacatttgatgagtatagactttacattaggacaagaggacctagtggaaaagctcaagttgaatctttgacttccaaatga

SEQ ID NO: 25053 - protein, 377 aa, Glycine max
MTACQDWPEPVIRVQALAESGLTTIPERFIKPKSQRPTNNNNYAPKVNFSQIGHHENTTTTNNNNTNIPVIDMKHIYGGDERRRAETLRLVSEACREWGFFQVVNHGVSHELMKGAREVWREFFQQPLEVKEVYANTPLTYEGYGSRLGVNKGAILDWSDYFFLHHMPCSLRDQAKWPALPTSLRNIISEYGEQVVMLGGRILEILSINLGLREDFLLNAFGGENDLGACLRVNFYPKCPQPDLTLGLSPHSDPGGMTILLPDENVSGLQVRRGEDWITVKPVPNAFIINMGDQIQVLSNAIYKSIEHRVIVNSNKDRVSLAFFYNPRSDIPIQPAKELVTKDRPALYPPMTFDEYRLYIRTRGPSGKAQVESLTSK

SEQ ID NO: 25054 - DNA, 996 bp, Glycine max
  CDS (1)..(996)
atggaagtggaaagaatacaaaccttgtctttgaaccagctcaaggagcttccaccccagttcatccgtccagccaatgaaaggccagagaacaccaaagccatagaaggtgtcattgtgcctctcatctcactgtctcagtcacatcatcttttggtgaaggaaatagctgaagctgcttctgagtggggatttttcgtcataaccgaccatggtatgtcacaaacattgatccaacgtttgcaagaggttggtaaggagttctttgccctccctcaagaagagaaagaggcttatgcaaatgactcttccgaaggtaagtttgagggatatggcacaaaaatgaccaaaaaccttgaagaaaaggtggagtgggttgattatttttttcatctaatggctcctccttctaaggtcaactatgacatgtggccgaaacacccttcttcctacagggaagtgacacaagaatacaacaaggagatgttaagggtaacaaacaaggttttggagcttctgtccgaaggcttgggcttagagaggaaggttttaaagtccaggttgggagatgaagaaatagagttagaaatgaagataaatatgtatccaccatgtccacagccacatctagctttgggagttgaacctcacactgacatgagtgcccttaccatactcgtcccaaacgaagttccaggcctccaagtttggaaggagaatagttgggttgcggtcaattacttgcaaaatgcactcatggtacatgttggtgatcaacttgaggtgttgagtaacggaaagtacaagagtgttctgcatagaagcttggtgaataaggaacgaaatcgcatgtcatgggcagtgtttgttgcgcctccacatcaggcagtgatagggcctcttccttctctcatcaatgatcagaacccacccaagttttcaacaaaaacctatgctgagtatcgttatcgcaaattcaataagctttcccaataa

SEQ ID NO: 25055 - protein, 331 aa, Glycine max
MEVERIQTLSLNQLKELPPQFIRPANERPENTKAIEGVIVPLISLSQSHHLLVKEIAEAASEWGFFVITDHGMSQTLIQRLQEVGKEFFALPQEEKEAYANDSSEGKFEGYGTKMTKNLEEKVEWVDYFFHLMAPPSKVNYDMWPKHPSSYREVTQEYNKEMLRVTNKVLELLSEGLGLERKVLKSRLGDEEIELEMKINMYPPCPQPHLALGVEPHTDMSALTILVPNEVPGLQVWKENSWVAVNYLQNALMVHVGDQLEVLSNGKYKSVLHRSLVNKERNRMSWAVFVAPPHQAVIGPLPSLINDQNPPKFSTKTYAEYRYRKFNKLSQ

SEQ ID NO: 25056 - DNA, 1062 bp, Glycine max
  CDS (1)..(1062)
atggaagagttcttcaacccattagggacttcacttttggtaccatcagttcaagagttggctaaacagaatttgtctaccgttccacatagatacattcagcctcaaaatgaagaagctattagtatccctgagattccaattattgacatgcagagcttgctctctgtagaatcttgtagttctgaattagccaagcttcaccttgcatgcaaagaatggggattcttccagctgataaaccatggtgttagctcatccttgctcgagaaagtaaagttggagattcaagacttcttcaaccttccaatgtcagagaaaaaaaagttttggcaaactccacagcatatggaaggatttggacaagcatttgttgtgagtgaagatcagaaacttgattggggtgatttgttcattatgaccactcttccaacacaatcgagaatgcctcacttatttccacaactccctcttcctttcagagacactctagaactttactcacacaaaatgaaaaatctagccatggtaattattggccatatgggaaaagctttgaatatagaagaaatgaaaataagagagttatttgaagatgggatacaattgatgaggatgaattattacccaccatctcctcaacctgaaaaggttattggactcacaaatcattcagatgcaacagctctcactatcctcttacaagtcaatgaagtagaagggctacagataaggaaagatgacatgtgggttccagttaggcccatgccaaacgcctttgtcgttaatgttggggatatcttggagattaatactaatgggacatatcgaagtattgaacaccgagcaacggtgaactctgaaaaggaaaggctttcaattgcaacattctatagcccaagacaagatggtgtgataggtccatggccaagtttgatcactaaacaaacaccagcacaattcaaaagaatcggagtaaaggaatactttaagaatttcttcgcccgtaaacttgaaggaaagtctaacagagatgccttgagaatagagcatcacaactga

SEQ ID NO: 25057 - protein, 353 aa, Glycine max
MEEFFNPLGTSLLVPSVQELAKQNLSTVPHRYIQPQNEEAISIPEIPIIDMQSLLSVESCSSELAKLHLACKEWGFFQLINHGVSSSLLEKVKLEIQDFFNLPMSEKKKFWQTPQHMEGFGQAFVVSEDQKLDWGDLFIMTTLPTQSRMPHLFPQLPLPFRDTLELYSHKMKNLAMVIIGHMGKALNIEEMKIRELFEDGIQLMRMNYYPPSPQPEKVIGLTNHSDATALTILLQVNEVEGLQIRKDDMWVPVRPMPNAFVVNVGDILEINTNGTYRSIEHRATVNSEKERLSIATFYSPRQDGVIGPWPSLITKQTPAQFKRIGVKEYFKNFFARKLEGKSNRDALRIEHHN

SEQ ID NO: 25058 - DNA, 1191 bp, Glycine max
  CDS (1)..(1191)
atgctagttcctcatccttcaatgctaattgcacctcaaaacaccgtagaaaatcatgacaacatcatggaaggacagaaactacactttgatggatctttgatgccaaaccaatccaacataccctcccagttcatatggcctgatcatgaaaaaccatgcctaacaccaccagaactccaaattccacccattgacttgaagtgctttctctcagcagatccacaagctttgtcaacagtttgtgctgaattgagtgaggcatgcaagaagcatggcttcttccttgttgtcaaccatggagttgatagcaagctcatagctcaagctcataagctcatagatgatttcttctgcatgcaactctcacagaagcagaaggctcagagaaagattggagaacattgtggctatgctaatagcttcattggaagattctcctccaaacttccttggaaggaaacactttctttccattattctgcagataaatccagaaaaactgtggaggattatttccttaatgtcatgggggaagatttcaagcaatttgggagtgtgttccaagaatactgtgaagccatgagcaaactctctcttgggataatggagcttctggggatgagcctaggagttggcagggaatgtttcagagatttcttcgaaggaaatgagtcggttatgaggttgaattactacccaccatgccaaaaacctgagttagctttaggaactggacctcattgtgaccctacatccctaaccattctccaccaagatcaagtcgagggcctccaagtctttgttgatggaagatggtactctgtcgctcctaaagaagatgctttcgttgtcaatattggcgacacatttatggctctatcgaatgggatgttcaagagttgcttgcatagagcagttgtaaacaacaaaattgtgagaaaatcacttgctttcttcctatgtccaaatagagacaaagtggtcacccctccaaaagatctaatcagctacgaaaattcaagaacatacccagatttcacatggccaagccttcttgaatttacacagaaacactacagatctgacacaaaaacacttgatgctttctcgagatggctactagaaaaaaacaatccgaacaggggtgcccccacaaatgttccatggccaacaaaatctataaactga

SEQ ID NO: 25059 - protein, 396 aa, Glycine max
MLVPHPSMLIAPQNTVENHDNIMEGQKLHFDGSLMPNQSNIPSQFIWPDHEKPCLTPPELQIPPIDLKCFLSADPQALSTVCAELSEACKKHGFFLVVNHGVDSKLIAQAHKLIDDFFCMQLSQKQKAQRKIGEHCGYANSFIGRFSSKLPWKETLSFHYSADKSRKTVEDYFLNVMGEDFKQFGSVFQEYCEAMSKLSLGIMELLGMSLGVGRECFRDFFEGNESVMRLNYYPPCQKPELALGTGPHCDPTSLTILHQDQVEGLQVFVDGRWYSVAPKEDAFVVNIGDTFMALSNGMFKSCLHRAVVNNKIVRKSLAFFLCPNRDKVVTPPKDLISYENSRTYPDFTWPSLLEFTQKHYRSDTKTLDAFSRWLLEKNNPNRGAPTNVPWPTKSIN

SEQ ID NO: 25060 - DNA, 1131 bp, Glycine max
  CDS (1)..(1131)
atgatgagttgccaagcatggcctgaacccatagttcgagtccaatccttagctgacagtggcctaagctcaatcccttcacgctatattaggccacactcccaaagaccctccaacaccacttcttttaaactttcacaaaccgaacatgatcatggtcacggtcgagagactcgtgaccatgatcatgttaacatccccgttattgacctggaacatcttttctcggaggatgaaatcctccgagaaaagatattccgacacgtggacgaggcgtgtcgggagtgggggttcttccaggtggtgaaccatggggttagccatgagttgatgaaaagttctagggaactgtggcgcgagttcttcaaccagccacttgaggtgaaggaggagtatgccaactcccccaccacttatgagggctatggaagtcgcttgggagtgcagaaaggtgccaccttggactggagtgactacttctttctccattacaggcctccctcacttaggaaccaagctaagtggcttgcatttccacaatcctttaggaaagtgattgctgaatatggggaggaagtggttaagctaggaggaaggatactcaaaatgatgtcaataaaccttggcttgaaagaagatttccttctcaatgcatttgggggagagagtgaggttggtgcatgcctaagggtgaatttctacccaaagtgccctcaacctgacctcacttttggactctcccctcactcagaccctggtggcatgaccattcttctctctgatgactttgtgtctggccttcaagtaagaagaggagatgaatgggtcatagttaagcctgtcccaaatgcattcgtcatcaacattggtgaccaaattcaggtgctgagcaatgcaatatacaagagtgtagagcacagggtgattgtgaactcaaacaaagatcgtgtgtccttggcattgttctataacccgagaagtgatttactcattcaacctgccaaggagcttgtgacagaggagaggccagccttgtactcaccaatgacctatgatgaatacagactttacattaggctaaatggaccttgtggaaaggcccaagttgaatcactggctttccaaccatga

SEQ ID NO: 25061 - protein, 376 aa, Glycine max
MMSCQAWPEPIVRVQSLADSGLSSIPSRYIRPHSQRPSNTTSFKLSQTEHDHGHGRETRDHDHVNIPVIDLEHLFSEDEILREKIFRHVDEACREWGFFQVVNHGVSHELMKSSRELWREFFNQPLEVKEEYANSPTTYEGYGSRLGVQKGATLDWSDYFFLHYRPPSLRNQAKWLAFPQSFRKVIAEYGEEVVKLGGRILKMMSINLGLKEDFLLNAFGGESEVGACLRVNFYPKCPQPDLTFGLSPHSDPGGMTILLSDDFVSGLQVRRGDEWVIVKPVPNAFVINIGDQIQVLSNAIYKSVEHRVIVNSNKDRVSLALFYNPRSDLLIQPAKELVTEERPALYSPMTYDEYRLYIRLNGPCGKAQVESLAFQP

SEQ ID NO: 25062 - DNA, 1137 bp, Glycine max
  CDS (1)..(1137)
atgggagtctcaggcaacaatgaagttttagtgacaacaaaggtagttgttgactatgatagagcaagtgagctcaaagcttttgatgacacacaagatggtgttatgggacttactgatgctggtgtcacaaagatccctcttatattccataaccccaaaaattctcatcatgatgaatctgatgatggttcaggtagcacacaactcagtgttccttcaatagatcttgttggtgttgctgaagatccagctacaaggaaagtggtggttgagaaaatcagacaagcatgtgagacatggggtttcttccaagttgttaatcatggaataccattgagtgttttggaggagatgaagagtggagtgaataggttctatgagcaagactctgaggtgaaaagggaactatacacacgtgaccctttgaggcctttggtgtataatagcaactttgatctttttacttcaccagctgctaattggagggataccttttactgcttcatggctcctcatccaccaaaacccgaagacttgccatcagtgtgcagagacatactgctggaatatgcaaaagaagttaagaagctggggagtgtgttgtttgagttattatcagaagcccttgagctgaatccaaactatttgaatgacattggttgcaatgagggacttacacttgtttgccattgctaccctgcatgtccagaaccagaattgactttaggtgcaaccaagcacactgataatgacttcatcactgtgcttctgcaagatcatattggtggcctccaagttcttcatgaaaacaggtgggtggatgtgtcccctgtaccaggtgctctagtgatcaacattggtgatcttcttcagcttataacaaatgacaaattcaagagtgttgagcacagagtggtggcaaaccgtgtaggtccaagagtatcagttgcaagcttttttagcacaagtcttcagccatcaacaaagctttatggccccataaaggatttagtatcagaagataatcctccgaagtacagggaaactacagtgcaaggctatgtttcctattccctgggaagaggccttgatgggacttctcctctgccacacttcaggattaaagatttctga

SEQ ID NO: 25063 - protein, 378 aa, Glycine max
MGVSGNNEVLVTTKVVVDYDRASELKAFDDTQDGVMGLTDAGVTKIPLIFHNPKNSHHDESDDGSGSTQLSVPSIDLVGVAEDPATRKVVVEKIRQACETWGFFQVVNHGIPLSVLEEMKSGVNRFYEQDSEVKRELYTRDPLRPLVYNSNFDLFTSPAANWRDTFYCFMAPHPPKPEDLPSVCRDILLEYAKEVKKLGSVLFELLSEALELNPNYLNDIGCNEGLTLVCHCYPACPEPELTLGATKHTDNDFITVLLQDHIGGLQVLHENRWVDVSPVPGALVINIGDLLQLITNDKFKSVEHRVVANRVGPRVSVASFFSTSLQPSTKLYGPIKDLVSEDNPPKYRETTVQGYVSYSLGRGLDGTSPLPHFRIKDF

SEQ ID NO: 25064 - DNA, 1125 bp, Glycine max
  CDS (1)..(1125)
atgagtctcaatgtagatgatgatgagttagtgagtgaaatggatgaagcacccagttttgcttcatctctaccagtccccaatgttcaagaaatggtaaggaataaccctttgcaggttcctgaaagatatgcgaggagtcaagaagagttggagaaagtcaaccatatgcctcacctttcatctgaggtccctgtcattgatttagcactgctttcaaatggaaacaaagaggagttgttgaaattggacgtagcatgcaaagagtggggcttctttcagatagtaaatcatggtgttcaagaacacctgcagaaaatgaaggatgcatcatctgagtttttcaaacttccaatagaagagaagaacaagtatgcatcggcctcaaatgacacacatggctatgggcaggcttatgtagtttctgaggagcagacactagactggtcagatgcattgatgttaatcacgtaccccacccggtacaggaagcttcaattttggcctaaaactccagagggattcatggatataatagatgcatatgcaagtgaagttagacgagttggtgaggaactgattagttcattgtcagtgattatggggatgcagaagcatgttcttcttggactacataaagaatcgcatcaagctttacgtctgaactattatcctccttgcagcacacctgaacaagtgcagggtttgagtccacattctgacacaagcagcatcaccttgcttatgcaagacgatgatgtaactggcttagaaattcgacaccaaggaggatgggtgccagtgaacccaataccagatgctctagttgtcaatgttggagatgtaactgagatatggagtaatggcaaatacaagagtgtagaacacagagcaatgacaaataagaacaaggaaaggatttcttatggattatttttgtgcccacagcatgacgtggaagttgagccacttgatcatatgatagattctcataaccccaagttgtttcagaaagtaaggtatggagattatttgagacaatctctgaaaaggaagttggagggaaaaacacacctaaatgaggcaaagttaaaggagtctgatctaaggaatcaagatgattaa

SEQ ID NO: 25065 - protein, 374 aa, Glycine max
MSLNVDDDELVSEMDEAPSFASSLPVPNVQEMVRNNPLQVPERYARSQEELEKVNHMPHLSSEVPVIDLALLSNGNKEELLKLDVACKEWGFFQIVNHGVQEHLQKMKDASSEFFKLPIEEKNKYASASNDTHGYGQAYVVSEEQTLDWSDALMLITYPTRYRKLQFWPKTPEGFMDIIDAYASEVRRVGEELISSLSVIMGMQKHVLLGLHKESHQALRLNYYPPCSTPEQVQGLSPHSDTSSITLLMQDDDVTGLEIRHQGGWVPVNPIPDALVVNVGDVTEIWSNGKYKSVEHRAMTNKNKERISYGLFLCPQHDVEVEPLDHMIDSHNPKLFQKVRYGDYLRQSLKRKLEGKTHLNEAKLKESDLRNQDD

SEQ ID NO: 25066 - DNA, 1074 bp, Glycine max
  CDS (1)..(1074)
atggaagagatcaacaagaacccatcagggacttctcttttggtaccatcagtgctagagttggctaaagagaatttgactactgttccacaaagatacattcagcctcaacatcaagacatggtgctcatctctgaagaagatcatagtacccttgagattccagttattgacatgcacagattgctttctgtagaatctgggagttcagaattggataagcttcacctggcgtgcaaagaatggggattcttccagctggttaaccatggagttaactcttccttggtggagaaagtaaggttggagactcaggatttcttcaaccttccaatgtcagagaagaaaaagttttggcaaactccacagcatatggagggatttggacaagcatttgttgtgagtgaagaccaaaaacttgattgggcagacctttactatatgaccacccttccaaaacactctagaatgccccacttatttccacaactccctcttcctttcagagacactctagaggcttactcacaggaaataaaagatctagccatagttattataggccttatgggaaaagctttgaagattcaagaaagggaaataagagaattatttgaagatggaatacaactaatgaggatgaactattaccctccatgccctgaaccagagaaggttattggcctcactcctcattcagacggaattggactcgctattcttctacaactcaatgaagttgaaggtcttcagataaggaaagatggcttgtgggttccggttaaacccttgattaatgctttcattgtcaatgttggtgacatattagagattataactaatggtatataccgaagcattgagcatcgggcaacagtaaatggcgaaaaagaaagactttcatttgcaacattctatagtccaagttcagatggtgtggtaggtcctgcaccaagcttgatcactgaacaaacaccaccacgattcaaaagcataggagtaaaggactacttcaagggcttattttctcgcaaactcgatggaaaggcctacatagaagtcatgagaatatag

SEQ ID NO: 25067 - protein, 357 aa, Glycine max
MEEINKNPSGTSLLVPSVLELAKENLTTVPQRYIQPQHQDMVLISEEDHSTLEIPVIDMHRLLSVESGSSELDKLHLACKEWGFFQLVNHGVNSSLVEKVRLETQDFFNLPMSEKKKFWQTPQHMEGFGQAFVVSEDQKLDWADLYYMTTLPKHSRMPHLFPQLPLPFRDTLEAYSQEIKDLAIVIIGLMGKALKIQEREIRELFEDGIQLMRMNYYPPCPEPEKVIGLTPHSDGIGLAILLQLNEVEGLQIRKDGLWVPVKPLINAFIVNVGDILEIITNGIYRSIEHRATVNGEKERLSFATFYSPSSDGVVGPAPSLITEQTPPRFKSIGVKDYFKGLFSRKLDGKAYIEVMRI

SEQ ID NO: 25068 - DNA, 1152 bp, Glycine max
  CDS (1)..(1152)
atggcaatagactgcataacaagcatacccatgatgcctcaaccaccaacccaagaaacaaccaaagaacaagaacagcagcagccactggtgtttgatgcctcagtcctcagacaccaacttcacataccctcacaattcatctggcccgatgaggaaaaagcatgcttggacgaacccgagttgttggtcccattcattgacttgggagggttcctctctggtgacccagttgccgcagcggaagcctcaaggcttgctggtgaggcatgccaaaagcatggcttttttctggttgtgaatcacgggattgatcaacggttgatatctgatgctcatctttacatggagcacttctttgggcttcccctgtctcagaaacagagggcacagaggaagccaggggagcactgtggttatgctagtagcttcactggcaggttctcctcaaagctcccttggaaagagacactttcctttcagtactcagctgacaaaaactcatcaccaactcttgtcaaagactacttgtgcagtaaaatgggcaatgagtttgagcaatttgggaaagtttaccaggactactgtgatgccatgagcaatctttctttaggtataatggagcttctaggaatgagccttggagttggtaaagcatgttttagagagttctttgaagagaataactcaataatgaggctcaattactaccctccttgtcaaaagcctgacctcactttaggcactggacctcactgtgacccaacatctttgaccattcttcaccaagaccaagtgggaggcttgcaagtttgtgttgacaatgagtggcattccattaagccggatctcaatgcttttgttgtcaatgttggtgataccttcatggctctttcgaatgggagatacaagagttgcttgcatagggcagtggtgaatagccagacaacaagaaaatctcttgctttctttttgtgtccaagaagtgacaaggtggtaagtccaccatgtgaattagtggacaatttgagcccaaggctatacccagattttacatggcccatgctgctggagttcactcaaaagcattacagagctgacatgaaaacccttgaggcatttgccaactggctgcaacggaaaagtaactga

SEQ ID NO: 25069 - protein, 383 aa, Glycine max
MAIDCITSIPMMPQPPTQETTKEQEQQQPLVFDASVLRHQLHIPSQFIWPDEEKACLDEPELLVPFIDLGGFLSGDPVAAAEASRLAGEACQKHGFFLVVNHGIDQRLISDAHLYMEHFFGLPLSQKQRAQRKPGEHCGYASSFTGRFSSKLPWKETLSFQYSADKNSSPTLVKDYLCSKMGNEFEQFGKVYQDYCDAMSNLSLGIMELLGMSLGVGKACFREFFEENNSIMRLNYYPPCQKPDLTLGTGPHCDPTSLTILHQDQVGGLQVCVDNEWHSIKPDLNAFVVNVGDTFMALSNGRYKSCLHRAVVNSQTTRKSLAFFLCPRSDKVVSPPCELVDNLSPRLYPDFTWPMLLEFTQKHYRADMKTLEAFANWLQRKSN

SEQ ID NO: 25070 - DNA, 1086 bp, Glycine max
  CDS (1)..(1086)
atgttaaaaaaccaaccacaaccagattggcctgagcccattgtccgggttcagtccttatccgaaaactgcgaagattcaatccctgaaaggtacatcaagccttctactgatagaccatccataaaaagttctaattttgatgatgccaatattccaatcatcgaccttgggggactatttggtgctgaccaacatgtctcagactcaattcttaagcaaatctcagatgcttgcaaagaatggggcttcttccaagtcactaatcatggtgtcaaccctgatttgatggacaaggtcagggaaacttggcgtgaattctttcacatgcccatggaggtgaagcagcaatatgcaaactcgccaaaaacctatgaaggctacggaagcagacttggaattgagaaaggtgctattcttgattggagtgattactactttcttcactatcttcccttttcactcaaggactataacaaatggcccgcctcgcctccctcttgcaggaaagtgtttgatgagtatgggagagagttagtgaagctatgtgggaggttgatgaaggctttgtcaataaaccttggattagatgaaaaaattcttcaaaatggttttgggggagaagacataggggcatgtctaagagtgaatttttaccctaaatgtccacggccagagttgacgttgggtttgtcatcacactcagaccctggaggaatgactatgttgcttccagatgatcaagttcctggtcttcaagttcgaaaatgtgataattggattaccgtgaagcctgcacgccatgcttttatcgtcaatatcggagaccaaattcaggttctaagcaatgcaatttacaagagtgtggagcacagagtgatagtaaattcagataaagagagagtttctctggcatttttctacaaccccaaaagtgatatacccattgagccaataaaagagctggtaacaccggaaaagccctcactctacccagcaatgaccttcgatgaatacagactcttcattagaatgagaggacctcgaggcaaatctcaagttgaatctttaaagtctcccagatga

SEQ ID NO: 25071 - protein, 361 aa, Glycine max
MLKNQPQPDWPEPIVRVQSLSENCEDSIPERYIKPSTDRPSIKSSNFDDANIPIIDLGGLFGADQHVSDSILKQISDACKEWGFFQVTNHGVNPDLMDKVRETWREFFHMPMEVKQQYANSPKTYEGYGSRLGIEKGAILDWSDYYFLHYLPFSLKDYNKWPASPPSCRKVFDEYGRELVKLCGRLMKALSINLGLDEKILQNGFGGEDIGACLRVNFYPKCPRPELTLGLSSHSDPGGMTMLLPDDQVPGLQVRKCDNWITVKPARHAFIVNIGDQIQVLSNAIYKSVEHRVIVNSDKERVSLAFFYNPKSDIPIEPIKELVTPEKPSLYPAMTFDEYRLFIRMRGPRGKSQVESLKSPR

SEQ ID NO: 25072 - DNA, 1098 bp, Glycine max
  CDS (1)..(1098)
atgcctcccgtaccaatttcccccatcaaagttgggcacattgatgatgtccaagagctaagaaaaaccaagccaaggacaattcctcaaagatttgtacgagacttgacagaaagaccaacactcactacacctcttcccccaccacatagtgacatgccagtcattgatttctctaagcttagcaaagggaacaaagaggaagtcctcactgaacttttcaatcttgcaactgcttgtgaagagtggggattttttcaggtaattaatcatgaaattgacctcaatctgctggagagcatcgagaacctgagcagggagtttttcatgctacctttggaagagaaacagaaataccctatggctccaggaacagtccaagggtatggacaagcttttgttttctcagaggaccaaaaactggactggtgcaacatgtttgctcttggaattgaacctcaatatgttaggaacccaaatctatggccaaagaaaccagaaaaattcagcgaaactgtggaagaatactcaggagaaataaggaaactctgctataatctgttaacatacatagctttaggccttggtttgaaaggggatgagtttgaggagatgtttggcgtatcggtgcaagccgtgaggatgaactactaccctccatgttcaagacctgaccttgttttgggtctgagtccccattcagatggaagtgccctcactgttctgcagcaagcaaagggaggcccagtgggacttcagatactcaaggacaatacatgggttcctattcaaccaattccaaatgctcttgtcatcaacattggagacacaatagaagttcttacaaatgggaaatacaggagtgtggagcatagagctgtggctcatgaggagaaagctagactctcaattgtgacattttttgctcctagctatgaagtggagcttggtccaatgcctgagtttgtggatgaaaaccacccatgcaagtataaaagatacaatcatggagagtacagtaaacactatgtaacaaacaagttacaaggtaaaaagaccctggaatttgccaagatccaaaccaaaaacaaaaactag

SEQ ID NO: 25073 - protein, 365 aa, Glycine max
MPPVPISPIKVGHIDDVQELRKTKPRTIPQRFVRDLTERPTLTTPLPPPHSDMPVIDFSKLSKGNKEEVLTELFNLATACEEWGFFQVINHEIDLNLLESIENLSREFFMLPLEEKQKYPMAPGTVQGYGQAFVFSEDQKLDWCNMFALGIEPQYVRNPNLWPKKPEKFSETVEEYSGEIRKLCYNLLTYIALGLGLKGDEFEEMFGVSVQAVRMNYYPPCSRPDLVLGLSPHSDGSALTVLQQAKGGPVGLQILKDNTWVPIQPIPNALVINIGDTIEVLTNGKYRSVEHRAVAHEEKARLSIVTFFAPSYEVELGPMPEFVDENHPCKYKRYNHGEYSKHYVTNKLQGKKTLEFAKIQTKNKN

SEQ ID NO: 25074 - DNA, 1071 bp, Glycine max
  CDS (1)..(1071)
atggaagtaacagctgctccagtgccttatgtccaagaaattgcaaaggaggcattgaccatagtgcctgagcgttatgttcgaccagttcatgaacgtcctatattatctaactctacacctttacctcaaattcctgtcattgacttgagcaaattgttgtctcaagaccacaaggagcatgaactcgacaggcttcactatgcatgcaaagaatggggtttctttcagctaattaatcacggagtggactcttcattggtggaaaaagtgaagagaggtgctcaaggattattcgatcttccaatggaagagaagaaaaagtttgggcagagagaaggagaagctgagggatatggtcaactcttcgtggtttcagaggaacagaagttagagtgggcagatttgtttttcatgttcactttgccaccaaacaagaggaaaccccacttattccccaaccttcccctgccattcaggggtgatttagacgcctattgtgaagaattaagaaaacttgcaatccagatccttgaccagatggccaattctcttgcaatagacccaatggaaataagagagttatttggtgaagcagaacaatcaatgaggatgaattattatccaccatgtccccaaccagagcttgtgatgggactcaatcctcattctgatggtggaggcctcaccatccttctccaagccaatgaagtggaaggtcttcaaataagaaaagatggactgtggattccagttaaaccccttcccaatgctttcatcataaaccttggtgacatgttggaggtgatgagtaatggaatctaccaaagcatagagcacagggcaacagttaactcagagaaagagagactttccatagccacattttatagcactgctatagatgcaattatatgtccagcaccaagccttgtaactccaaaaacaccagcaatgttcaaaccaatcagcgcgggagattacttcaaaggataccttgcacaagaacttcgcgggaaatctttccttgacaccataagaattcatgctgaaaatgagaatagctcttag

SEQ ID NO: 25075 - protein, 356 aa, Glycine max
MEVTAAPVPYVQEIAKEALTIVPERYVRPVHERPILSNSTPLPQIPVIDLSKLLSQDHKEHELDRLHYACKEWGFFQLINHGVDSSLVEKVKRGAQGLFDLPMEEKKKFGQREGEAEGYGQLFVVSEEQKLEWADLFFMFTLPPNKRKPHLFPNLPLPFRGDLDAYCEELRKLAIQILDQMANSLAIDPMEIRELFGEAEQSMRMNYYPPCPQPELVMGLNPHSDGGGLTILLQANEVEGLQIRKDGLWIPVKPLPNAFIINLGDMLEVMSNGIYQSIEHRATVNSEKERLSIATFYSTAIDAIICPAPSLVTPKTPAMFKPISAGDYFKGYLAQELRGKSFLDTIRIHAENENSS

SEQ ID NO: 25076 - DNA, 1086 bp, Glycine max
  CDS (1)..(1086)
atggcattacaggcagttaatgacagaaaagctgaagttcaagcatttgatgattctaaaacgggtgtaaaaggtgtcctagattctggggtaacaaagatccctaccatgttccatgtcaagttagactcaactcacacctcaccaactcactccaacttcaccatcccaatcatagatcttcagaacataaacagcaattcaactctgcatgctgaagtggttgaccagcttaggagtgcatctcagaagtggggatttttccaagtgatcaatcatggcgttcctgtggaggttttggatgagatgatcagtggaatccgcaggtttcatgagcaagatgctgaggcaaggaagcccttttactcgagagatagcagtaagaaagtcaggtatttttctaatgggaagctgttcagagacatggctggtacttggagggacacaattgcatttgatgtgaatcctgatcccccaaacccacaagatataccagcagtgtgtagagatattgtggctgaatattcaaaacaagtaaaagcgttaggtaccacgatctttgagctactgtcagaggctcttggccttgatccttcttaccttgaagaaatggactgcactaaagcactttatgttatgggtcagtactatccaaaatgccctgaacctgaattaactatgggaatttcaaagcacactgattgtgacttcataacaatacttttgcaagatcagattggtggtctccaagttcttcatgagaatcattgggttaatgctcctccagtgcgaggagctcttgttgtcaacattggagatattctgcagcttatgactaatgacaagttcatcagtgtttatcaccgggtcttgtcgaggaatatgggccctagaatttctgtagcaaccttcttcatgaattttaccatatctaaatgtacatcgaagagttatggtccaataaaggaattgttatcagaagaaaaccccccagtctatagggacatgaatatgaaagaaatcttgacaaattattatgcaaaaggccttgatgggagctcctacttgctgcctttaaggttgtga

SEQ ID NO: 25077 - protein, 361 aa, Glycine max
MALQAVNDRKAEVQAFDDSKTGVKGVLDSGVTKIPTMFHVKLDSTHTSPTHSNFTIPIIDLQNINSNSTLHAEVVDQLRSASQKWGFFQVINHGVPVEVLDEMISGIRRFHEQDAEARKPFYSRDSSKKVRYFSNGKLFRDMAGTWRDTIAFDVNPDPPNPQDIPAVCRDIVAEYSKQVKALGTTIFELLSEALGLDPSYLEEMDCTKALYVMGQYYPKCPEPELTMGISKHTDCDFITILLQDQIGGLQVLHENHWVNAPPVRGALVVNIGDILQLMTNDKFISVYHRVLSRNMGPRISVATFFMNFTISKCTSKSYGPIKELLSEENPPVYRDMNMKEILTNYYAKGLDGSSYLLPLRL

SEQ ID NO: 25078 - DNA, 1050 bp, Glycine max
  CDS (1)..(1050)
atggccgaaaagttagtgctggtatcagacatggcttccactatgaagcaggttccctctaatttcatcaggccactcggtgaccgtccaaatcttcaaggcgtcgtccaatcctcagatgtttgcattcctctcatcgatctccaagaccttcatggccccaatcgctcccacatcatccaacagattgaccaagcttgccaaaattatggattttttcaggtgacaaatcatggagttccagagggtgtgattgaaaagataatgaaggtgacaagggagtttttcggtttaccagagagtgagaaattgaagagttactccactgatccattcaaggcaagcaggctgtccactagtttcaacgtgaatagtgagaaggtttccagctggagggacttcttgagacttcactgtcaccctatagaggattacataaaggaatggccctccaaccctccatctttaagagaagatgttgcagaatactgcaggaagatgagaggagtatcattgaaattggtggaggcaatttctgaaagcttaggtttggagagggattacattaacagggtagttggagggaagaaggggcaggaacaacagcacttggcaatgaactactatccagcgtgtccagagccagagctgacatatgggttgccagggcatactgatccgacggtgataaccatactcctccaagatgaggtaccgggattacaggttctcaaagatggcaagtgggtggctgtgaatcccatccccaacaccttcgtagtgaacgtgggtgatcaaattcaggtgataagcaatgacaagtataagagtgtactgcatcgagcagtggtgaattgcaacaaggacaggatttccattccaacattctattttccctcaaatgacgcaatcataggacccgctccacaactcatacatcatcatcaccatccgcctcagtacaacaactttacgtacaatgaatactaccagaatttttggaacaggggactttccaaagaaacttgcctcgatatcttcaaggcctaa

SEQ ID NO: 25079 - protein, 349 aa, Glycine max
MAEKLVLVSDMASTMKQVPSNFIRPLGDRPNLQGVVQSSDVCIPLIDLQDLHGPNRSHIIQQIDQACQNYGFFQVTNHGVPEGVIEKIMKVTREFFGLPESEKLKSYSTDPFKASRLSTSFNVNSEKVSSWRDFLRLHCHPIEDYIKEWPSNPPSLREDVAEYCRKMRGVSLKLVEAISESLGLERDYINRVVGGKKGQEQQHLAMNYYPACPEPELTYGLPGHTDPTVITILLQDEVPGLQVLKDGKWVAVNPIPNTFVVNVGDQIQVISNDKYKSVLHRAVVNCNKDRISIPTFYFPSNDAIIGPAPQLIHHHHHPPQYNNFTYNEYYQNFWNRGLSKETCLDIFKA

SEQ ID NO: 25080 - DNA, 1200 bp, Glycine max
  CDS (1)..(1200)
atgctagttcctcatcatccttcaatgctaattgcacctcaaaacacatccgcagaaaatcatgacaacatggaaggacagaaacaactacaccactttgatgaatctttgatgccaaaccagtccaacataccctcccagttcatatggcctgatcatgaaaaaccatgcttaacaccaccagaactccatattccacccattgacttgaaggcttttctctcaggagatccacaagctgtgtcagcaatttgtgcagaagccaatgaggcatgcaagaagcatggcttcttccttgttgtcaaccatggtgttgatagaaagctcatagctcaagctcataagctcatagatgatttcttctgcatgcagctgtcacagaagcagaaggctcagagaaagattggagaacattgtggctatgctaatagcttcattggaagattctcctccaaacttccttggaaggaaacactttctttccattattctgctgataaatccagaaaaactgtggaggattatttcctaaatgtcatgggggaagatttcaagcaatttgggagtgtgttccaagaatactgtgaagccatgagcaaactctctcttgggataatggagcttctggggatgagcctaagagttggcagggaatgtttcagagatttcttcgaaggaaatgagtcggttatgaggttgaattactacccaccatgccaaaaacctgagttagctgtaggaactggacctcattgtgaccctacatccctaaccattctccaccaagatcaagtcgagggcctccaagtctttgttgatggaagatggtactctgtcgctcctaaagaagatgctttcgttgtcaatattggcgacacatttatggctctatcgaatgggatgttcaagagttgcttgcatagagcagttgtaaacaacaaaattgtgagaaaatcacttgctttcttcctatgtccaaatagagacaaagtggtcacccctccaaaagatctaatcagctacgaaaattcaagaacatacccagatttcacatggccaagccttcttgaatttacacagaaacactacagatctgacacaaaaacacttgatgctttctcgaggtggctactagaaaaaaacaatccgaacaggggtgcccccacaaatgttccatggccaacaaaatctataaactga

SEQ ID NO: 25081 - protein, 399 aa, Glycine max
MLVPHHPSMLIAPQNTSAENHDNMEGQKQLHHFDESLMPNQSNIPSQFIWPDHEKPCLTPPELHIPPIDLKAFLSGDPQAVSAICAEANEACKKHGFFLVVNHGVDRKLIAQAHKLIDDFFCMQLSQKQKAQRKIGEHCGYANSFIGRFSSKLPWKETLSFHYSADKSRKTVEDYFLNVMGEDFKQFGSVFQEYCEAMSKLSLGIMELLGMSLRVGRECFRDFFEGNESVMRLNYYPPCQKPELAVGTGPHCDPTSLTILHQDQVEGLQVFVDGRWYSVAPKEDAFVVNIGDTFMALSNGMFKSCLHRAVVNNKIVRKSLAFFLCPNRDKVVTPPKDLISYENSRTYPDFTWPSLLEFTQKHYRSDTKTLDAFSRWLLEKNNPNRGAPTNVPWPTKSIN

SEQ ID NO: 25082 - DNA, 1059 bp, Glycine max
  CDS (1)..(1059)
atgggtacggtggctccaagagttgaaagcttggcgagcagcgggataaagtgtatcccgaaggaatacgtgaggcctcaagaagagctcaagagcatagggaacgtgtttgaggaggaaaagaaggaagggctacaggttccgacaattgacttgagagagatagattcggaggacgaggttgttcgagggaaatgtcgtgagaagctgaagaaagcggcggaggagtggggtgtgatgcacttggtgaaccatgggatccccgatgagctgatagagcgggtgaagaaagcaggggaaacgttctttggtctggcggttgaggaaaaggagaagtacgcgaatgatttggagtctggcaagattcaaggctatggaagcaagctggccaacaatgccagtggccaactcgagtgggaagattacttcttccaccttgctttccctgaggacaagcgtgacctctccttctggccaaagaaacccgctgattatattgaggtcacaagcgagtatgcaaagcgactgagggggcttgcgaccaagatattggaggcactctctattggattgggtctggaaggagggaggttggagaaggaagttggtgggatggaagagcttctacttcaattgaagatcaactactaccctatttgtccccagccagaacttgctcttggagttgaagcccacaccgatgtcagttcactcactttcctccttcataacatggtgccaggtctgcagctattctaccaaggccaatggttcacagcaaaatgtgtccccaattccattctcatgcacattggtgacaccattgagatcctgagcaacggcaagtacaagagcattcttcatcggggtttggtcaacaaggaaaaggttagaatatcgtgggcaatgttctgtgaaccccccaaggagaagatcatcctgcagccacttcccgagcttgtcactgagacagagccagcacgctttccacctcgcacttttgctcagcatattcaccacaaactattcaggaaggatcaggaaggtctcccaaattga

SEQ ID NO: 25083 - protein, 352 aa, Glycine max
MGTVAPRVESLASSGIKCIPKEYVRPQEELKSIGNVFEEEKKEGLQVPTIDLREIDSEDEVVRGKCREKLKKAAEEWGVMHLVNHGIPDELIERVKKAGETFFGLAVEEKEKYANDLESGKIQGYGSKLANNASGQLEWEDYFFHLAFPEDKRDLSFWPKKPADYIEVTSEYAKRLRGLATKILEALSIGLGLEGGRLEKEVGGMEELLLQLKINYYPICPQPELALGVEAHTDVSSLTFLLHNMVPGLQLFYQGQWFTAKCVPNSILMHIGDTIEILSNGKYKSILHRGLVNKEKVRISWAMFCEPPKEKIILQPLPELVTETEPARFPPRTFAQHIHHKLFRKDQEGLPN

SEQ ID NO: 25084 - DNA, 924 bp, Glycine max
  CDS (1)..(924)
atggcagttccagtgattgatttttcaaagctgaatggtgaagaaagaaccaaaactatggcacagattgctaatgggtgtgaagagtggggattttttcagttgatcaaccatggtattccagaggaactccttgagagggtgaagaaggttgcctctgagttctataagctggaaagagaggagaatttcaagaactccacatcagtgaagctactaagcgattcagtcgaaaagaagagcagcgaaatggagcatgtggattgggaggatgttatcactctccttgatgataatgaatggccagaaaaaacaccaggattcagggaaaccatggcagaatatcgagccgagttaaagaaattggcagagaaactgatggaggtgatggatgagaatcttggcttaacaaaaggatacatcaagaaggcactgaatggtggagatggagaaaatgccttctttggcaccaaggtgagccactaccctccatgtccccatccagagctcgtgaagggtctgcgagctcacaccgatgcaggaggcgtaatcctactcttccaagatgacaaggttggtggccttcagatgctgaaagaagggcaatggattgatgtgcagcctttgccaaatgccattgtcatcaacactggtgatcagattgaggtcttgagcaatggtagatacaagagttgctggcacagggttctggccacaccagatgggaacagaagatcaattgcctccttctataatccttcattcaaggccaccatatgtcctgcaccacaacttgtggagaaagaagaccaacaagtagatgaaacttatcctaagtttgtttttggtgactacatgtctgtctatgctgagcagaagttccttcccaaggaaccaagattccaagctgttagggccatgtga

SEQ ID NO: 25085 - protein, 307 aa, Glycine max
MAVPVIDFSKLNGEERTKTMAQIANGCEEWGFFQLINHGIPEELLERVKKVASEFYKLEREENFKNSTSVKLLSDSVEKKSSEMEHVDWEDVITLLDDNEWPEKTPGFRETMAEYRAELKKLAEKLMEVMDENLGLTKGYIKKALNGGDGENAFFGTKVSHYPPCPHPELVKGLRAHTDAGGVILLFQDDKVGGLQMLKEGQWIDVQPLPNAIVINTGDQIEVLSNGRYKSCWHRVLATPDGNRRSIASFYNPSFKATICPAPQLVEKEDQQVDETYPKFVFGDYMSVYAEQKFLPKEPRFQAVRAM

SEQ ID NO: 25086 - DNA, 1023 bp, Glycine max
  CDS (1)..(1023)
atgtccagcgttaaggagttagttgaatctaagtgtctgagttctgttccctccaactacatttgccttgaaaatcccgaagattctatattgaattatgaaacagataatattccaaccattgatttttcccaactcacctcttctaatcccagtgtacgctccaagggaatcaaacaactaggagatgcttgccgcgattggggtttctttatgctaatcaatcacggtgtgtcggagatactaagggatgaggtgattaggacaagccagggcttttttgatctgactgagaaagaaaaaatggagcacgcaggaaggaacctatttgatccaataagatatgggacaagcttcaatgtcacggtggacaagacccttttctggagagattatctcaaatgtcatgttcaccctcactttaatgctccttccaagcctcctggttttagccaaactttagaggaatacattaccaagggcagggaactggttgaagagttgctagaaggaatatctctaagcttagggcttgaagaaaacttcatacataaaaggatgaatctagacttgggatcccagttgctggttatcaactgttacccaccatgtcctaaccctgagcttgttatgggccttcctgcacacacagaccatgggcttctgaccctcctaatgcaaaacgagcttggagggcttcaaattcaacacaatggcaagtggattcctgtccaccccttacccaactcctttctcatcaacactggggatcacatggagatactgaccaatgggaaatacaagagtgttgttcatcgagctgtagcgaacacgaaagccactaggatttccgttggtacagcacacggacccaagcttgacaccattgtggggcccgcaccagagcttgttggcgatgataatactgcttcataccgtgccatcaaatacagtgattacatcgagcttcagcaaaaccatgaactcgacggaaagtcgtgcttggatcgtattcgcatttga

SEQ ID NO: 25087 - protein, 340 aa, Glycine max
MSSVKELVESKCLSSVPSNYICLENPEDSILNYETDNIPTIDFSQLTSSNPSVRSKGIKQLGDACRDWGFFMLINHGVSEILRDEVIRTSQGFFDLTEKEKMEHAGRNLFDPIRYGTSFNVTVDKTLFWRDYLKCHVHPHFNAPSKPPGFSQTLEEYITKGRELVEELLEGISLSLGLEENFIHKRMNLDLGSQLLVINCYPPCPNPELVMGLPAHTDHGLLTLLMQNELGGLQIQHNGKWIPVHPLPNSFLINTGDHMEILTNGKYKSVVHRAVANTKATRISVGTAHGPKLDTIVGPAPELVGDDNTASYRAIKYSDYIELQQNHELDGKSCLDRIRI

SEQ ID NO: 25088 - DNA, 1128 bp, Glycine max
  CDS (1)..(1128)
atggcaccaacagccaagactctgacttacctggcccaggagaaaaccctagaatcgagcttcgttcgggacgaggaggagcgtcccaaggttgcctacaacgaattcagcgacgagatcccagtgatttctcttgccggaatcgacgaggtggatggacgcagaagagagatttgtgagaagatcgtggaggcttgcgagaattggggtatattccaggttgttgatcacggtgtggatcaacaactcgtggccgagatgacccgtctcgccaaagagttctttgctttgccaccggacgagaagcttcgttttgatatgtccggcgccaaaaagggtggattcattgtctccagccatctccaaggggaatcggtgcaggactggagagaaatagtgacatacttttcgtacccaaaaagagagagggactattcaaggtggccagacacgccagaagggtggagatcggtgactgaggaatacagcgacaaagtaatgggtctagcttgcaagctcatggaggtgttgtccgaagcaatggggttagagaaagagggtttaagcaaagcatgtgttgacatggaccagaaggtggtggttaattactaccccaaatgccctcaacctgacctcactcttggcctgaagcgccacacggatccgggcactatcaccttgctgcttcaggaccaagtgggtggacttcaagccaccagggacaatggcaaaacatggatcaccgttcagcctgtggaggctgccttcgtcgtcaatcttggagatcatgctcattatctgagcaatggaaggttcaagaatgctgatcaccaagcggtggtgaactcaaaccatagccgtttgtccatagccacttttcaaaacccagcaccaaatgcaactgtttaccctctgaagataagagaaggagagaagcctgtgatggaggaaccaatcacttttgctgaaatgtacaggaggaagatgagcaaggacattgagattgcaaggatgaagaagctggctaaggaaaagcatttgcaggaccttgagaatgaaaagcatttgcaagaacttgatcagaaggcaaaacttgaggccaagcctttgaaggagattcttgcttaa

SEQ ID NO: 25089 - protein, 375 aa, Glycine max
MAPTAKTLTYLAQEKTLESSFVRDEEERPKVAYNEFSDEIPVISLAGIDEVDGRRREICEKIVEACENWGIFQVVDHGVDQQLVAEMTRLAKEFFALPPDEKLRFDMSGAKKGGFIVSSHLQGESVQDWREIVTYFSYPKRERDYSRWPDTPEGWRSVTEEYSDKVMGLACKLMEVLSEAMGLEKEGLSKACVDMDQKVVVNYYPKCPQPDLTLGLKRHTDPGTITLLLQDQVGGLQATRDNGKTWITVQPVEAAFVVNLGDHAHYLSNGRFKNADHQAVVNSNHSRLSIATFQNPAPNATVYPLKIREGEKPVMEEPITFAEMYRRKMSKDIEIARMKKLAKEKHLQDLENEKHLQELDQKAKLEAKPLKEILA

SEQ ID NO: 25090 - DNA, 1059 bp, Glycine max
  CDS (1)..(1059)
atgggtacggtggctccaagagttgaaagcttggcgagcagcgggataaagtgtatcccgaaggaatacgtgaggcctcaagaagagctcaagagcatagggaacgtgtttgaggaggaaaagaaggaagggctacaggttccgacaattgacttgagagagatagattcggaggacgaggttgttcgagggaaatgtcgtgagaagctgaagaaagcggcggaggagtggggtgtgatgcacttggtgaaccatgggatccccgatgagctgatagagcgggtgaagaaagcaggggaaacgttctttggtctggcggttgaggaaaaggagaagtacgcgaatgatttggagtctggcaagattcaaggctatggaagcaagctggccaacaatgccagtggccaactcgagtgggaagattacttcttccaccttgctttccctgaggacaagcgtgacctctccttctggccaaagaaacccgctgattatattgaggtcacaagcgagtatgcaaagcgactgagggggcttgcgaccaagatgttggaggccctctctattggattgggtctggaaggagggaggttggagaaggaagttggtgggatggaagagcttctacttcaattgaagatcaactactaccctatttgtccccagccagaacttgctcttggagttgaagcccacaccgatgtcagttcactcactttcctccttcataacatggtgccaggtctgcagctattctaccaaggccaatggttcacagcaaaatgtgtccccaattccattctcatgcacattggtgacaccattgagatcctgagcaacggcaagtacaagagcattcttcatcggggtttggtcaacaaggaaaaggttagaatatcgtgggcaatgttctgtgaaccccccaaggagaagatcatcctgcagccacttcccgagcttgtcactgagacagagccagcacgctttccacctcgcacttttgctcagcatattcaccacaaactattcaggaaggatcaggaaggtctcccaaattga

SEQ ID NO: 25091 - protein, 352 aa, Glycine max
MGTVAPRVESLASSGIKCIPKEYVRPQEELKSIGNVFEEEKKEGLQVPTIDLREIDSEDEVVRGKCREKLKKAAEEWGVMHLVNHGIPDELIERVKKAGETFFGLAVEEKEKYANDLESGKIQGYGSKLANNASGQLEWEDYFFHLAFPEDKRDLSFWPKKPADYIEVTSEYAKRLRGLATKMLEALSIGLGLEGGRLEKEVGGMEELLLQLKINYYPICPQPELALGVEAHTDVSSLTFLLHNMVPGLQLFYQGQWFTAKCVPNSILMHIGDTIEILSNGKYKSILHRGLVNKEKVRISWAMFCEPPKEKIILQPLPELVTETEPARFPPRTFAQHIHHKLFRKDQEGLPN

SEQ ID NO: 25092 - DNA, 1065 bp, Glycine max
  CDS (1)..(1065)
atggctatgcatggaacttcttgtttggtgccttctgttctggagctagcaaaacaacccatcatcgaagttccagaacgatatgttcatgccaatcaagatccacatattctttccaacacaatttctttaccacaagttcccatcatagacttgcatcaattgttgtctgaagatccaagtgaactagagaagctggaccatgcgtgcaaagaatggggtttctttcagcttataaaccatggagtggaccctccagtggtggaaaatatgaagataggtgttcaagaattcttcaaccttccaatggaagagaagcagaaattttggcaaacaccagaggatatgcaggggtttggccagttatttgttgtatcagaggaacaaaagctagaatgggcagacatgttctatgctcacacatttccattacattcaaggaatcctcatcttattcctaagattccccaaccattcagagaaaatctagagaactattgcttagagctgagaaaaatgtgcatcacaatcattggccttatgaaaaaagctctcaagatcaaaacaaatgaactctcagagttatttgaagatcctagccaaggaattaggatgaattactaccctccatgtccccaaccagaacgagtcattggaatcaatccgcattctgattcgggtgcccttaccatccttctccaagtcaatgaagtggaagggcttcaaataagaaaagatggaaagtggattcctgttaaaccactctctaatgcttttgtcatcaacgttggagacatgttggagatactgaccaatgggatttaccgaagcattgaacatcggggaatagtcaattcagaaaaagagaggatttccattgccatgtttcaccggcctcaaatgagcagagttataggtccagcaccaagcctcgttactcctgaaagacctgcattgttcaaaaggattggagtagcagattacctcaatggattccttaaacgtgagctaaaaggaaaatcatacatggatgtcattaggatccaaaacgagattggtaaataa

SEQ ID NO: 25093 - protein, 354 aa, Glycine max
MAMHGTSCLVPSVLELAKQPIIEVPERYVHANQDPHILSNTISLPQVPIIDLHQLLSEDPSELEKLDHACKEWGFFQLINHGVDPPVVENMKIGVQEFFNLPMEEKQKFWQTPEDMQGFGQLFVVSEEQKLEWADMFYAHTFPLHSRNPHLIPKIPQPFRENLENYCLELRKMCITIIGLMKKALKIKTNELSELFEDPSQGIRMNYYPPCPQPERVIGINPHSDSGALTILLQVNEVEGLQIRKDGKWIPVKPLSNAFVINVGDMLEILTNGIYRSIEHRGIVNSEKERISIAMFHRPQMSRVIGPAPSLVTPERPALFKRIGVADYLNGFLKRELKGKSYMDVIRIQNEIGK

SEQ ID NO: 25094 - DNA, 1149 bp, Glycine max
  CDS (1)..(1149)
atgagttgccaagcatggcccgaacccatagttcgagtccaatccttagctgaaagtggcctaagttcaatcccttcacgctacattaggcctcactcccaaagaccctccaataccacttcttttccaactcctaaaccttttcaaactgatcatcatcatggtcatgatcagaaaacttccgatcatgaccatgatcatgatcatgttaacattcccgtcattgacctgaaacatgttttctcggaggatccgatcctccgagaacaagtgtttgggcaggtggaccaggcatgtcgggagtgggggttcttccaggtggtgaaccatggtgttagccatgagttgatgaagagttctagggaactgtggcgtgagttcttcaaccagccacttgagatgaaggaagagtatgcaaactcccccaccacttatgagggatatggtagtcgcttgggagtgcagaaaggtgccaccttggattggagtgactacttctttctccattacatgcctccttcacttaggaaccaagctaagtggcctgcatttccagaatccttgaggaaagtgattgctgaatatggtgaaggagtggttaagctaggaggaaggatactcaagatgatgtcaataaaccttggtttgaaagaagatttccttctcaatgcatttgggggagagagtgaggttggtgcatgcctaagggtgaatttctatccaaagtgccctcaacctgacctcacttttggactctcccctcactcagatcctggtggcatgaccattcttctccctgatgattttgtgtctggccttcaagtaagaagaggagatgaatggattacagttaagcctgtcccaaatgccttcatcatcaacattggtgaccaaattcaggtgctgagcaatgcaatatacaagagtgtagaacacagggtgattgtgaactcaaacaaagatcgtgtgtccttggccttgttctacaacccgaggagtgatttactcattcaacctgccaaggagcttgtgacagaggagaagccagccttgtactcaccaatgacctatgatgaatacagactttacattaggctaaatggaccttgtggaaaggcccaagttgaatcattggcctcccaaacatga

SEQ ID NO: 25095 - protein, 382 aa, Glycine max
MSCQAWPEPIVRVQSLAESGLSSIPSRYIRPHSQRPSNTTSFPTPKPFQTDHHHGHDQKTSDHDHDHDHVNIPVIDLKHVFSEDPILREQVFGQVDQACREWGFFQVVNHGVSHELMKSSRELWREFFNQPLEMKEEYANSPTTYEGYGSRLGVQKGATLDWSDYFFLHYMPPSLRNQAKWPAFPESLRKVIAEYGEGVVKLGGRILKMMSINLGLKEDFLLNAFGGESEVGACLRVNFYPKCPQPDLTFGLSPHSDPGGMTILLPDDFVSGLQVRRGDEWITVKPVPNAFIINIGDQIQVLSNAIYKSVEHRVIVNSNKDRVSLALFYNPRSDLLIQPAKELVTEEKPALYSPMTYDEYRLYIRLNGPCGKAQVESLASQT

SEQ ID NO: 25096 - DNA, 1149 bp, Glycine max
  CDS (1)..(1149)
atgagttgccaagcatggcccgaacccatagttcgagtccaatccttagctgaaagtggcctaagttcaatcccttcacgctacattaggcctcactcccaaagaccctccaataccacttcttttccaactcctaaaccttttcaaactgatcatcatcatggtcatgatcagaaaacttccgatcatgaccatgatcatgatcatgttaacattcccgtcattgacctgaaacatgttttctcggaggatccgatcctccgagaacaagtgtttgggcaggtggaccaggcatgtcgggagtgggggttcttccaggtggtgaaccatggtgttagccatgagttgatgaagagttctagggaactgtggcgtgagttcttcaaccagccacttgagatgaaggaagagtatgcaaactcccccaccacttatgagggatatggtagtcgcttgggagtgcagaaaggtgccaccttggattggagtgactacttctttctccattacatgcctccttcacttaggaaccaagctaagtggcctgcatttccagaatccttgaggaaagtgattgctgaatatggtgaaggagtggttaagctaggaggaaggatactcaagatgatgtcaataaaccttggtttgaaagaagatttccttctcaatgcatttgggggagagagtgaggttggtgcatgcctaagggtgaatttctatccaaagtgccctcaacctgacctcactgggggactctcccctcactcagatcctggtggcatgaccattcttctccctgatgattttgtgtctggccttcaagtaagaagaggagatgaatggattacagttaagcctgtcccaaatgccttcatcatcaacattggtgaccaaattcaggtgctgagcaatgcaatatacaagagtgtagaacacagggtgattgtgaactcaaacaaagatcgtgtgtccttggccttgttctacaacccgaggagtgatttactcattcaacctgccaaggagcttgtgacagaggagaagccagccttgtactcaccaatgacctatgatgaatacagactttacattaggccaaacggaccctgtggaaaggcccaagttgaatcattggcctcccaaacatga

SEQ ID NO: 25097 - protein, 382 aa, Glycine max
MSCQAWPEPIVRVQSLAESGLSSIPSRYIRPHSQRPSNTTSFPTPKPFQTDHHHGHDQKTSDHDHDHDHVNIPVIDLKHVFSEDPILREQVFGQVDQACREWGFFQVVNHGVSHELMKSSRELWREFFNQPLEMKEEYANSPTTYEGYGSRLGVQKGATLDWSDYFFLHYMPPSLRNQAKWPAFPESLRKVIAEYGEGVVKLGGRILKMMSINLGLKEDFLLNAFGGESEVGACLRVNFYPKCPQPDLTGGLSPHSDPGGMTILLPDDFVSGLQVRRGDEWITVKPVPNAFIINIGDQIQVLSNAIYKSVEHRVIVNSNKDRVSLALFYNPRSDLLIQPAKELVTEEKPALYSPMTYDEYRLYIRPNGPCGKAQVESLASQT

SEQ ID NO: 25098 - DNA, 1059 bp, Glycine max
  CDS (1)..(1059)
atgggtacggtggctccaagagttgaaagcttggcgagcagcgggataaagtgtatcccgaaggaatacgtgaggcctcaagaagagctcaagagcatagggaacgtgtttgaggaggaaaagaaggaagggctacaggttccgacaattgacttgagagagatagattcggaggacgaggttgttcgagggaaatgtcgtgagaagctgaagaaagcggcggaggagtggggtgtgatgcacttggtgaaccatgggatccccgatgagctgatagagcgggtgaagaaagcaggggaaacgttctttggtctggcggttgaggaaaaggagaagtacgcgaatgatttggagtctggcaagattcaaggctatggaagcaagctggccaacaatgccagtggccaactcgagtgggaagattacttcttccaccttgctttccctgaggacaagcgtgacctctccttctggccaaagaaacccgctgattatattgaggtcacaagcgagtatgcaaagcgactgagggggcttgcgaccaagatattggaggcactctctattggattggggttggaaggatggaggttggagaaggaagttggtgggatggaagagcttctacttcaattgaagatcaactactaccctatttgtccccagccagaacttgctctgggagttgaagcccacactgatgtgagttcactcactttcctccttcacaacatggtgccaggtctgcagctattctacgaaggccaatgggtcacagcaaaatgtgtccccgattccattctcatgcacattggtgacaccattgagatcctgagcaacggcaagtacaagagcattcttcatagggggttggtgaacaaggaaaaggttagaatatcgtgggcagtgttctgtgaaccccccaaggagaagatcatcctgcagccacttcccgagcttgtcactgagacagagccagcacgctttccacctcgcacttttgctcagcatattcaccacaaactattcagaaaggatcaggaaggtctcccaaattga

SEQ ID NO: 25099 - protein, 352 aa, Glycine max
MGTVAPRVESLASSGIKCIPKEYVRPQEELKSIGNVFEEEKKEGLQVPTIDLREIDSEDEVVRGKCREKLKKAAEEWGVMHLVNHGIPDELIERVKKAGETFFGLAVEEKEKYANDLESGKIQGYGSKLANNASGQLEWEDYFFHLAFPEDKRDLSFWPKKPADYIEVTSEYAKRLRGLATKILEALSIGLGLEGWRLEKEVGGMEELLLQLKINYYPICPQPELALGVEAHTDVSSLTFLLHNMVPGLQLFYEGQWVTAKCVPDSILMHIGDTIEILSNGKYKSILHRGLVNKEKVRISWAVFCEPPKEKIILQPLPELVTETEPARFPPRTFAQHIHHKLFRKDQEGLPN

SEQ ID NO: 25100 - DNA, 1104 bp, Helianthus annuus
  CDS (1)..(1104)
atggccctcaatggtacctctacatcaatccaaccggactatgaccggaaagcggagctgagggcgttcgacgaaaccaaaaccggcgtcaaaggactcgttgacgccggaataacagaagtccctagaatattccatctaccttcacccgaaaacctcaactcccaacaacacgagctaactcttccaaccatcgacctccaaggaatcgataacaatccgatacaacgaaaagaggtgatcgagaaagtgaaggatgcattagagagctggggattctttcagttggtgaatcacggaatcccgaacaatatattggaggacatgaaaaaaggagtgatggattttcatgagcaagacactgaggtaaagaagcagtggtacacaagagatacgagtgggaagaccagggtgatctacaacagcaactttgacttgtatgctgcaccggtgactaactggcgagacaccttctactgcaccatggctcctaacccacccgaaccacacgagttgccaccaccatgcagagatattttgttaaagtactcgaaacaagtgatgaaactcggggtttctttattggagctaatggccgaggcgcttgggctcaaccccaatcaccttttggacataggatgtgccgacggacttgctgttcttggacattactatcctacttgcccacaacctgaattaacaataggcacaccaaaccacactgacaacaattttatcacgattcttctacaagatcatatgggaggcctcaaggtcttttaccaaaatcaatggactcatgttcctcctataccaggagctcttgtagtgaatgctggagatcttttgcagttgattacaaacgacaagtttgtgagttcgcaacacaaagtggtggcaaacaaggttgggccaagagtatcagtggcgtcattctttactacgggtcatatccagacttcgaaggtgtatgcaccgatcactgagttgctttcagaagacaatccagccaagtatagaggcataacaataaaagaatacgtagattattatagggcaaagggacttgatggcacttctgcacttttgcatttcaagatctaa

SEQ ID NO: 25101 - protein, 367 aa, Helianthus annuus
MALNGTSTSIQPDYDRKAELRAFDETKTGVKGLVDAGITEVPRIFHLPSPENLNSQQHELTLPTIDLQGIDNNPIQRKEVIEKVKDALESWGFFQLVNHGIPNNILEDMKKGVMDFHEQDTEVKKQWYTRDTSGKTRVIYNSNFDLYAAPVTNWRDTFYCTMAPNPPEPHELPPPCRDILLKYSKQVMKLGVSLLELMAEALGLNPNHLLDIGCADGLAVLGHYYPTCPQPELTIGTPNHTDNNFITILLQDHMGGLKVFYQNQWTHVPPIPGALVVNAGDLLQLITNDKFVSSQHKVVANKVGPRVSVASFFTTGHIQTSKVYAPITELLSEDNPAKYRGITIKEYVDYYRAKGLDGTSALLHFKI

SEQ ID NO: 25102 - DNA, 999 bp, Hordeum vulgare
  CDS (1)..(999)
atggcaattcctgctaatgcagctgccgcctcgttgagcttcccggtgatcaacatggagaatctggagaccgaggagaggggcgcggccatggaggttatccgcgacgcctgcgagaactggggcttcttcgagctgctgaaccatggcatctcgcacgagctgatggacgaggtggaacgggtgagcaaggcgcactacgcggcgtgccaggaggagcagttcaaggagttcgcggcgaggacgctggaggccggcgagcaaggcgccgacgtgaaggacgtggactgggagagcaccttcttcgtccgccacctccccgcctccaacctcgccaacctgcccgacctcgaccaccactacaggcaattgatgaagcagttcgcgtcggagatcgagaagctggcggagaaggtgctggacctgctgtgccagaacctgggcctggagcagggctatctgaagcgggccttcgccgggtccaagggcccgacgttcggcaccaaggtcagtagctacccgccgtgcccgcggccggacctggtggacggcctccgcgcgcacaccgacgccggcggcgtgatcctgctgttccaggacgaccaggtcagcgggctccagctcctcaaggacggggcatgggtggacgtgccgcccatgcgccatgccgtcgtcgtcaacatcggcgaccagctggaggtgatcaccaacgggcggtacaagagcgtcatgcaccgcgtgctcacccgccccgacggcaaccgcatgtccatcgcgtctttctacaaccccggcgcagacgccgtcatcttccccgccccggcgctcgtggccgctgccggcgccgctgagaggaacgagggcgaggagggcaccgccgtgtacccgaggttcgtgttcgaggactacatggacctgtacttgcgccacaagttcgaggccaaggagccacggttcaaggccatgaaggcggacgccgcgcccatcgccaccgcgtga

SEQ ID NO: 25103 - protein, 332 aa, Hordeum vulgare
MAIPANAAAASLSFPVINMENLETEERGAAMEVIRDACENWGFFELLNHGISHELMDEVERVSKAHYAACQEEQFKEFAARTLEAGEQGADVKDVDWESTFFVRHLPASNLANLPDLDHHYRQLMKQFASEIEKLAEKVLDLLCQNLGLEQGYLKRAFAGSKGPTFGTKVSSYPPCPRPDLVDGLRAHTDAGGVILLFQDDQVSGLQLLKDGAWVDVPPMRHAVVVNIGDQLEVITNGRYKSVMHRVLTRPDGNRMSIASFYNPGADAVIFPAPALVAAAGAAERNEGEEGTAVYPRFVFEDYMDLYLRHKFEAKEPRFKAMKADAAPIATA

SEQ ID NO: 25104 - DNA, 1002 bp, Hordeum vulgare
  CDS (1)..(1002)
atggcgaacctcctctcctctgctccgttccgcgcgacgctcccggactgcttcgtcttcccgcccgatcagcgcccgccggcctcctctcaggctgtctccctcccggtcatcgacctctctcgcggccgcgacgaggtccgccgcgccccactcgacgccggcagggagctcgggttcttccaggtggtcaaccacggcgtctccgcggaggcgatacgagacatggaagcggcgtgcgaggagttcttccggctccctgcggaggagaaggcggccttctactcggaggacacgggcaagcccaaccggctcttctccagcaccacgtacgagctcggctgcgagaagtactggcgggactgcctccgcctcgcttgcggctcgcccgtcggcgacaccaagaacaactggcccgacaagccccaaaagctccgcgaggtagtggagaagttcgtggagccgacgagaggcgtggggatggagctgctgcggctgctgtgcgagggcatggggctccgaccagactacttcgaaggggacctcaccggcggcgacgtgatcatcaacgttaaccactacccgccgtgccctgccccgggcctgacgctcggcctgccgccccactgcgaccggaacctcatcactctcctgctccagagcaccgtgcccggcctccaggtctcctacaagggcgactggatcaacgtcgagtccgtgcccaacgccttcgtcgtcaacttccgccacctgctcgagattgcgaccaacgggtttttgaagagcatcgagcaccgggcgatgaccaacgcggcgctggcacgaacctcggtggcgaccttcatcatgccgggcgcggacatccccatcggccccgcggaggagctcgtctgcgagggcaacccgccgcgctaccgcacagtcactttcgacgagttcatgcgcgtgtacaagaccgtcggcgcgcggagggagagcgtggagaaggccttcaagctttag

SEQ ID NO: 25105 - protein, 333 aa, Hordeum vulgare
MANLLSSAPFRATLPDCFVFPPDQRPPASSQAVSLPVIDLSRGRDEVRRAPLDAGRELGFFQVVNHGVSAEAIRDMEAACEEFFRLPAEEKAAFYSEDTGKPNRLFSSTTYELGCEKYWRDCLRLACGSPVGDTKNNWPDKPQKLREVVEKFVEPTRGVGMELLRLLCEGMGLRPDYFEGDLTGGDVIINVNHYPPCPAPGLTLGLPPHCDRNLITLLLQSTVPGLQVSYKGDWINVESVPNAFVVNFRHLLEIATNGFLKSIEHRAMTNAALARTSVATFIMPGADIPIGPAEELVCEGNPPRYRTVTFDEFMRVYKTVGARRESVEKAFKL

SEQ ID NO: 25106 - DNA, 960 bp, Hordeum vulgare
  CDS (1)..(960)
atggcatcgacattgtcattcccgatcatcgacatgggtctgctccgcggggaagagcggccggcggcgatgaaccttctgcaggatgcatgcgagaactggggcttcttccaggttctggaccacggcatctcgacggagctgatggacgaggtggagaagatgaccaaggagcactacaagagggtgcgcgagcagaggttcctcgagttcgcgagcaagacgctggaggacggcggcggcaaggcggcggagaacctggactgggagagcaccttcttcgtgcgccacctcccggagcccaacatcgccgagatacccgacctcgacgacgagtacaggcgggtgatgaagcggttcgcgtcggagctggagacgctggcggagcggctgctggacctgctctgcgagaacctcggcctcgagaaagggtacctcacgcgggcgttccgtggctccaagggcgtccccaccttcggcaccaaggtcagcagctacccgccgtgcccgcgcccggacctcgtcaagggcctccgcgcccacaccgacgccggcggcatcatcctgctcttccaggacgaccgcgtcggcgggctccagctgctcaaggacagcgagtgggtggacgtgccgcccacgcgccactccatcgtcgtcaacctcggcgaccagctggaggtgatcaccaacggcaggtacaagagcgtgctccaccgcgtggtcgcgcagaccgacggcaaccggatgtccatcgcctccttctacaacccggccagcgacgccgtcatcttcccggcgccggcgctggcggaggcggccggcggggcgtaccccaagttcgtgttcgaggactacatgaagctgtacgtgcgccacaagttcgaggacaaggagcccaggttcgaggccttcaagtccgtggagaggcagcagagctccaacctcatcgctaccgcttag

SEQ ID NO: 25107 - protein, 319 aa, Hordeum vulgare
MASTLSFPIIDMGLLRGEERPAAMNLLQDACENWGFFQVLDHGISTELMDEVEKMTKEHYKRVREQRFLEFASKTLEDGGGKAAENLDWESTFFVRHLPEPNIAEIPDLDDEYRRVMKRFASELETLAERLLDLLCENLGLEKGYLTRAFRGSKGVPTFGTKVSSYPPCPRPDLVKGLRAHTDAGGIILLFQDDRVGGLQLLKDSEWVDVPPTRHSIVVNLGDQLEVITNGRYKSVLHRVVAQTDGNRMSIASFYNPASDAVIFPAPALAEAAGGAYPKFVFEDYMKLYVRHKFEDKEPRFEAFKSVERQQSSNLIATA

SEQ ID NO: 25108 - DNA, 978 bp, Hordeum vulgare
  CDS (1)..(978)
atggcaattccagctaatgctgccgccacctcgttgagcttcccggtgatccacatggagaagctggagacagaggagaggggagcggccatggaggtcatccgcgacgcctgcgagaactggggcttcttcgagctgctgaaccatggcatctcgcacgagctgatggacgaggtggagcgggtgagcaaggcgcactacgcggcgtgccgggaggagcagttcaaggagttcgcggcacggacgctggaggccggcgagaagggcgccgacgtgaaggacgtggactgggagagcaccttcttcgtccgccacctccccgcctccaacctcgccgacctgcccaacctcgaccaccactacaggcaagtgatgaaggagttcgcgtccgagatcgagaagcttgcggaaaaggtgctggacctgctgtgcgagaacctcggcctggaggagggctacctgaagcgggccttcaccggctccaatggcccgacgttcggcaccaaggtgagcagctacccgccgtgcccgcgcccggacctggtggagggcctccgcgcccacaccgacgccggcggcatcatcctgctcttccaggacgaccgcgtcggcgggctccagctgctcaaggacggcgagtgggtggacgtgccgcccacgcgccactccatcgtcgtcaacctgggcgaccagctggaggtgatcaccaacggcaggtacaagagcgtgctccaccgcgtggtcgcgcagaccgacggcaaccggatgtccatcgcctccttctacaacccggccagcgacgccgtcatcttcccggcgccggcgctggcggaggcggctggcggggcgtaccccaagttcgtgttcgaggactacatgaagctgtacgtgcgccacaagttcgaggacaaggagcccaggttcgaggccttcaagtccgtggagaggcagagctccaacctcatcgccaccgcctaa

SEQ ID NO: 25109 - protein, 325 aa, Hordeum vulgare
MAIPANAAATSLSFPVIHMEKLETEERGAAMEVIRDACENWGFFELLNHGISHELMDEVERVSKAHYAACREEQFKEFAARTLEAGEKGADVKDVDWESTFFVRHLPASNLADLPNLDHHYRQVMKEFASEIEKLAEKVLDLLCENLGLEEGYLKRAFTGSNGPTFGTKVSSYPPCPRPDLVEGLRAHTDAGGIILLFQDDRVGGLQLLKDGEWVDVPPTRHSIVVNLGDQLEVITNGRYKSVLHRVVAQTDGNRMSIASFYNPASDAVIFPAPALAEAAGGAYPKFVFEDYMKLYVRHKFEDKEPRFEAFKSVERQSSNLIATA

SEQ ID NO: 25110 - DNA, 981 bp, Hordeum vulgare
  CDS (1)..(981)
atggtggttctcgccggcacgcctgccgtcgatcacatcccgctcctcaggtcccccgaccccggggacaacttctccggcatgccggtcgtggacctgtccagacctggcgcgccgcgggccatcgccgacgcgtgcgagcgcttcggcttcttcaagctcgtcaaccacggggtggccctggacgcgatggaccggctcgagtcggaggccgtgaggttcttctcgctgccgcaggccgacaaggaccgctccggcccggcctacccgttcggctacggcagcaagcgcatcgggctcaatggcgacatggggtggctcgagtacctcctcctcgccgtcgactccgcctcgctccccgccgcctccgccgtcccgtcctgcgcgctcttccgggcggcgctgaacgagtacatcgcggcggtgaggaaggtggcggtgcgggtgatggaggcgatggcggaggggctgggcattgcgccggcggacgcgctgagcgcgatggtggcggcggagggcagcgaccaggtgttcagggtgaaccactacccgccgtgccacgcgctgcaggggctcggctgcagcgccaccggcttcggcgagcacaccgacccgcagctcatctccgtgctgcgctccaacggcacgtccggcctgcagatcgcgctccagagcggccactgggtgtccgtgccctccgaccgcgacgccttcttcgtcaacgtcggcgactccttgcaggtgctgaccaacgggaggttcaagagcgtgaagcacagggtggtggccaacagcctaaagtctagggtttccatgatctactttggagggccagcattgacacagaggattgcaccattgccgcagctgctgagagagggagagcagagcctgtacaaggacttcacatggggcgagtacaagaaggctgcctacaactccaggctcggggacaacaggctggctcacttccacaggtag

SEQ ID NO: 25111 - protein, 326 aa, Hordeum vulgare
MVVLAGTPAVDHIPLLRSPDPGDNFSGMPVVDLSRPGAPRAIADACERFGFFKLVNHGVALDAMDRLESEAVRFFSLPQADKDRSGPAYPFGYGSKRIGLNGDMGWLEYLLLAVDSASLPAASAVPSCALFRAALNEYIAAVRKVAVRVMEAMAEGLGIAPADALSAMVAAEGSDQVFRVNHYPPCHALQGLGCSATGFGEHTDPQLISVLRSNGTSGLQIALQSGHWVSVPSDRDAFFVNVGDSLQVLTNGRFKSVKHRVVANSLKSRVSMIYFGGPALTQRIAPLPQLLREGEQSLYKDFTWGEYKKAAYNSRLGDNRLAHFHR

SEQ ID NO: 25112 - DNA, 1023 bp, Hordeum vulgare
  CDS (1)..(1023)
atggcgtaccagcttctgtccaccgtcgcgcaccgcgataccctcccggagggttacacgcggcccgagaacgaccgtccgcagctcgccgatgtggtgacggacaccaacatccccctcatcgacctcgcgtcgctagacaagcacagcatcatcgccgagatcgatcaggcctgccgcacctacggcttcttccagatcgtaaaccatgggatatcagaggagctgctggagaaggtgatggctgtgggtctggagtttttccggctccctccggaagagaaggcgaagctctattctgacgagccatccaaaaagataaggctttctacaagcttcaacgtccgcaaggagacagtgcacaactggcgggactacctacgccttcattgccacccgttggaggagttcgttccagactggccatccaatcctgaaacgttcaaggagatcatcagcacctactgccgcgaagtccggctgcttgggctccgactcctgggcgcgatctccctgggcctgggtctcgacgaggactacatcgagaaagtgctgggcgagcaggagcagcacatggccgtgaactactacccgcggtgccccgagccagacctcacctacggcctccccaagcacacggaccccaacgccctcaccatcctcctcatggacccccacgtctccgggctgcaggtcctcaagggcggcgtccagtggattgccgtcgacccccggcccaacgccctcgtcgtcaacctaggcgaccagttgcaggcgctgagcaacggcgcgtacaagagcgtctggcaccgcgcggtggtcaatgcgtcgcgggagcgcctgtcggtggcatctttcctgtgcccgtgcaacagcgcggtgatcggcccggcggccaagctcgtcgccgacggggacgagcccgtgtaccgcagctacacctacgacgagtactacaagaagttctggagcaggaacctcgaccaggaccactgcctggagctcttcacggatcagaattga

SEQ ID NO: 25113 - protein, 340 aa, Hordeum vulgare
MAYQLLSTVAHRDTLPEGYTRPENDRPQLADVVTDTNIPLIDLASLDKHSIIAEIDQACRTYGFFQIVNHGISEELLEKVMAVGLEFFRLPPEEKAKLYSDEPSKKIRLSTSFNVRKETVHNWRDYLRLHCHPLEEFVPDWPSNPETFKEIISTYCREVRLLGLRLLGAISLGLGLDEDYIEKVLGEQEQHMAVNYYPRCPEPDLTYGLPKHTDPNALTILLMDPHVSGLQVLKGGVQWIAVDPRPNALVVNLGDQLQALSNGAYKSVWHRAVVNASRERLSVASFLCPCNSAVIGPAAKLVADGDEPVYRSYTYDEYYKKFWSRNLDQDHCLELFTDQN

SEQ ID NO: 25114 - DNA, 1062 bp, Brassica napus
  CDS (1)..(1062)
atggttgcaagctggcctgagcccattgtttcagttcaagccttgtcccaagccggcatatccaccgtcccaaaccgctatgtgaaacccacgcatcagagaccggtctacaagtccgatcaatccggtcttgacatggaaatccccgtgctagacatgagagacatgtggaggaacccggaggggctgaggcgagtgaggaatgcgtgtgaggagtggggtttcttccaagtggtgaaccatggtgtagaccatgcgctgatggagagtgtgaggggagcgtggcgagagttctttgatttacccgtagaggtgaaacgaaagtacgcaaactcaccagacacatatgaaggctatggaagcagggttggggttgtgaaagatgctaagttagattggagtgattatttctttctcaattacttgccttcttccattagaaacccttccaagtggccatctcagcctcctaagataagagaattgatcgaagagtacggagaagaagtgagaaaactgtgtgagaggctagtggagacattgtcagagagtttaggtttagaaccaaaccatctcatgaaggcctttggaggagaagacaaagttggagctaatctgagagcaaacttttacccaaaatgccctcagccacacctaactttaggtctctcttctcattctgacccgggtggcatcaccattgtcctccccgacgaggaggtcgctggcctccaggtccgtcgtggtgactgctgggtcaccattaaatccgtgcccaatgctttgatcgttaacattggagatcaagttcagatacttagcaacggaatttacaaaagcgtggagcatcaggtggtcgttaattccggtatggatcgagtctccttggcactcttctacaacccgagaagtgatatcccgatcggaccggttaaagcactattaaccaaagaccgacctgctctttataaaccgatcaggttcgacgagtgccgccttctgattcgacaaaagggtcctagtgggaaaaaccaagttgattcactgttggcaagcacatga

SEQ ID NO: 25115 - protein, 353 aa, Brassica napus
MVASWPEPIVSVQALSQAGISTVPNRYVKPTHQRPVYKSDQSGLDMEIPVLDMRDMWRNPEGLRRVRNACEEWGFFQVVNHGVDHALMESVRGAWREFFDLPVEVKRKYANSPDTYEGYGSRVGVVKDAKLDWSDYFFLNYLPSSIRNPSKWPSQPPKIRELIEEYGEEVRKLCERLVETLSESLGLEPNHLMKAFGGEDKVGANLRANFYPKCPQPHLTLGLSSHSDPGGITIVLPDEEVAGLQVRRGDCWVTIKSVPNALIVNIGDQVQILSNGIYKSVEHQVVVNSGMDRVSLALFYNPRSDIPIGPVKALLTKDRPALYKPIRFDECRLLIRQKGPSGKNQVDSLLAST

SEQ ID NO: 25116 - DNA, 1038 bp, Zea mays
  CDS (1)..(1038)
atggaaaccgccgagccggcgcgcgtccaagccctcgctgaggccggcgtgttccgcctcccggcgcagtacatccagccgcctgagcacagaccgaccccctcgccttctcctattgccgcggcgctctccgtgccggtcgtcgacctctcaacctccaccgccgacgacgccgtccgcgccgcgtgcgcggactggggcgcctttcacgtggtcggccacggcgtgccgggggagctcctcgacgcggtgcgcgcggcagggctcgcgttcttccgcgcgcccatggaggacaagctccggttcgcctgcgacccggccaggggcgccgcctcggaagggtacggcagccgcatgctcgccaacgacgactccgtgctcgactggcgcgactactttgaccaccacacgctcccggagtcccgctgtgatcccgcccgctggcccgacttcgtccccggttacagagatactattgcaaaatacagccacagcatgaaggatcttgctcaaaaattgttgtgcatcatctcagaaaatctgagcctgccaccatcttatatacaagaggcggttggagaagttttccagaacattactattagctactattctccgtgtccacaacctgatcttgctcttggattacaatctcattctgatatgggcgcaataacacttctgatacaagatgatgttggtgggcttgaagtattaaaggatggaatgtggatacctgtgcctgctttgcgtgatggcatccttgtgattctcgctgatcagacagagatcatcaccaatggaagatacaagagttcagttcatcgagctgttgtcaatgctgagcatgcccgcttatcagtagcaacattttatgatccatcaaaatcaaggaaaatatgcactgccccgcagcttgtgagtgagaatgaaccacaaaagtatcgggatgtaatttatggtgactatgtctcatcttggtatagcaaaggtccagagggcaagcgaaacatcgacgccctcctgattcagcactag

SEQ ID NO: 25117 - protein, 345 aa, Zea mays
METAEPARVQALAEAGVFRLPAQYIQPPEHRPTPSPSPIAAALSVPVVDLSTSTADDAVRAACADWGAFHVVGHGVPGELLDAVRAAGLAFFRAPMEDKLRFACDPARGAASEGYGSRMLANDDSVLDWRDYFDHHTLPESRCDPARWPDFVPGYRDTIAKYSHSMKDLAQKLLCIISENLSLPPSYIQEAVGEVFQNITISYYSPCPQPDLALGLQSHSDMGAITLLIQDDVGGLEVLKDGMWIPVPALRDGILVILADQTEIITNGRYKSSVHRAVVNAEHARLSVATFYDPSKSRKICTAPQLVSENEPQKYRDVIYGDYVSSWYSKGPEGKRNIDALLIQH

SEQ ID NO: 25118 - DNA, 1071 bp, Zea mays
  CDS (1)..(1071)
atggagatgacggggtctctccctgtgcccagcgtgcaggccatggtggccgctggtcgtcatgcaccagtgccaccaaggtatctccgtccagatctggccgcggatgtcgtcgttgccgacgacgcgacgaccatccccatcatcgacttccagcgactgctgctggtcgacccagaggaatctgcgcgcctccatgcggcctgccaggactggggcttcttccagctgataaaccacggtgttccggacgatgtgatggaggcgatgaaggccagcacccagtcattcttcgcgcttcctgcggaggccaagcagcagtaccgtcagcaggcaggacagctggaggggtacggccagctgttcgtcgtctccgaggaccagaagctggactgggccgacgtcctctacctcaacacgcagccgcccgagcaccggaacctcagcttctggcctgctggtgagagcttcaggcagacgctggacacctactccgccgccgtcaagcacgtcgccgaccgcctgctgggagccatgtacatgaacctgggcctcctgagcagcatggacatggacccggagcggggtgccgggatacagtcggtgaggatgaactactaccctccctgcgctgaagcggcggacaaggtcctgggcttctctccgcactccgactcggaccttctcaccctcgtcctccaggtcaaccagctccagggcctgcagatcaagaggccgcccgacggcggcggtgcctgggcctggcttcccgtcacgccgctgcagggcgccttcgtcgtcaacgtcggggacgtcctcgagatcttcaccaacgggaggtacaggagcgtcgagcaccgggctctagtcaacgcccacacggagcgcttgtccatcgcggcgttccactctcccagcatccatgccaccatagggccgctgccggagctcctcggggaccaggaggtgcccaagtataagacgctggaccaccaaagcttcattacgctcttcttctccgccaagctccagggcaagagcttcttggaacggatgaagaagctttcgtag

SEQ ID NO: 25119 - protein, 356 aa, Zea mays
MEMTGSLPVPSVQAMVAAGRHAPVPPRYLRPDLAADVVVADDATTIPIIDFQRLLLVDPEESARLHAACQDWGFFQLINHGVPDDVMEAMKASTQSFFALPAEAKQQYRQQAGQLEGYGQLFVVSEDQKLDWADVLYLNTQPPEHRNLSFWPAGESFRQTLDTYSAAVKHVADRLLGAMYMNLGLLSSMDMDPERGAGIQSVRMNYYPPCAEAADKVLGFSPHSDSDLLTLVLQVNQLQGLQIKRPPDGGGAWAWLPVTPLQGAFVVNVGDVLEIFTNGRYRSVEHRALVNAHTERLSIAAFHSPSIHATIGPLPELLGDQEVPKYKTLDHQSFITLFFSAKLQGKSFLERMKKLS

SEQ ID NO: 25120 - DNA, 1035 bp, Triticum aestivum
  CDS (1)..(1035)
atggtgcaagacctggcgtcgaccggtgtcgaggagccgccgagccggtacttagtgcacgagcaagaccgtcacggtgacctgctggccgccggcgaaatgccggagcccatccctctcattgaccttagccggctcatggacgccgatgaggccgacaagctccgggctgctctacagacatggggcttcttcctggccaccaatcatgggatcgaggattctctcatggatgcaatgatgagcgcgtcaagggagttcttccgtcaaccgtccgaagagaagcagaaatgcagcaacctggtggacggcaacggcaagcactaccaggtggaagggtatggcagtgacaaagtggtttctgaggatcatggcctgaactggaacgaccggttgcatctgagagtggagccagaagatgagaggaatttcgctaagtggcccagtcaaccggaatctttcagggatgtgctacatgagtacgcatcaaaaaccaagaaactaagagaccttgtcttgcgatcaatagccaagctcctggacattgatgaggattacttcgttaaccagatatcaaacaaggcctccgggtttgctagattgtactactaccctccatgtccgagacctgacctagttttgggcctcaggcctcactctgatggaaatctccttactatcctttttgtcgacgacgatgttggtggcttacaagttcagagagatgggaaatggtacaatgttccagccaagcctcacacactggtgatcaacttgggagactgcctggagataatgaataacggaatctttaggagcccggttcacagagtggtgacaaacaccgagaaggagaggctttcgctggccatgttctatgccgtggatgaagaaacagtgctggagccagcgcccggtttgctggatgacaagcgaccaccaagatataggaaaatgctgaccaaggatttcgtggctgggctctttgaacatttccgtcaagggaagagattcatcgacaccctgaagatataa

SEQ ID NO: 25121 - protein, 344 aa, Triticum aestivum
MVQDLASTGVEEPPSRYLVHEQDRHGDLLAAGEMPEPIPLIDLSRLMDADEADKLRAALQTWGFFLATNHGIEDSLMDAMMSASREFFRQPSEEKQKCSNLVDGNGKHYQVEGYGSDKVVSEDHGLNWNDRLHLRVEPEDERNFAKWPSQPESFRDVLHEYASKTKKLRDLVLRSIAKLLDIDEDYFVNQISNKASGFARLYYYPPCPRPDLVLGLRPHSDGNLLTILFVDDDVGGLQVQRDGKWYNVPAKPHTLVINLGDCLEIMNNGIFRSPVHRVVTNTEKERLSLAMFYAVDEETVLEPAPGLLDDKRPPRYRKMLTKDFVAGLFEHFRQGKRFIDTLKI

SEQ ID NO: 25122 - DNA, 1023 bp, Triticum aestivum
  CDS (1)..(1023)
atggcgaaccagcttctgtccaccgtcgcgcaccgcgataccctcccggagggttacacgcggcccgagaacgaccggccgcagctcgccgatgttgtgactgacagcaacatccccctcatcgacctcgcctcgccggacaagcatcgcgtcatcgctgagatcgaccaggcttgccgcacctacggcttcttccagatcataaaccatgggatatcagaggagctgctggagaaggtgatggctgtggggcttgagtttttccggctcccgccggaagagaaggccaagctctattctgatgagccatccaaaaagataaggctttctacaagcttcaacgtccgcaaggagacagtgcacaactggcgggactatctgcgccttcattgccacccgttggaggagttcgtgcccgactggccatccaatcctgaaacgttcaaggagatcatcagcacctactgccgcgaagtccggctgctcggcctccgactcctgggcgcgatctccctgggcctgggcctcgaggaggactacatcgagaatgtgctgggcgagcaggagcagcacatggccgtcaactactacccgcggtgccccgagccggacctcacctacggcctgcccaagcacacggaccccaacgccctcaccattctcctcatggacccccacgtctccggcctgcaggtcctcaaggacggcgcccagtggatcgccgtcgacccccggcccaacgccctcgtcgtcaacctaggcgaccagttacaggcagtgagcaacggcgcgtacaagagcgtctggcaccgcgcggtggtcaatgcggcgcgggagcgcctgtcggtggcatctttcctgtgcccgtgcaacagcgcggtgatcggcccggcggacaagctcgtcggcgacggggacgagcccgtgtaccgcagctacacctacgacgagtactacaagaagttctggagcaggaacctggaccaggaccactgcctggagctcttcacgggtcagaagtga

SEQ ID NO: 25123 - protein, 340 aa, Triticum aestivum
MANQLLSTVAHRDTLPEGYTRPENDRPQLADVVTDSNIPLIDLASPDKHRVIAEIDQACRTYGFFQIINHGISEELLEKVMAVGLEFFRLPPEEKAKLYSDEPSKKIRLSTSFNVRKETVHNWRDYLRLHCHPLEEFVPDWPSNPETFKEIISTYCREVRLLGLRLLGAISLGLGLEEDYIENVLGEQEQHMAVNYYPRCPEPDLTYGLPKHTDPNALTILLMDPHVSGLQVLKDGAQWIAVDPRPNALVVNLGDQLQAVSNGAYKSVWHRAVVNAARERLSVASFLCPCNSAVIGPADKLVGDGDEPVYRSYTYDEYYKKFWSRNLDQDHCLELFTGQK

SEQ ID NO: 25124 - DNA, 960 bp, Triticum aestivum
  CDS (1)..(960)
atggcgccggcttcgtcgttcccgatcatcgacatggggctgctggccggggaggagcgacccgcggccatggacctgctgcatgacgcatgcgagaactggggattcttccaggtcctggaccacggcatctcgacggagctgatggacgaggtggagaagatgaccaaggggcactacaagagggtgcgcgagcagaggttcctcgagttcgcgagcaagacgctgcaggacggcggcagggcggcggagaacctggactgggagagcaccttcttcgtgcgccacctcccggagcccaacatcgccgagatacctgacctcgacgacgactaccggcgggtgatgaagcagttcgcgtcggagctggagaggctggcggagcggctgctggacctgctctgcgagaacctcggcctcgataaagggtacctcacgcgcgcgttccggggctccaagggcgcccccaccttcggcaccaaggtcagcagctacccgccgtgcccgcgcccggacctcgtcaagggcctccgcgcccacaccgacgccggcggcatcatcctgctcttccaggacgaccgcgtcggcgggctccagctgctcagggacggcgagtgggtggacgtgccgcccacgcgccactccatcgtcgtcaacctgggcgaccagctggaggtgatcaccaacggcaggtacaagagcgtgctccaccgcgtggtcgcgcagaccgacggcaaccgtatgtccatcgcatccttctacaacccggccagcgacgcggtcatcttcccggcgccggcgctggtggaggcggaggcggccggcggggcgtaccccaggttcgtgttcgaggactacatgaagctgtacgtgcgccacaagttcgaggacaaggagcccaggttcgaggccttcaagtccatggagcccaccagctccaatctcatcgctactgcatag

SEQ ID NO: 25125 - protein, 319 aa, Triticum aestivum
MAPASSFPIIDMGLLAGEERPAAMDLLHDACENWGFFQVLDHGISTELMDEVEKMTKGHYKRVREQRFLEFASKTLQDGGRAAENLDWESTFFVRHLPEPNIAEIPDLDDDYRRVMKQFASELERLAERLLDLLCENLGLDKGYLTRAFRGSKGAPTFGTKVSSYPPCPRPDLVKGLRAHTDAGGIILLFQDDRVGGLQLLRDGEWVDVPPTRHSIVVNLGDQLEVITNGRYKSVLHRVVAQTDGNRMSIASFYNPASDAVIFPAPALVEAEAAGGAYPRFVFEDYMKLYVRHKFEDKEPRFEAFKSMEPTSSNLIATA

SEQ ID NO: 25126 - DNA, 1053 bp, Triticum aestivum
  CDS (1)..(1053)
atggcctccgaccgcctcgccgccctcaaggccttcgacgagaccaaggccggcgtgaagggcctcgtggacgccggcgtcaaggccgtcccggacatcttccgccaccctcccgacccgctctccccgtgcaccaaggtcgccgccatcccggtcgtcgacctctcgggtccccgctcggaggtggtcgccgcggtgagggaggcggcgcggacggcgggcttcttccagctggtgaaccacggcgtgccggaggcggccatgtcggggatgctggcggcggtgcggcggttcaacgaggagcccgcggaggccaaggcgccctactacacgcgggacgccgcgcggcgcgtgcgctacaactgcaacgccgacctcttccggaccctggtgggcaagtggcgcgacaccatctacatggacgacgtggaccggctggcggcgggcgaggaggaggaggtcctcccgccggcgtgcaggggcgtcgcgcccaagtacacggcgcagatacggatgctggggcgcgcgctcttcgagctgctgtcggaggccctgggcgtgcggcgcgggtacctggaggaggaggccggctgcctggagacgctcagcgtcgccggccactactacccggcgtgcccggagccgcacctgacgctgggcgccgtcaggcacaacgaccccggcttcctcaccgtgctgctccaggacggggtcggcggcctccaggtgctcacggacgtcgaggacggcgaagggaacgtgtccgccgcgtgggccgacgtgccggcggtgccgggggcgctggtggtgaacgtcggcgacttcctgcagctggtgtccaacgacaggttcaggagcgtcgcgcaccgcgtggtggccaacagcgtggggccccggatgtcggtggcgtgcttcttcagggccaagggagcgaccgtgtgcgccccggtggtcatggacgggggtggcccgccgcgctaccggaccgtcacggcggaggagctgctccgctcgtccgggaagcagaacgggctccgcgacgtgaggctctag

SEQ ID NO: 25127 - protein, 350 aa, Triticum aestivum
MASDRLAALKAFDETKAGVKGLVDAGVKAVPDIFRHPPDPLSPCTKVAAIPVVDLSGPRSEVVAAVREAARTAGFFQLVNHGVPEAAMSGMLAAVRRFNEEPAEAKAPYYTRDAARRVRYNCNADLFRTLVGKWRDTIYMDDVDRLAAGEEEEVLPPACRGVAPKYTAQIRMLGRALFELLSEALGVRRGYLEEEAGCLETLSVAGHYYPACPEPHLTLGAVRHNDPGFLTVLLQDGVGGLQVLTDVEDGEGNVSAAWADVPAVPGALVVNVGDFLQLVSNDRFRSVAHRVVANSVGPRMSVACFFRAKGATVCAPVVMDGGGPPRYRTVTAEELLRSSGKQNGLRDVRL

SEQ ID NO: 25128 - DNA, 1071 bp, Triticum aestivum
  CDS (1)..(1071)
atggctgcgtccgacgagtcgccgatggtgcggccgacggtgcaggagctgacggcggccggcgtcgaggagccgccgcggcagtacgtgttgccggagcaagaccgtcacggcgacctgctggcagccgacgagtttccggagcccacccccctcatcgatcttagccggctcacggacgccgacgaggccgagaggctccgggcggctctgcagacctggggcttcttcctggccaccaaccatgggatcgaggactctctcatggacgccatgatgagcgtgtcgagggagttcttccggcagccggcagaggagaagcagaaatgcagcaacctggtggacggcaacggcaaggactaccaggtggaagggtatggcagtgacaaggtggtgtccgaggatcaggtcctcaactggagcgaccggttgcatctgagagtggagccggaagatgagaggaatttcgccaagtggcccagtcacccggaatctttcagggatgtgctacaagagtacgcatcaagaaccaagaaaataagagacctcgtcttgcgatcgatagccaagctcctggagattgacgaggactacttcgtcaaccagatatcaaacaaggcccccgggtttgctagattcaactactaccctccatgtccgaggcctgacctagttttgggcctcagggctcactccgacggtggtctccttaccatccttttcaacgatgacaccgtcggtggcttgcaagttcagagagatgggagatggtacaatgttccagcaaagcctcacacattgctgattaacctagcagactgcctagaaataatgaacaatggaatctttacgagcccggttcacagagtggtgacgaacgtcgagaaggataggctttccttggctgtgttttacgccgtggatgcagaaacgatgttggagccagcgcccggtttgctggatgacaagcgaccgccaagatataagaaaatggtggccaaggattttgtggctgggctctttgaacatttccgtcaagggaagagattcattgacaccctgaaaatatag

SEQ ID NO: 25129 - protein, 356 aa, Triticum aestivum
MAASDESPMVRPTVQELTAAGVEEPPRQYVLPEQDRHGDLLAADEFPEPTPLIDLSRLTDADEAERLRAALQTWGFFLATNHGIEDSLMDAMMSVSREFFRQPAEEKQKCSNLVDGNGKDYQVEGYGSDKVVSEDQVLNWSDRLHLRVEPEDERNFAKWPSHPESFRDVLQEYASRTKKIRDLVLRSIAKLLEIDEDYFVNQISNKAPGFARFNYYPPCPRPDLVLGLRAHSDGGLLTILFNDDTVGGLQVQRDGRWYNVPAKPHTLLINLADCLEIMNNGIFTSPVHRVVTNVEKDRLSLAVFYAVDAETMLEPAPGLLDDKRPPRYKKMVAKDFVAGLFEHFRQGKRFIDTLKI

SEQ ID NO: 25130 - DNA, 1068 bp, Triticum aestivum
  CDS (1)..(1068)
atggctgatgcagaaccatggaagacagtcaagatacccccgatcgtgcaggagctggcgaccggcatgcaggagccaccgagccggtatgtgatcgctgagcacaaccgccccaccgcggctggttctgagatgcccgatcccatacccatcatcgatctcagccgactgtctgacaactgtgctgatgaggttgccaagctgcggtccgccttggagaactggggcctgttcctggctgttgggcatggaatggagccaagttttcttggtgaggtgatgggagtggctagggattttttcaagctcccactggaagagaagcagaagtactcgaacctggtgaacggcaatgaagtcaggatcgagggttacgggaacgacatggtcgtatctgagaagcagatcctggactggtgtgaccgtctctacatcatagtggaacctgagaatcgaagaatctacagcttgtggccaacacagcctccatccttcagagatattctgagtgagtacacggtcaggtgccgtaagatcgccaaccttttcctccagaacctggccaagctactagatttacacgaggactacttcgtcaacatgttcgacgagaatgccttgacatacgccaggttaaactactaccctaactgtccgaagccggaccacgtcttcggcatgaagccccacaccgatgcctcggtgatcacaatcgtcttcatcgatgataatgtcagcgggctccagcttcagaaagatggcgtctggtacaacgtacccattgttccgaatacattactcgtgaacgtgggagatgtaatggagataatgagcaatggattcttcaagagcccgattcacagggttgtgaccaatgcagagaaagagaggctatctttggtgatgttctacacgatgaacccggagaaggagattgagccactgtcagagctggtggatgagaaaagaccgaggcggtacaggaagacaacgactaatgactacatagcacaactcttcgaaacttttgctagggggacactagctatcgacacggtgaagatctga

SEQ ID NO: 25131 - protein, 355 aa, Triticum aestivum
MADAEPWKTVKIPPIVQELATGMQEPPSRYVIAEHNRPTAAGSEMPDPIPIIDLSRLSDNCADEVAKLRSALENWGLFLAVGHGMEPSFLGEVMGVARDFFKLPLEEKQKYSNLVNGNEVRIEGYGNDMVVSEKQILDWCDRLYIIVEPENRRIYSLWPTQPPSFRDILSEYTVRCRKIANLFLQNLAKLLDLHEDYFVNMFDENALTYARLNYYPNCPKPDHVFGMKPHTDASVITIVFIDDNVSGLQLQKDGVWYNVPIVPNTLLVNVGDVMEIMSNGFFKSPIHRVVTNAEKERLSLVMFYTMNPEKEIEPLSELVDEKRPRRYRKTTTNDYIAQLFETFARGTLAIDTVKI

SEQ ID NO: 25132 - DNA, 1062 bp, Triticum aestivum
  CDS (1)..(1062)
atggctgcgtcgccgatggtgcggccgacggtgcaggagctggcggcggccggcgccgaggagccgccgcggcagtacgtgctgccggagcaagaccgtcacggcgacctgctggccgccgacgagtttccggagcccatccccctcgtcgaccttagccggctcacggacgccgacgaggccgagaggctccgggcggctctgcagacctggggcttcttcctggccaccaaccatgggatcgaggactctctcatggacgccatgacgagcgtgtcgagggagttcttccggcagccggcggaggagaggcagaaatgcagcaacctggtggacggcaacggcaaggactaccaggtggaagggtatggcagtgacaaggtggtgtccgacgatcaggtcctcaactggagcgaccggttgcatctgagagtggagccggaggatgagaggaatttcgccaagtggcccagtcaccccgaatctttcagggatgtgctacaagagtacgcatcaagaaccaagaaaataagagacctcgtcttgcgatcgatagccgagctcctggagattgacgaggactacttcgtcaaccagatatcaaacaaggcttccgggtttgctagattcaactactaccctccatgcccaaggcctgacctagttttgggcctcaggcctcactccgacggtggtctccttaccatccttttcaacgatgacaacgtcggtggcttgcaaattcaaagagatgggagatggtacaatgttccgaccaagcctcacacattgttgattaacctagcagactgcctagaaataatgaacaatggaatctttaggagcccatttcatagagtggtgacgaacgtcgagaaggataggctttccctggctgtgttttacgccgtggatgcggaaacgatgttggagccagcgcccggtttgctggatgacaagcgaccatcaaggtataggaaaatgttggccaaggatttcgtggctgggctctttgaacatttccgtcaagggaagagattcatcgacaccctgaaaatatag

SEQ ID NO: 25133 - protein, 353 aa, Triticum aestivum
MAASPMVRPTVQELAAAGAEEPPRQYVLPEQDRHGDLLAADEFPEPIPLVDLSRLTDADEAERLRAALQTWGFFLATNHGIEDSLMDAMTSVSREFFRQPAEERQKCSNLVDGNGKDYQVEGYGSDKVVSDDQVLNWSDRLHLRVEPEDERNFAKWPSHPESFRDVLQEYASRTKKIRDLVLRSIAELLEIDEDYFVNQISNKASGFARFNYYPPCPRPDLVLGLRPHSDGGLLTILFNDDNVGGLQIQRDGRWYNVPTKPHTLLINLADCLEIMNNGIFRSPFHRVVTNVEKDRLSLAVFYAVDAETMLEPAPGLLDDKRPSRYRKMLAKDFVAGLFEHFRQGKRFIDTLKI

SEQ ID NO: 25134 - DNA, 1050 bp, Triticum aestivum
  CDS (1)..(1050)
atgggatctctccccgtcccgagtgtgcaggccttggtggcggccaccggcggagacgatgtgccgccgaggtatctccggccagatgcggcagaggaagcggtcaccggtgacggcgacggcgaggctcagatccccatcatcgaccaccgaaggctgctgctggagctggaccatggcggcgaggagtctgcacgcctccacagagcctgccaggactggggcttcttccagttagttaaccacagtgtcccagacgatgtggtggagagcatgaaggccaacatccagcaattcttccagctacccgcagagacgaagaagcgattcgctcaggagcgagggcagctagaaggctacggtcaactattcgtcgtctccgaggatcagaagctcgactgggctgacatgctcttcctctacgcacagccacctgagaggaggaagaccaagttctggcctgaccagcctgctaccttcagatcgacgctggatagatattctggtgcgctgaaggatgtatcagactcccttttggctacgatggcgaagaacttgggactgaaacgagaaacgatcgctgacaaatgcatccgtggaatgcagtctttcagaatgaactactaccccccatgcgcccaagcagagaaagtcgttggcttgtccccgcactctgatgctaatctcctaacccttgtcctccaagtgaaccatgtccagggcctgcagatcaagaggaacggcagctggctccctgtcaagcctgtcccgggcgctttcatcgtcaacatcggagatatgtttgaggtcttcacgaacgggaggtacaggagcatcgagcaccgggcagtcgtcgaccccaaggaagagcggctgtcggtcgcggcgttccacttcccagacatggacgccatgataggtcctctgaaggagctgaccgcacatgaagacgatgcctacaagacgttggacctcgagagcttcatgaagatcttcttcgcgacgaagctcgaggggaagagcttcttagaccggatgaagctaaactag

SEQ ID NO: 25135 - protein, 349 aa, Triticum aestivum
MGSLPVPSVQALVAATGGDDVPPRYLRPDAAEEAVTGDGDGEAQIPIIDHRRLLLELDHGGEESARLHRACQDWGFFQLVNHSVPDDVVESMKANIQQFFQLPAETKKRFAQERGQLEGYGQLFVVSEDQKLDWADMLFLYAQPPERRKTKFWPDQPATFRSTLDRYSGALKDVSDSLLATMAKNLGLKRETIADKCIRGMQSFRMNYYPPCAQAEKVVGLSPHSDANLLTLVLQVNHVQGLQIKRNGSWLPVKPVPGAFIVNIGDMFEVFTNGRYRSIEHRAVVDPKEERLSVAAFHFPDMDAMIGPLKELTAHEDDAYKTLDLESFMKIFFATKLEGKSFLDRMKLN

SEQ ID NO: 25136 - DNA, 981 bp, Triticum aestivum
  CDS (1)..(981)
atggtggttctcgccagcacgcccgccgtcgatcacatcccgctcctcaggtcgcccgaccccggggactacttctccggcatgccggtggtcgacctctccagccctggcgcgccgcgggccatcgccgacgcgtgcgagcgcttcgggttcttcaagctcgtcaaccacggggtgcccgcggacacgatggacaggctcgagtcggaggccgtcaggttcttctcgctgccgcaagccgacaaggaccgctccggcccggcctacccgttcggctacggcagcaagcgcatcgggctcaatggcgacatgggctggctcgagtacctcctcctcgccgtcgactccgcgtcgctctccggcgcctgcaccgtcccgtcctgcgcgctcttccgggcggcgctgaacgagtacatcgcggcggtgcggaaggtggcggtgcgggtgatggaggcgatggcggaggggctgggcattgcgcccgtggacgcgctgagcggcatggtgacggcggagggcagcgaccaggtgttccgggtgaaccactacccgccgtgccacgcgctgcaggggctgggctgcagcgccaccggcttcggcgagcacacggacccgcagctcatctccgtgctgcgctccaacggcacgtccggcctgcagatcgcgctccagaacgggcagtgggtgtccgtgccctcggaccgcgacgccttcttcgtcaacgtcggcgactcgttgcaggtgctgaccaacgggaggttcaagagcgtgaagcacagggtggtggccaacagcctaaagtctagggtttccatgatctactttggagggccagcgatgacacagaggattgcaccattgccgcagctgctgggcgcgggagagcagagcctgtacaaggacttcacatggggcgagtacaagaaggctgcctacaactcgaggctcggggacaacaggctggctcagttccacaggtag

SEQ ID NO: 25137 - protein, 326 aa, Triticum aestivum
MVVLASTPAVDHIPLLRSPDPGDYFSGMPVVDLSSPGAPRAIADACERFGFFKLVNHGVPADTMDRLESEAVRFFSLPQADKDRSGPAYPFGYGSKRIGLNGDMGWLEYLLLAVDSASLSGACTVPSCALFRAALNEYIAAVRKVAVRVMEAMAEGLGIAPVDALSGMVTAEGSDQVFRVNHYPPCHALQGLGCSATGFGEHTDPQLISVLRSNGTSGLQIALQNGQWVSVPSDRDAFFVNVGDSLQVLTNGRFKSVKHRVVANSLKSRVSMIYFGGPAMTQRIAPLPQLLGAGEQSLYKDFTWGEYKKAAYNSRLGDNRLAQFHR

SEQ ID NO: 25138 - DNA, 1113 bp, Triticum aestivum
  CDS (1)..(1113)
atggcttctgcggccgtctgctcccctaagcagcagcagcggcaggaggaggaggaggatggtggggttgttaagatcgggcgggttgacgacgtgcaggagctgcagagggcgtgcgtggacgacgtgccggagcggtacgtccgggacggggacgaccggccgggcggcgccaacgtgtgcgcgcacgcggagatccccgtgatcgacgccggcgagctccggcgcggcggcggcgatggggacgagctggagaagctcaggcgagcctgcgaggagtggggcttcttccaggttgtgaaccatggcatcgacggcgagctgctggacgagatggagaggttgtcgagggagttcttcatgctgccgctggaggagaaggagcggtaccccatggcgccgggcggcatccagggctacggccacgccttcgtcttctccgaggaccagaagctcgactggtgcaacatgctggcgctcggcgtgtccccggcgttcatccggcagcccaagctctggccgaccacgccggccgccttcaccgacaccctcgagaggtactccgccgaggtcagggcgctctgccatcgtctcctggagcacatcgccgagacgctgggcctggcgcccggcacgttcgcgggcatgttcggcgacgcggtgcaggcggtgcggatgaacttctacccgccgtgcccgcggccggacctggtgctggggctgagcgcgcactccgacgggagcgcggtcaccgtgctccagcaggacgccggccgcgcggggctgcaggtgctccgggacggcgcctgggtgcccgtccaccccgtcccgcacgccctcgtcgtcaacctcggcgactcgctcgaggtgctcaccaacggcaggtacaagagcgtggagcaccgggcggtgaccaacggcgagcaggaccgcctgtccatcgtgacgttctacgcgccagcctacgacgtcgagctcggcccactgccggagctagtcgccgacggggagccctgccggtaccggaggttcaagcacggcgagtacagccggcactacgtcaccagcaagctcgagggcaagaagacgctggacttcgccaagatcaactag

SEQ ID NO: 25139 - protein, 370 aa, Triticum aestivum
MASAAVCSPKQQQRQEEEEDGGVVKIGRVDDVQELQRACVDDVPERYVRDGDDRPGGANVCAHAEIPVIDAGELRRGGGDGDELEKLRRACEEWGFFQVVNHGIDGELLDEMERLSREFFMLPLEEKERYPMAPGGIQGYGHAFVFSEDQKLDWCNMLALGVSPAFIRQPKLWPTTPAAFTDTLERYSAEVRALCHRLLEHIAETLGLAPGTFAGMFGDAVQAVRMNFYPPCPRPDLVLGLSAHSDGSAVTVLQQDAGRAGLQVLRDGAWVPVHPVPHALVVNLGDSLEVLTNGRYKSVEHRAVTNGEQDRLSIVTFYAPAYDVELGPLPELVADGEPCRYRRFKHGEYSRHYVTSKLEGKKTLDFAKIN

SEQ ID NO: 25140 - DNA, 972 bp, Zea mays
  CDS (1)..(972)
atggcagccacggtgtccttcccggtggtgaacatggagaagctggagaccgaggagagggacacggccatggcggtcatccgcgacgcctgcgagaactggggcttcttcgagctgctgaaccatggcatctcgcacgagctgatggacgaggtggagcggctgaccaaggcgcactacgccaccttccgggaggccaagttccaggagttcgcggcgcggacgctggccgcggccggcgacgagggcgccgacgtcagcgacgtggactgggagagcaccttcttcgtccgccacctcccggcctccaacctcgccgacctccccgacgtcgacgaccactaccggcaagtgatgaagcagttcgcatcggaggtgcagaagctgtcggagaaggtgctggacctgctgtgcgagaacctgggcctggagcccgggtacctgaaggcggccttcgcggggtcggacggcggcccgacgttcggcaccaaggtgagcgcgtacccgccgtgcccgcgcccggacctggtggccggcctgcgcgcgcacaccgacgccggcggactcatactgctgctccaggacgaccaggtgagcgggctgcagctgctcaggggcggcgacggcggggagtgggtggacgtgccgccgctgcgccacgccatcgtcgccaacgtcggcgaccagctggaggtggtcaccaacgggcggtacaagagcgcggtgcaccgcgtgctcgcccgccccgacggcaaccgcatgtccgtcgcgtccttctacaacccgggcgccgacgccgtcatcttcccggcccccgcgctcgtcggcgaggaggagcgagccgagaagaaggccaccacgtacccgaggttcgtgttcgaggactacatgaacctgtacgcgcgccacaagttcgaggccaaggagccccggttcgaggccatgaagtcgtcggccatcgccaccgcgtga

SEQ ID NO: 25141 - protein, 323 aa, Zea mays
MAATVSFPVVNMEKLETEERDTAMAVIRDACENWGFFELLNHGISHELMDEVERLTKAHYATFREAKFQEFAARTLAAAGDEGADVSDVDWESTFFVRHLPASNLADLPDVDDHYRQVMKQFASEVQKLSEKVLDLLCENLGLEPGYLKAAFAGSDGGPTFGTKVSAYPPCPRPDLVAGLRAHTDAGGLILLLQDDQVSGLQLLRGGDGGEWVDVPPLRHAIVANVGDQLEVVTNGRYKSAVHRVLARPDGNRMSVASFYNPGADAVIFPAPALVGEEERAEKKATTYPRFVFEDYMNLYARHKFEAKEPRFEAMKSSAIATA

SEQ ID NO: 25142 - DNA, 1038 bp, Zea mays
  CDS (1)..(1038)
atggaaaccgccgcgccggcgcgcgtccaagccctcgctgaggccggcgtgttccgcctcccggcgcagtacatccagccgcctgagcacagaccgaccccctcgccttctcctattgccgcggcgctctccgtgccggtcgtcgacctctcaacctccaccgccgccgacgccgtccgcgccgcgtgcgcggactggggcgcctttcacgtggtcggccacggcgtgccgggggagctcctcgacgcggtgcgcgcggcagggctcgcgttcttccgcgcgcccatggaggacaagctccggttcgcctgcgacccggccaggggcgccgcctcggaagggtacggcagccgcatgctcgccaacgacgactccgtgctcgactggcgcgactactttgaccaccacacgctcccggagtcccgctgtgatcccgcccgctggcccgacttcgtccccggttacagagatactattgcaaaatacagccacagcatgaaggatcttgctaaaaaattgttgtgcatcatctcagaaaatctgagcctgccaccatcttatatacaagaggcggttggagaagttttccagaacattactattagctactattctccgtgtccacaacctgatcttgctcttgggttacaatctcattctgatatgggcgcaataacacttctgatacaagatgatgttggtgggcttgaagtattaaaggatggaatgtggatacctgtgcctgctttgcgtgatggcatccttgtgattctcgctgatcagacagagatcatcaccaatggaagatacaagagttcagttcatcgagctgttgtcaatgctgagcgtgcccgcttatcagtagcaacattttatgatccatcaaaatcaaggaaaatatgcactgccccgcagcttgtgagtgagaatgaaccacaaaagtatcgggatgtaatttatggtgactatgtctcatcttggtatagcaaaggtccagagggcaagcgaaacatcgacgccctcctgattcagcactag

SEQ ID NO: 25143 - protein, 345 aa, Zea mays
METAAPARVQALAEAGVFRLPAQYIQPPEHRPTPSPSPIAAALSVPVVDLSTSTAADAVRAACADWGAFHVVGHGVPGELLDAVRAAGLAFFRAPMEDKLRFACDPARGAASEGYGSRMLANDDSVLDWRDYFDHHTLPESRCDPARWPDFVPGYRDTIAKYSHSMKDLAKKLLCIISENLSLPPSYIQEAVGEVFQNITISYYSPCPQPDLALGLQSHSDMGAITLLIQDDVGGLEVLKDGMWIPVPALRDGILVILADQTEIITNGRYKSSVHRAVVNAERARLSVATFYDPSKSRKICTAPQLVSENEPQKYRDVIYGDYVSSWYSKGPEGKRNIDALLIQH

SEQ ID NO: 25144 - DNA, 1227 bp, Zea mays
  CDS (1)..(1227)
atggccacctcacataaagactcgatcgacgatgcagggcaagacgagatcatcttggttcgcaagcaaaccaagataggccaggtcgtctcgttggttgttgcattggaggagcgagcaggtgccatggcagccgctgagatcaagataggccaggtcgacgacgtccaggagctgcaccggacgggcctgcagacggtgccggaccggtacatcagggacggcgacgaccggccggacggcgacaacgtctgcgctgtcgcgcacatcccggtgatcgacgtcaccgagctccagcacgacgacgtcgggctggacaagctcaggctcgcctgcgaggagtggggcttcttccaggttgtgaaccatggcatcgcgcacgagctgctggacgagatggagaggctggcgagggagttcttcatgctgccgctggaggagaaggagaagtaccccatggcgccgggcgggatccaggggtacggccacgcgttcgtcttctccgaggaccagaagctggactggtgcaacatgctggcgctgggcgtggagccggcgtccatccggcagccgaggctgtggccgacggccccggccgggttcggggagaccctggaggcctactccgcggaggtcggggagctctgccggaggctgctcgcgcgcatcgccgagacgctgggcctggcgccggccacgttcgccgacatgttcggcgaggcggtgcaggcggtgcggatgaacttctacccgccgtgcccgcgcccggacctggtcatggggctcagcgcgcactcggacggcagcgccgtcaccgtgctccagcaggacgtgggctgcgccggcctgcaggtgcgcggcaagggcggcgcctgggtgcccgtgcaccccgtcccgcacgccctcgtcgtcaacatcggcgacaccctagaggttctgacgaacggcaggtacaagagcgtggagcaccgtgcggtggccaacggcgagcaggaccggctgtcggtggtgacgttctacgctccggcctacgacgtcgagttgggaccgctgccggagttcgtcaccgacgaggcgccgtgccggtaccggaggttcaaccacggcgagtacagccgccactacgtcaccagcaggctcgagggcaagaagacgctcgagttcgccaagattgatccgctggccggagagcacgacggcacagctcccgaggaaacctctacctag

SEQ ID NO: 25145 - protein, 408 aa, Zea mays
MATSHKDSIDDAGQDEIILVRKQTKIGQVVSLVVALEERAGAMAAAEIKIGQVDDVQELHRTGLQTVPDRYIRDGDDRPDGDNVCAVAHIPVIDVTELQHDDVGLDKLRLACEEWGFFQVVNHGIAHELLDEMERLAREFFMLPLEEKEKYPMAPGGIQGYGHAFVFSEDQKLDWCNMLALGVEPASIRQPRLWPTAPAGFGETLEAYSAEVGELCRRLLARIAETLGLAPATFADMFGEAVQAVRMNFYPPCPRPDLVMGLSAHSDGSAVTVLQQDVGCAGLQVRGKGGAWVPVHPVPHALVVNIGDTLEVLTNGRYKSVEHRAVANGEQDRLSVVTFYAPAYDVELGPLPEFVTDEAPCRYRRFNHGEYSRHYVTSRLEGKKTLEFAKIDPLAGEHDGTAPEETST

SEQ ID NO: 25146 - DNA, 1029 bp, Zea mays
  CDS (1)..(1029)
atggagaagatgctccactcagccccggcccacggcaggctcccggagtgcttcatcttcccggccgacaagctcccgcaggccaaggccacctcagcgacggtctccctgcccatcgtggacctctccctcggccgcgacgaggtgcggcgcgccatcctcgaggccggcaaggagatcggcttcttccaggtggtgaaccacggcgtctccctggaggcgatgcaggacatggagacggtgtgccaggagttcttccggctgccggcggaggacaaggccgggctgtactcggaggacacggggagggcgacccggatctactccagcaccatgttcgacacgggcgccgagaagtactggcgcgactgcctccgcctggcctgctccttccccgccgtcggcgacagcgccgcggcctggcccgacaagccccggaggctccgggaggtggtggagaggttcacggtgcagacgcggggcctggggatggagatcctgcgcctgctgtgcgagggcctcggcctccgccccgactacctggaaggggacatcagcggcggcgacgtcgtcctccacgtcaaccactacccgccctgccccgaccccaacgccacgctcggcctgccgccgcactgtgaccgcaacctcctcaccttgctcctccccagcatggtccctggcctcgaggtcgcctacaggggcgactggatcagggtggagcctgtgcccggcgccttcgtcgtcaacttcggatgccagcttgaggttgtgacgaacgggatcttgaagagcatcgagcaccgggtgatgaccaacctgggagtggcgcggacaacggtggccacgttcatcatgcccaccacggactgcctcatcggccccgccgccgagttcctcagcgacgacaacccgccgtgctaccgcaccctcaccttcgccgacttcaagcgcatctacagcgttgtcaagctgggctcgtcgctaaacctcaccacaaatctcaagaacgttcagaaggagctctga

SEQ ID NO: 25147 - protein, 342 aa, Zea mays
MEKMLHSAPAHGRLPECFIFPADKLPQAKATSATVSLPIVDLSLGRDEVRRAILEAGKEIGFFQVVNHGVSLEAMQDMETVCQEFFRLPAEDKAGLYSEDTGRATRIYSSTMFDTGAEKYWRDCLRLACSFPAVGDSAAAWPDKPRRLREVVERFTVQTRGLGMEILRLLCEGLGLRPDYLEGDISGGDVVLHVNHYPPCPDPNATLGLPPHCDRNLLTLLLPSMVPGLEVAYRGDWIRVEPVPGAFVVNFGCQLEVVTNGILKSIEHRVMTNLGVARTTVATFIMPTTDCLIGPAAEFLSDDNPPCYRTLTFADFKRIYSVVKLGSSLNLTTNLKNVQKEL

SEQ ID NO: 25148 - DNA, 1014 bp, Zea mays
  CDS (1)..(1014)
atggtggtcctcgccaagggtgagctcgagcagatcgccctcccggctgcagagccgcccccggccgacgtgcggtcggtggacctgtccgccccggcgggccccgcgcgcgaggccgcggcgcgcgcgctggtggcggcgtgcgaggagcacgggttcttccgggtgacgggccacggcgtgccggccagactcgtgcgcgccgcggaggccgcggcggccgggttcttcgcgcggccacagggcgagaaggaggaggagggccccacgctcgggtacggaagcaagcgcatcggcggcaacggcgacctcggctgggtcgagtacctcctgctcggtggcacacccgccgccgccgcgtcctcctcggcattattgccctgcgccgccgccccgtcgccgtccgcgccggccgggccgttacgggaccttctggacgagtacacggtggcggtgcggcggatggcgtgcgcggtgctggagctgatggcggaggggctgggcatcgccggcggcgccggggacgcggtgctggcgcggctggtggcgcgcgcggacagcgactgcatgctgcgggtgaaccactacccgccgcggccggcgctcaaccccagcctcacggggttcggcgagcacaccgacccgcagatcatctcggtgctccgcgccaacggcacctccggcctggagatcgcgctgcgggacggcgcctgggcctccgtcccgcccgacggggacgccttcttcgtcaacgtcggcgacaccctgcaggtgttgacgaacgggaggttcaggagcgtgaggcacagggtggtggtgaacagcgagaagtcccgggtgtccatggtcttcttcggcggcccgccgcccggcgagaggctgggcccgctgccgcagctcctgggcgacggcggccggagccggtaccgggacttcacctggagcgagttcaagaccagcgggtgcaggaccaggctcgcggaagaccgcctgtcccgcttcgagaagaagtag

SEQ ID NO: 25149 - protein, 337 aa, Zea mays
MVVLAKGELEQIALPAAEPPPADVRSVDLSAPAGPAREAAARALVAACEEHGFFRVTGHGVPARLVRAAEAAAAGFFARPQGEKEEEGPTLGYGSKRIGGNGDLGWVEYLLLGGTPAAAASSSALLPCAAAPSPSAPAGPLRDLLDEYTVAVRRMACAVLELMAEGLGIAGGAGDAVLARLVARADSDCMLRVNHYPPRPALNPSLTGFGEHTDPQIISVLRANGTSGLEIALRDGAWASVPPDGDAFFVNVGDTLQVLTNGRFRSVRHRVVVNSEKSRVSMVFFGGPPPGERLGPLPQLLGDGGRSRYRDFTWSEFKTSGCRTRLAEDRLSRFEKK

SEQ ID NO: 25150 - DNA, 981 bp, Zea mays
  CDS (1)..(981)
atggcgcctgcattgtcattcccgatcatcgacatggggctgctcgccggggaggagaggccggcggcgatggagcggctgcaagatgcgtgcgagaactggggcttcttcgagattctgaaccacggcatctcgacggagctgatggacgaggtagagaagctgaccaaggagcactacaagcgggtgcgcgagcagaggttcctcgagttcgctagcaagacgctcggggacggccgcgacattgcgcagggcgtgaaggcggagaacctggactgggagagcaccttcttcgtccgccacctcccggagcccaacatcgccgagataccggacctggacgacgagtaccggcgcgtcatgaagcggttcgccggcgagctggaggcgctggcggagcggctgctggacctgctgtgcgagaacctcggcctcgacaggggctacctggcgcgcgcgttccgcgggcccagcaagggcgccccgacgttcggcaccaaggtcagcagctacccgccgtgcccgcgcccggacctcgtcagcggcctgcgcgcgcacaccgacgccggcggcatcatcctgctgttccaggacgaccgggtgggcggcctccagctgcttaaggacggcgagtgggtggacgtgccgcccatgcgccacgccgtcgtcgtcaacctgggggaccagctggaggtgatcaccaacggcaggtacaagagcgtcatgcaccgggtggtggcgcagcccagcgggaacaggatgtccatcgcgtccttctacaacccgggcagcgacgcggtcatcttccccgcgccggcgctggtcaaggccgaggaggcggccgcgggggtgtaccccagcttcgtcttcgaggactacatgaagctgtacgtgcggcacaagttcgaggccaaggagccacggttcgaggccttcaagtccatggagacggacagctccaatcgcatagccatcgcgtga

SEQ ID NO: 25151 - protein, 326 aa, Zea mays
MAPALSFPIIDMGLLAGEERPAAMERLQDACENWGFFEILNHGISTELMDEVEKLTKEHYKRVREQRFLEFASKTLGDGRDIAQGVKAENLDWESTFFVRHLPEPNIAEIPDLDDEYRRVMKRFAGELEALAERLLDLLCENLGLDRGYLARAFRGPSKGAPTFGTKVSSYPPCPRPDLVSGLRAHTDAGGIILLFQDDRVGGLQLLKDGEWVDVPPMRHAVVVNLGDQLEVITNGRYKSVMHRVVAQPSGNRMSIASFYNPGSDAVIFPAPALVKAEEAAAGVYPSFVFEDYMKLYVRHKFEAKEPRFEAFKSMETDSSNRIAIA

SEQ ID NO: 25152 - DNA, 1074 bp, Zea mays
  CDS (1)..(1074)
atggagatgacggggtctctccctgtgcccagcgtgcaggccatggtggccgctggtcgtcatgcaccagtgccaccaaggtatctccgtccagatctggccgcggatgtcgtcgttgccgacgacgcgacgaccatccccatcatcgacttccagcgactgctgctggtcgacccagaggaatctgcgcgcctccatgcggcctgccaggactggggcttcttccagctgataaaccacggtgttccggacgatgtgatggaggcgatgaaggccagcacccagtcattcttcgcgcttcctgcggaggccaagcagcagtaccgtcagcaggcaggacagctggaggggtacggccagctgttcgtcgtctccgaggaccagaagctggactgggccgacgtcctctacctcaacacgcagccgcccgagcaccggaacctcagcttctggcctgctggtgagagcttcaggcagacgctggacacctactccgccgccgtcaagcacgtcgccgaccgcctgctgggagccatgtacatgaacctgggcctccagctgagcatcatggacatggacccggagcggggtgccgggatacagtcggtgaggatgaactactaccctccctgcgctgaagcggcggacaaggtcctgggcttctctccgcactccgactcggaccttctcaccctcgtcctccaggtcaaccagctccagggcctgcagatcaagaggccgcccgacggcggcggtgcctgggcctggcttcccgtcacgccgctgcagggcgccttcgtcgtcaacgtcggggacgtcctcgagatcttcaccaacgggaggtacaggagcgtcgagcaccgggctctagtcaacgcccacacggagcgcttgtccatcgcggcgttccactctcccagcatccatgccaccatagggccgctgccggagctcctcggggaccaggaggtgcccaagtataagacgctggaccaccaaagcttcattacgctcttcttctccgccaagctccagggcaagagcttcttggaacggatgaagaagctttcgtag

SEQ ID NO: 25153 - protein, 357 aa, Zea mays
MEMTGSLPVPSVQAMVAAGRHAPVPPRYLRPDLAADVVVADDATTIPIIDFQRLLLVDPEESARLHAACQDWGFFQLINHGVPDDVMEAMKASTQSFFALPAEAKQQYRQQAGQLEGYGQLFVVSEDQKLDWADVLYLNTQPPEHRNLSFWPAGESFRQTLDTYSAAVKHVADRLLGAMYMNLGLQLSIMDMDPERGAGIQSVRMNYYPPCAEAADKVLGFSPHSDSDLLTLVLQVNQLQGLQIKRPPDGGGAWAWLPVTPLQGAFVVNVGDVLEIFTNGRYRSVEHRALVNAHTERLSIAAFHSPSIHATIGPLPELLGDQEVPKYKTLDHQSFITLFFSAKLQGKSFLERMKKLS

SEQ ID NO: 25154 - DNA, 1020 bp, Zea mays
  CDS (1)..(1020)
atggcggagcagctcatctccacggccgtgcaccacacgctgcccgacagctacgtccggtcggaggcggaccggccgcgcctcgacgaggtcgtgcccgacgccgacatccccgtcgtcgacctcgccaaccccgaccgcgccgccgtcgtcgcccagatcggcgccgcctgcagctcccacggcttcttccaggtgctcaaccacgggctgccgctggaggtcatgctggcagcgatggcggtggcgcacgacttcttccgcctctcgccggaggagaaggccaagctctactccgacgacccggccaagaagatgcgcctctccaccagcttcaacgtgcgcaaggagaccgtgcacaactggcgcgactacctccgcctgcactgccacccgctcgagcagttcgtcccggagtggccagccaatccgccgcccttcagggatgtcatgagcacatactgcaaggaggtccggcagctcgggttccggctctacgccatgatatcggagagcctgggactggagcaggactacatcaagaaggtcctcggcgagcaggagcagcacatggcggtgaacttctacccaaagtgcccgtcgccggagctcacctacgggctccccgcgcacacggaccccaacgcgctcaccatcctgctcatggaccagcaggtggccggcctgcaggtgctcaaggacggccgctggatcgccgtgaacccgcggcccggcgcgctcgtcgtcaacatcggggaccagctgcaggcgctgagcaacggcaggtacaggagcgtgtggcaccgcgccgtcgtcaacgccgacaggccgaggatgtcggtggcgtcgttcctctgcccctgcaacgacgcgcgcatcggccccgccgccaggctcctcaccgacggcacgcccgccgtctacagggactacacctacgccgagtactacgccaagttctggagcaggaacctggaccaggagcactgcctcgagctcttcaggaccccgacctcctag

SEQ ID NO: 25155 - protein, 339 aa, Zea mays
MAEQLISTAVHHTLPDSYVRSEADRPRLDEVVPDADIPVVDLANPDRAAVVAQIGAACSSHGFFQVLNHGLPLEVMLAAMAVAHDFFRLSPEEKAKLYSDDPAKKMRLSTSFNVRKETVHNWRDYLRLHCHPLEQFVPEWPANPPPFRDVMSTYCKEVRQLGFRLYAMISESLGLEQDYIKKVLGEQEQHMAVNFYPKCPSPELTYGLPAHTDPNALTILLMDQQVAGLQVLKDGRWIAVNPRPGALVVNIGDQLQALSNGRYRSVWHRAVVNADRPRMSVASFLCPCNDARIGPAARLLTDGTPAVYRDYTYAEYYAKFWSRNLDQEHCLELFRTPTS

SEQ ID NO: 25156 - DNA, 1095 bp, Zea mays
  CDS (1)..(1095)
atggcggacgcagccagaggcctcgggtcttcgtctctcccggtggctaacgtgcaggcgcttgcggagtcttgcaacgacaacggagccgatgcgccggtgcccgggaggtacctcatcaaggatcctagcgccgaggaggtcgtagccgccggcgacagcgcctgcgcgattccggtcatcgatttccgcaagctgctcgatccggggtcgtccgaggaggagtgcgccaggctgggagccgcgtgccaccactggggattcttccagctcatcaaccatggcgttccggccgaggtgactgggaacctgatgaaggacgtagctgggttcttcaggcagccgctggaagccaagaaggagtgcgcgcagcaggccggcagcatcgaaggctacggccaggccttcgtcgtgtcggaggaccagaagctggactgggcggacatgctcttcctcatcgtgcggccgagggaggccagggacatgcgcttctggccgacgcgccctgagtccttcagggattccgtggacgcgtactccttggaagcttcgaagctagcgtaccgcctgctggagttcatggcaaggggcgtgggtgccgacccggcgtcgctgcagagcatgttccaagggcaggtgcagggcatgcgggtgaactactacccgccgtgccagcaggcggcggaccaggtgctgggcctgtcgccgcacagcgaccccaacgggctcaccctgctcctgcagatgagccacgacgtgcacgggcttcaggtcagcaaggacggcaggtggttccccgtgcaggctctccccggcgccttcgttgtcaacgtcggtgacgcgctcgagatcgttagcaacggagcgttcaggagtgtcgagcacagggccgtgatacacccgaccaaggagcggatttcggcggcgctgttccacttcccggaccaggatcggatgcttggtcctctgccggagctggtgaaggaaggcgacacagtgcggtacgcaacgacgacttaccaagagttcatgaagcgattcttcgctgcaaagctcgatggaaagaagctcatagagagattcaagctacagtag

SEQ ID NO: 25157 - protein, 364 aa, Zea mays
MADAARGLGSSSLPVANVQALAESCNDNGADAPVPGRYLIKDPSAEEVVAAGDSACAIPVIDFRKLLDPGSSEEECARLGAACHHWGFFQLINHGVPAEVTGNLMKDVAGFFRQPLEAKKECAQQAGSIEGYGQAFVVSEDQKLDWADMLFLIVRPREARDMRFWPTRPESFRDSVDAYSLEASKLAYRLLEFMARGVGADPASLQSMFQGQVQGMRVNYYPPCQQAADQVLGLSPHSDPNGLTLLLQMSHDVHGLQVSKDGRWFPVQALPGAFVVNVGDALEIVSNGAFRSVEHRAVIHPTKERISAALFHFPDQDRMLGPLPELVKEGDTVRYATTTYQEFMKRFFAAKLDGKKLIERFKLQ

SEQ ID NO: 25158 - DNA, 1050 bp, Zea mays
  CDS (1)..(1050)
atggcaatagaggaagacgaagactacgagccgccattgatggccacgtacaagcatctgttggacagtcacccgcatcgaccactgggcgccgcgcaagacgacgaggattgcttcctcctcccggtgatcgacctttccagcctcctgcccccggtgcatcatcgcaagcagtcagcagctgcagagcagtgccgggcgtccatcgtgcgcgccgcctccgagtggggcttcttccaggtgaccaaccacggcgtgccgcaggttctgctggacgagctgcaccaggcgcaggccggcgtcttccgccggcccttccaactcaaggcgcaccagccgctgctggacttctcgccggagagctaccgctggggcacgcccaccgccacgtgcctggagcagctctcgtggtccgaggcctaccacatccccacaacgacgaccacgaccggtaacgacgacaagacccggctagtggtcgaggaggtgtcgacggcgatgtcgaagctggcgcagcggctggcggggatcctcgtcgcggagctgggcgaagacagcgcggcggcggtggtgtcgcggtgcacgcggagcacctgcttcctgcggctgaaccggtacccgccgtgcgcggcggcggccagcggcgtcgtctacgggctgtgcccacactcggacagcgacttcctgaccatactccaccaggacggcgtcggcggcctccagctcgtcaaggacgggcagtgggtagccgtgaagcccagccccggcgcgctcatcgtcaatgtgggcgacctcctgcaggcgtggagcaacgaccggtaccggagcgtcgagcaccgggtgatggccagcgccacgagggagcggttctccgccgccttcttcctgtgccccagctacgacacgctcatccggccgcgctgcggcgccggcggacctcctcctcgctatgagagcttcaccttcggggagtaccggaaccagatcagggaggacgtcaggctcacgggccgaaagctcggcctgcaacgcttccgcaaagcagagtag

SEQ ID NO: 25159 - protein, 349 aa, Zea mays
MAIEEDEDYEPPLMATYKHLLDSHPHRPLGAAQDDEDCFLLPVIDLSSLLPPVHHRKQSAAAEQCRASIVRAASEWGFFQVTNHGVPQVLLDELHQAQAGVFRRPFQLKAHQPLLDFSPESYRWGTPTATCLEQLSWSEAYHIPTTTTTTGNDDKTRLVVEEVSTAMSKLAQRLAGILVAELGEDSAAAVVSRCTRSTCFLRLNRYPPCAAAASGVVYGLCPHSDSDFLTILHQDGVGGLQLVKDGQWVAVKPSPGALIVNVGDLLQAWSNDRYRSVEHRVMASATRERFSAAFFLCPSYDTLIRPRCGAGGPPPRYESFTFGEYRNQIREDVRLTGRKLGLQRFRKAE

SEQ ID NO: 25160 - DNA, 1002 bp, Zea mays
  CDS (1)..(1002)
atggggggcgagacgcacctgagcgtgcaggagctggcggcgtcgctgggcgcgctaccgccggagttcgtgcggtctgagcaggaccagccgggcgcgaccacgtaccgcggggccgccgtgccggacgcgccggtgatcgacatatcggagcccgggttcggcgcgcgcatggccgcagccgccagggagtgggggctgttccaggtggtgaaccacggcgtgccctcagcggcggtggcggagctccagcgcgtcgggcgggccttcttcgcgcttccgacggaggagaaggagcgctacgccatggacccggcgtccggcaagatcgagggctacggcaccaagctgcagagggacctcgagggcaagaagacgtggaacgacttcttcttccacgtcgtcgcgccgccggagaaggtggaccacgccgtctggccccggagcctcgccgggtacagggaggccaacgaggagtactgccgccacatgcagcgcctgacgcgcgagctgttcgagcacctctcgctggggctggggctccacgggggcgccatggcggaggcgttcggcggagacggcctggtgttcctgcagaagatcaacttctacccgccgtgcccgcagccggagctcacgctcggcgtcgcgccgcacaccgacatgagcacgctcaccgtcctcgtgcccaacgaggtgcaggggctccaggtcttcaaagatggtcaatggtacgaggccaagtacgtgcccgacgcactcatcgtccatatcggcgatcagatcgagattttcagcaacggggcatacaaggcggtgctgcaccgtacgacggtgaacaaggagaagacgcggatgtcatggccgatgttcgtggagccgccgggggagctcgtcgtcgggccgcaccccaagctggtcacggaggagagcccggccaagtacaaggccaagaagtacaaggactaccagcactgcaagatcaacaagctccccatgtaa

SEQ ID NO: 25161 - protein, 333 aa, Zea mays
MGGETHLSVQELAASLGALPPEFVRSEQDQPGATTYRGAAVPDAPVIDISEPGFGARMAAAAREWGLFQVVNHGVPSAAVAELQRVGRAFFALPTEEKERYAMDPASGKIEGYGTKLQRDLEGKKTWNDFFFHVVAPPEKVDHAVWPRSLAGYREANEEYCRHMQRLTRELFEHLSLGLGLHGGAMAEAFGGDGLVFLQKINFYPPCPQPELTLGVAPHTDMSTLTVLVPNEVQGLQVFKDGQWYEAKYVPDALIVHIGDQIEIFSNGAYKAVLHRTTVNKEKTRMSWPMFVEPPGELVVGPHPKLVTEESPAKYKAKKYKDYQHCKINKLPM

SEQ ID NO: 25162 - DNA, 1284 bp, Zea mays
  CDS (1)..(1284)
atggcggagagggttgttggtgtatgcgtgggtccgaaggacggtgggacttcggtggcggagagggttgttggtgtatgcgtgggtccgaaggacggcgggagagggctgcgcgcggcggcagggaagggacgatatagatacacacagatggcggactgcatgcaggagtggccggagcccgtcgtccgcgtgcaggcgctcgccgagagcggcctgtccgtcatcccgagctgctacgtcaagccgccgtgcgaccgccccgccgtgtccccggcggcggcaacgacagtccaggagaccacggagccctcggacatgagcattccggtcgtcgatctcggcgcgctgctggcggcggacggcggcgccaccgtcaccgaggccgtcgccgccgcgtgccgggactggggcttcttccaggtggtcaaccacggggtgcgccccgagctgatgcgcgcggcgcgggaggcctggcgcggcttcttccgccgcccgcccgccgagaagcagcgctacgccaactcgccccgcacctacgagggctacggcagccgcctcggcgtccagaagggcgccgccctcgactggggcgactacttcttcctccacctcgcgccggaggcggccaagagcacgcccaagttctggccggcccagcccagcaactgcaaggaggtgtccgaggagtacggacgcgaggtggtgcggctgtgcgagctgctgatgcgggtgatgtcagtgagcctagggctggacgaggcgcacctccagcgggcgttcggcggggcggactgctgcggcgccaccctgcgcgccaactactacccgcggtgcccgcagccggacctgacgctgggcctctccgcgcactcggaccccggcgccctcaccgccctcctcgccgacgagcacgtccgcggcctgcaggtccgacgcagggccgccgacgactgggtcaacgtgcaccccgtccgcgacgccttcatcgtcaacgtcggcgaccaagtccagataatgagcaactccgtgtacaagagcgtggagcacagggtggtcgtgaacgccgaggaggagcgcatatccctcgccatcttctacaaccccaagggcgacgtccccatcgccccggcgccggagctggtcacggccccgaacctgccaccgctctacccgacgatgaccttccacgagtacaggctctacgtcaggaacaagggcgccaggggcaaggcgcagatcgaggctctcaagggccagggaaccccagaaagtcaattatag

SEQ ID NO: 25163 - protein, 427 aa, Zea mays
MAERVVGVCVGPKDGGTSVAERVVGVCVGPKDGGRGLRAAAGKGRYRYTQMADCMQEWPEPVVRVQALAESGLSVIPSCYVKPPCDRPAVSPAAATTVQETTEPSDMSIPVVDLGALLAADGGATVTEAVAAACRDWGFFQVVNHGVRPELMRAAREAWRGFFRRPPAEKQRYANSPRTYEGYGSRLGVQKGAALDWGDYFFLHLAPEAAKSTPKFWPAQPSNCKEVSEEYGREVVRLCELLMRVMSVSLGLDEAHLQRAFGGADCCGATLRANYYPRCPQPDLTLGLSAHSDPGALTALLADEHVRGLQVRRRAADDWVNVHPVRDAFIVNVGDQVQIMSNSVYKSVEHRVVVNAEEERISLAIFYNPKGDVPIAPAPELVTAPNLPPLYPTMTFHEYRLYVRNKGARGKAQIEALKGQGTPESQL

SEQ ID NO: 25164 - DNA, 1131 bp, Zea mays
  CDS (1)..(1131)
atggcaataagctgcttcagcggcggcgccggctggccggagcccgtggtgcgcgtccaggctgtgtcggacacgtgcggcgacacgatccccgagcggtacgtgaagcccctgtcggagcggccccggctctcaccggcctccgatggcggcggcccgaatatcccagtcgtagacctgtcaatgctagacgtggacgcgacatccagcgccgtggcggcggcgtgccgggagtggggctttttccaggcagtgaaccacggcgtccgcccggagctgctgcgcggcgcgcgcgcggcgtggcgtggcttcttccggcagcccgcggaggtgcgcgagcgttacgcgaactcgccggcgacgtacgagggctacggcagccgcctcggcaccgccaagggcggcccgctggactggggcgactactacttcctccacctgctgccggcttccctcaagagccacgagaagtggccttccctgccttcctccctacggggggcaacggaggagtacggcgaggaagtgttgcagctgtgccggagggtgatgcggctgctctccagcgggctggggctggaagccgggagactgcaggcggcgttcggcggagagggcggcgaaggggcgtgcttgcgggtcaacttctacccgcagtgcccgcagccagagctgacgctgggcgtagcggggcactccgaccccggcggcatgaccatgctgctggtggacgaccacgtcaagggcctgcaggtaaggagccccgacggccagtggatcgtcgtcgaacccgtccccgacgccttcatcgtcaacgtcggcgaccagatccaggtgctgagcaacgcggcatacaagagcgtggagcaccgggtgacggtaagcgcggcagaggaccggctgtctatggctttcttctacaacccgcgaagcgacctgcccatcgcgccgatggcggagctggtggggcccgaccgcccggcgctgtacccggagatgaccttcgacgagtaccgcgttttcatccggcaacgtggtttggccggcaaggcgcagcttgagtccctgcaggtcaaagccgccgccggcggaggaggctgtagcgctgcagctgcctcctccaccagctag

SEQ ID NO: 25165 - protein, 376 aa, Zea mays
MAISCFSGGAGWPEPVVRVQAVSDTCGDTIPERYVKPLSERPRLSPASDGGGPNIPVVDLSMLDVDATSSAVAAACREWGFFQAVNHGVRPELLRGARAAWRGFFRQPAEVRERYANSPATYEGYGSRLGTAKGGPLDWGDYYFLHLLPASLKSHEKWPSLPSSLRGATEEYGEEVLQLCRRVMRLLSSGLGLEAGRLQAAFGGEGGEGACLRVNFYPQCPQPELTLGVAGHSDPGGMTMLLVDDHVKGLQVRSPDGQWIVVEPVPDAFIVNVGDQIQVLSNAAYKSVEHRVTVSAAEDRLSMAFFYNPRSDLPIAPMAELVGPDRPALYPEMTFDEYRVFIRQRGLAGKAQLESLQVKAAAGGGGCSAAAASSTS

SEQ ID NO: 25166 - DNA, 1095 bp, Zea mays
  CDS (1)..(1095)
atggacgccaagccgcgcaacctgggcggctcgctgccggtgcccaacgtgcaggacctggccgcgcgccccggcgacgaactcacgccgcccgtgctaagccgctacctccgcgacgacgtcgacggcgcagacgccaacggcgacgcggcctcctcggtgccggtagttgacctcgcgaggctcctggacccgtcgtcgcacggagacgaggagtccgccaaactgaaggcggcctgcgaggagtggggcttcttccaggtgatcaaccacggggtgcccgacgcggtggtcgcggacgtgaaggcagacctgcaggccttcttccgcctcccgctcgccgacaagcgcgcggtggcgcaggagcccggcgggatcgaggggtacgggcaggccttcgtggtctccgaggaccagaagctggactgggccgacatgcttttcctgtccacgcagccgcccgagtaccgggccccgcgcttctggccggcgcgcccggccacgttcggggactcgctggcgcgctactctgccgaggtgcagcgcgtggccgcccgcctgctggcgtccatggccgcgaacctgggcgtggcggacgccgcgaggctggccagggtcgccgacgcgcaggccgtgcgcgtcaactactacccggcgtgcccgcacggcaggggcagggtgctgggcctgtcgccgcactcggacgccgccggcctcacgctgctgctccaggtcagcgccgtcccggggctgcagatcaggaggcgcggcgcgtggatcagcgtcgaccccatccccggagcgctggtggccaacgtcggcgacgtcgtcgaggtgctcaccaacggcaggtacaagagcatcgagcaccgggcgctggttagccccacccaccaccgggtgtccgtcgcagccttccactccgccaggttcggcgacacttacgcgccgcttgaggagacgatggtcgatggtgatgagccagcgaggtacaggagcattggcgtcgaggactacgtccgcctggtgctgtctagtaagctccaaggaaagaacataatggacgccatgaagatcaatccggtcactgaatga

SEQ ID NO: 25167 - protein, 364 aa, Zea mays
MDAKPRNLGGSLPVPNVQDLAARPGDELTPPVLSRYLRDDVDGADANGDAASSVPVVDLARLLDPSSHGDEESAKLKAACEEWGFFQVINHGVPDAVVADVKADLQAFFRLPLADKRAVAQEPGGIEGYGQAFVVSEDQKLDWADMLFLSTQPPEYRAPRFWPARPATFGDSLARYSAEVQRVAARLLASMAANLGVADAARLARVADAQAVRVNYYPACPHGRGRVLGLSPHSDAAGLTLLLQVSAVPGLQIRRRGAWISVDPIPGALVANVGDVVEVLTNGRYKSIEHRALVSPTHHRVSVAAFHSARFGDTYAPLEETMVDGDEPARYRSIGVEDYVRLVLSSKLQGKNIMDAMKINPVTE

SEQ ID NO: 25168 - DNA, 1038 bp, Zea mays
  CDS (1)..(1038)
atggagaatatgctccacctagccccgtcgtcgtcccaggcattggccttggaccgctcctccgtcttctcgcgtgagcacgtgccgccggccgtctccgctgtcacctccctgccagttatcgacatgtctcgcagccgcgacgaggtccgccgcgctatcctcgacgccggcatggagttcggcttcttcctggtggtggagcacggcatcccagaggaggtgatgcgcgacatgctggaggtgtgcgaggagttcttccagctgccggcggcgagcaaggcgtacatgtactcggaggacagtcagaggcccaaccggatcttctccggcacaacctacgacacgggcggcgacaagtactggcgggactgcctccgcctcgcctgcccctcgtccttcccggtcggcagcggcacaagggacgactggccgcacacgccccagcggctgaggggtgtcgtggagcgtttcaccgctctgaccagagggctgggggtggagctgctgcggctgctgtccgaggccatggggatccggcccgactacttcgagggcgacatcagcgccggcgacgtggtcctcaacgtcaaccactaccctccgtgccccagcccggagaagacgctcggcctgccgccacattgcgaccgcaacctcatcaccctcctcctccaaggctccgtctacggcctcgacgtcgcctacaggggagagtggataaaggtcgagcccatgcccggtgccttcgtcgtcaacttcggccagcaactcgaggtggtgaccaacggattgctgaagagcattgagcaccgcgtggtgaccagctcgacgctggcgcggacggcggtggccacattcatcatgcccaccccagactgcctcatcggcccgtcaaaggagttcctcgccggggacaagccaccgtgctaccgcaccatcaggttcggtgacttcatgcgcatgtacaacactgtcaagctggggtcatccatcaaccagactacagatcttaagaatatccagaagaagatatga

SEQ ID NO: 25169 - protein, 345 aa, Zea mays
MENMLHLAPSSSQALALDRSSVFSREHVPPAVSAVTSLPVIDMSRSRDEVRRAILDAGMEFGFFLVVEHGIPEEVMRDMLEVCEEFFQLPAASKAYMYSEDSQRPNRIFSGTTYDTGGDKYWRDCLRLACPSSFPVGSGTRDDWPHTPQRLRGVVERFTALTRGLGVELLRLLSEAMGIRPDYFEGDISAGDVVLNVNHYPPCPSPEKTLGLPPHCDRNLITLLLQGSVYGLDVAYRGEWIKVEPMPGAFVVNFGQQLEVVTNGLLKSIEHRVVTSSTLARTAVATFIMPTPDCLIGPSKEFLAGDKPPCYRTIRFGDFMRMYNTVKLGSSINQTTDLKNIQKKI

SEQ ID NO: 25170 - DNA, 1089 bp, Zea mays
  CDS (1)..(1089)
atgcgttacgtagctgccactccgaccatgccgtcccttgtcgcggagagcgccgccgaaccgcctctggtggacagctacctggagctgctccggcgcggcggcggcggcggcggcattgcggcggcgaccgagggctgcgtgcaggagcgcgagctgcccttgatcgacctgacgtgcctgcagggcagcgcgggcgaggcggcgaggacgacgtgcgcggacgccatggcgagggcggcctcggagtggggctttttccaggtgaccgggcacggcgtgagccgggcgctgttggagcggctgcgggcggagcaggcgcggatgttccggctgccgttcgaaaccaaggccaaggccgggcttctcaacggctcctaccgatggggcgcccccacggccacgtcgctccgccacctatcgtggtcggaggcgttccacgtcccgctcgccagcatctccggcactgcctgcgacttcggagagctcagctccttgagggacgtgatgcaggaggtggcggacgcgatgtcgcgggtggccaagaccgtggcggtggcgctggcggggagcctgctgggccacgacgaggcggcggcgttcccggcggggtgcggcgagaccacctgctacctgcggctgaatcggtacccggcgtgcccgttcgcggcgaacaccttcgggctggtgccccacacggacagcgacttcctgacggtgctgtcccaggaccaggtcgggggcctgcagctcatgacggacgccggctgggtggccgtcaagccccgccccgacgcgctcatcgtcaacatcggcgatctgtttcaggcctggagcaacaacctgtacaagagcgtggagcacaaggtggtggccaacgccacggcggagcgcttctcggcggcctacttcctgtgcccgtcctacgactcgctcgtcggcacgtgcggcgagccgtcaccgtacagagacttcaccttcggggagtacaggaggaaggtgcaggaggacgtcaagaggaccggaagaaagattgggctccccaactttctcaaacaccggccaccccctcaatcacggcccgcctaa

SEQ ID NO: 25171 - protein, 362 aa, Zea mays
MRYVAATPTMPSLVAESAAEPPLVDSYLELLRRGGGGGGIAAATEGCVQERELPLIDLTCLQGSAGEAARTTCADAMARAASEWGFFQVTGHGVSRALLERLRAEQARMFRLPFETKAKAGLLNGSYRWGAPTATSLRHLSWSEAFHVPLASISGTACDFGELSSLRDVMQEVADAMSRVAKTVAVALAGSLLGHDEAAAFPAGCGETTCYLRLNRYPACPFAANTFGLVPHTDSDFLTVLSQDQVGGLQLMTDAGWVAVKPRPDALIVNIGDLFQAWSNNLYKSVEHKVVANATAERFSAAYFLCPSYDSLVGTCGEPSPYRDFTFGEYRRKVQEDVKRTGRKIGLPNFLKHRPPPQSRPA

SEQ ID NO: 25172 - DNA, 1050 bp, Zea mays
  CDS (1)..(1050)
atgggcggcctcactatggaccaggccttcgtgcaggcccccgagcaccgccccaagcccatcgtcaccgaggccaccggcatccctctcatcgacctctcgcctctggccgccagcggcggcgccgtggacgcgctggccgccgaggtgggcgcggcgagccgggactggggcttcttcgtggtcgtgggccacggcgtgcccgcagagaccgtggcgcgcgcgacggaggcgcagcgagcgttcttcgcgctgccggcagagcggaaggccgccgtgcggaggaacgaggcggagccgctcgggtactacgagtcggagcacaccaagaacgtgagggactggaaggaggtgtacgacctcgtgccgcgcgagccgccgccgccggcagccgtggccgacggcgagctcgtgttcgagaacaagtggccccaggatctaccgggcttcagagaggcgctggaggagtacgcgaaagcgatggaagagctggcgttcaagctgctggagctgatcgcccggagcctgaagctgaggcccgaccggctgcacggcttcttcaaggaccagacgaccttcatccggctgaaccactaccctccttgcccgagccccgacctggccctcggcgtggggcggcacaaggacgccggcgccctgaccatcctgtaccaggacgacgtcggggggctcgacgtccggcggcgctccgacggcgagtgggtccgcgtcaggcccgtgcccgactcgttcatcatcaacgtcggcgacctcatccaggtgtggagcaacgacaggtacgagagcgcggagcaccgggtgtcagtgaactcggcgagagagaggttctccatgccctacttcttcaacccggcgacctacaccatggtggagccggtggaggagctggtgagcgaggacgatccgcccaggtacgacgcctacaactggggcgacttcttcagcaccaggaagaacagcaacttcaagaagctcaacgtggagaacattcagatcgcgcatttcaagaagagcctcgtcctcgcctaa

SEQ ID NO: 25173 - protein, 349 aa, Zea mays
MGGLTMDQAFVQAPEHRPKPIVTEATGIPLIDLSPLAASGGAVDALAAEVGAASRDWGFFVVVGHGVPAETVARATEAQRAFFALPAERKAAVRRNEAEPLGYYESEHTKNVRDWKEVYDLVPREPPPPAAVADGELVFENKWPQDLPGFREALEEYAKAMEELAFKLLELIARSLKLRPDRLHGFFKDQTTFIRLNHYPPCPSPDLALGVGRHKDAGALTILYQDDVGGLDVRRRSDGEWVRVRPVPDSFIINVGDLIQVWSNDRYESAEHRVSVNSARERFSMPYFFNPATYTMVEPVEELVSEDDPPRYDAYNWGDFFSTRKNSNFKKLNVENIQIAHFKKSLVLA

SEQ ID NO: 25174 - DNA, 1056 bp, Zea mays
  CDS (1)..(1056)
atggctgttgaatcatggacggtgccgactccagtgaaagatctggccgccctcgtggacgagccgccgagccggttcgtgcagcgggaggagcaccgccctggcagcctgatgctcgcggctgacatgccggatcccctccctatcgtcgacctcaacaagctgtcgaccgccgacgaggcagccaagctccgctcggcgctacagacctgggggctttttctggctaccaaccacggcatagacgcgtctctaatggaggatctgatggaggcgtcacgggagttcttccaccagccgctccaggagaggcagaagtacagcaacctgagggaaggcacgcgcttccagctcgaagggtacggcagtgacccagtggtggcgcaggaccatatccttgactggaacgaccgtctgcagctgaaggtggagcctgaagacgaaagaagccttgctcagtggcccgaacatcctgaatccttcagggatcttctgcacgagtacgcatcaaaaaccaagattatgagggacagaatcttgcgagcgatggccaagatcttggagcttgatgaggaagatttcatcaagcagcttggtgctagtcctcaagcctatgccagattcaactactaccctccttgtccaaggccggagctcgtcttgggcatcaaggctcactctgacggccccgttctcacggttctcctggtcgatcgtgaggtcggtggactgcaggttcagagagagaacacgtggttcaatgtcccatccgttcctcacactctggtcatcaacctgggagactccttggagataatgagcaacgggatattcaagagcccagtgcacagggttgtgacgaatgcagagaaggagaggatctcgttggccatgctctatgcggtggaacgcgacaatgtgcttcagccggcggccggtttactggatgagaagcgtccggcaaggtacaggaggattacagaggcggacttcttggagggggtcaaagaacacttctctaaaggaataagaatgattgagaccttgaagatctaa

SEQ ID NO: 25175 - protein, 351 aa, Zea mays
MAVESWTVPTPVKDLAALVDEPPSRFVQREEHRPGSLMLAADMPDPLPIVDLNKLSTADEAAKLRSALQTWGLFLATNHGIDASLMEDLMEASREFFHQPLQERQKYSNLREGTRFQLEGYGSDPVVAQDHILDWNDRLQLKVEPEDERSLAQWPEHPESFRDLLHEYASKTKIMRDRILRAMAKILELDEEDFIKQLGASPQAYARFNYYPPCPRPELVLGIKAHSDGPVLTVLLVDREVGGLQVQRENTWFNVPSVPHTLVINLGDSLEIMSNGIFKSPVHRVVTNAEKERISLAMLYAVERDNVLQPAAGLLDEKRPARYRRITEADFLEGVKEHFSKGIRMIETLKI

SEQ ID NO: 25176 - DNA, 1062 bp, Zea mays
  CDS (1)..(1062)
atggctgacgagtcatggagggtgccaaccccagtgcaagaactggccgcaggcgtggtggagccaccgacccagttcgtgctgcaggagcaggatcgtcctggatctgggaccctgctcttcgccactgacatgccggagcccattcccgtcgttgacctcagcaggctggcggctgccgacgaggcttccaagctccggtcagcactggagacctgggggctcttcctggttactaagcatgggatagaagcatctctcatggacgatgtgatggccgcgtcacgcgattttttctaccagccgctcgaagcgaagcaggaatacagtaacctgataggcggcaagcggttccagatggagggttatggtaatgacatggtgaaatccaaagatcagatactggactggcaagatcggctgcagctcagggtggaaccccaagatgagaggaacctcgcttattggcccaaacaccctgattctttcagggatcttctggagaagtatgcatcaaaaaccaagatagttaggaacaaagtcttacgggcgatgggcaaaacattggagcttggcgaagactatttcatcagccagattggtgacagggcctcagcaattgctaggttcaactactaccctccctgtccaaggcctgatcttgtctttggcattaagcctcactctgacggtggcgcggtgacgatacttctcgtcgacaaggatgttgggggcctgcaagttcagaaagatggcgtttggtacactgttccgtccatgcctcacacgctgcttgtcaacttgggtgactccatggagataatgaacaatgggatcttcaaaagtccggtgcacagggttgtgacgaatgcagagaaagagagactctcactcgccatgttctacggcgtggaaggccagagagtgcttgagccagcgcttggtttgctgggtgaggagcgaccagcacggtacaggaaaattatggcctcagactacattattgggctccgtcaaggaattgcggaaggacagagatttatcgagactttgaagatatag

SEQ ID NO: 25177 - protein, 353 aa, Zea mays
MADESWRVPTPVQELAAGVVEPPTQFVLQEQDRPGSGTLLFATDMPEPIPVVDLSRLAAADEASKLRSALETWGLFLVTKHGIEASLMDDVMAASRDFFYQPLEAKQEYSNLIGGKRFQMEGYGNDMVKSKDQILDWQDRLQLRVEPQDERNLAYWPKHPDSFRDLLEKYASKTKIVRNKVLRAMGKTLELGEDYFISQIGDRASAIARFNYYPPCPRPDLVFGIKPHSDGGAVTILLVDKDVGGLQVQKDGVWYTVPSMPHTLLVNLGDSMEIMNNGIFKSPVHRVVTNAEKERLSLAMFYGVEGQRVLEPALGLLGEERPARYRKIMASDYIIGLRQGIAEGQRFIETLKI

SEQ ID NO: 25178 - DNA, 1212 bp, Zea mays
  CDS (1)..(1212)
atgagcttggttgcggcgccaatggcgatcgtcgacgtggccaacgcccagctgcagcaagcagcagcagcagctgccaagaaagacgaggacggccatgagcagcaggagtcgtcctacgactacggcgcgctgatgaaaggcgtgaggcacctgtcggacagcggcattaccaggctgcccgacaggtacgtcctgcccgcgtccgaccgccccggcgtccttgccgtctcgtcgtccgtggcgggcagcggcagggtcaagctccctgtcgtcaacctcgccggcctccgcgacccctgccagcgcgccgccgtgctggccacgctcgacgccgcgtgccgggagtacggcttctttcaggtggtgaaccacgggttcgggagcgacgtttgcggcgggatgctggacgtggcgcggcgcttcttcgagctgccgcttgccgagcgagcgcggcacatgtcggcggacgtgcgggcgccggtgcgctacggcaccagcttcaaccaggccaaggacgccgtgctctgctggcgcgacttcctcaagctcgtctgccagccgctgcaggcggtgctcccgtactggccccagcagccggcggacctcagggacgtggccaccaggtacgccacggcgagccaccggctgttcatggaggtcatggaggcggcgctggaggccctgggcatccccacggccggcggcgtgctcggggagctggcagcgtcgtcgtcgcacatgatgacggtgaactgctacccggcgtgcccgcagcctgagctcacgctggggatgccctcgcactcggactacggcctcttcacgttcgtcctgcaggaccacgttgagggcctccaggtcatgcacgacggccgctggctcaccatcgaccccatcccgggatcgttcgtcgtcaacgtcggcgaccacctagagatctacagcaacgggcggtacaagagcgcgctgcaccgggtgcacgtgaactccacgcggccgcgcatctcggtggcgtcgttccacagcctgccggcggagcgagtgatcgggccggcgccggagctggtggacgacgaggccggcaacccgcggcggtacatggacaccgacttcgctaccttcctcgcctacctcgcatccgcggacggcaagaacaagaccttcctccagtcaaggaagctgcctgctgctgctcctccatgcctctag

SEQ ID NO: 25179 - protein, 403 aa, Zea mays
MSLVAAPMAIVDVANAQLQQAAAAAAKKDEDGHEQQESSYDYGALMKGVRHLSDSGITRLPDRYVLPASDRPGVLAVSSSVAGSGRVKLPVVNLAGLRDPCQRAAVLATLDAACREYGFFQVVNHGFGSDVCGGMLDVARRFFELPLAERARHMSADVRAPVRYGTSFNQAKDAVLCWRDFLKLVCQPLQAVLPYWPQQPADLRDVATRYATASHRLFMEVMEAALEALGIPTAGGVLGELAASSSHMMTVNCYPACPQPELTLGMPSHSDYGLFTFVLQDHVEGLQVMHDGRWLTIDPIPGSFVVNVGDHLEIYSNGRYKSALHRVHVNSTRPRISVASFHSLPAERVIGPAPELVDDEAGNPRRYMDTDFATFLAYLASADGKNKTFLQSRKLPAAAPPCL

SEQ ID NO: 25180 - DNA, 1050 bp, Zea mays
  CDS (1)..(1050)
atgggcggcctcactatggaccaggctttcgtgcaggcccccgagcaccgccccaagcccctcgtcaccgaggccaccggcatccctctcatcgacctctcgcctctgtccgccagcggcggcgccgtggacgcgctggccgccgaggtgggcgcggcgagccgggactggggcttcttcgtggtcgtgggccacggcgtgcccgcagagaccatggcgcgcgcgacggaggcgcagcgcgcgttcttcgcgctgccggcagagcggaaggccgccgtgcggaggaacgaggcggagccgctcgggtactacgagtcggagcacaccaagaacgtgagggactggaaggaggtgtacgacctcgtgccgcgcgagccgccgccgccggctgccgtggccgacggcgagctcgtgttcgagaacaagtggccccaggatctgccgggcttcagagaggcgctggaggagtacgcgaaagcgatggaagagctggcgttcaagctgctggagctgatcgcccggagcctgaagctgaggcccgaccggctgcacggcttcttcaaggaccagacgaccttcatccggctgaaccactaccctccttgcccgagccccgacctggccctcggcgtggggcggcacaaggacgccggcgccctgaccatcctgtaccaggacgacgtcggggggctcgacgtccggcggcgctccgacggcgagtgggtccgcgtcaggcccgtgcccgactcgttcatcatcaacgtcggcgacctcatccaggtgtggagcaacgacaggtacgagagcgcggagcaccgggtgtcggtgaactcggcgagggagaggttctccatgccctacttcttcaacccggcgacctacaccatggtggagccggtggaggagctggtgagcaaggacgatccgcccaggtacgacgcctacaactggggcgacttcttcagcaccaggaagaacagcaacttcaagaagctcaacgtggagaacattcagatcgcgcatttcaagaagagcctcgtcctcgcctaa

SEQ ID NO: 25181 - protein, 349 aa, Zea mays
MGGLTMDQAFVQAPEHRPKPLVTEATGIPLIDLSPLSASGGAVDALAAEVGAASRDWGFFVVVGHGVPAETMARATEAQRAFFALPAERKAAVRRNEAEPLGYYESEHTKNVRDWKEVYDLVPREPPPPAAVADGELVFENKWPQDLPGFREALEEYAKAMEELAFKLLELIARSLKLRPDRLHGFFKDQTTFIRLNHYPPCPSPDLALGVGRHKDAGALTILYQDDVGGLDVRRRSDGEWVRVRPVPDSFIINVGDLIQVWSNDRYESAEHRVSVNSARERFSMPYFFNPATYTMVEPVEELVSKDDPPRYDAYNWGDFFSTRKNSNFKKLNVENIQIAHFKKSLVLA

SEQ ID NO: 25182 - DNA, 1071 bp, Zea mays
  CDS (1)..(1071)
atggcgcacgcgaaagccggagcgtctctgccggtgcccaacgtgcaggcactagctcagacttggcatggatcaggcgagccggtgcctttccggtacgtcaggacagaagagatcgtcgccggcgaagtcgtcgccggctgcgccatcccggtcgtggatctcagcaggttgcttgacccgcggtcgtccgaagaggagctcgcaaacctcggctctgcctgtcagcactggggtttctttcagcttatcaaccatggggtgccggacgaggtgatccaggacacgaagaaagacatggtggagttcttcaagctccctgtggaagccaagaaggtgcacgcgcaggtaccgggcggcatcgagggctacggccaggccttcgtcttctccgagacccagaagctggattgggcggacatgatctacctcatgattagccccaaggagtcgcgggacctgaggttctggcccacccggcctccctccttcagggactctatcgaaaggtactcggccgagacggcgaaggtgacggcgtgcctgctgcggttcatggccaaggacttgggcgtggagccggagcgcctcctggaggagttccggggattgccgcagagcatgcggacgacctactacccgccgtgcaggctggccgccgatgtgcttggcctgtcgccgcacaccgacgccaccggcctgacgctgctgctccacgtcaacgacgtgcagggcctgcagatcaggagggacggcaagtggctcgccgttgaccctctggacggtgctttagtcgtcagcatcggcgacatactggagattctaagcaatgggaggtacagaagcattgagcacagagccattgtacacccggacaaagaacgcatctcggcggcgatgttccatcagacatgccccaacacgacggtcggccctctgcaggagctcgtggaaagagacagtggcggggcacggtacagatccatggactacatggatttcatgaagggcttcttcgcggccaagctcgatgggcgaaggagccacatggacgctttgaggatatactag

SEQ ID NO: 25183 - protein, 356 aa, Zea mays
MAHAKAGASLPVPNVQALAQTWHGSGEPVPFRYVRTEEIVAGEVVAGCAIPVVDLSRLLDPRSSEEELANLGSACQHWGFFQLINHGVPDEVIQDTKKDMVEFFKLPVEAKKVHAQVPGGIEGYGQAFVFSETQKLDWADMIYLMISPKESRDLRFWPTRPPSFRDSIERYSAETAKVTACLLRFMAKDLGVEPERLLEEFRGLPQSMRTTYYPPCRLAADVLGLSPHTDATGLTLLLHVNDVQGLQIRRDGKWLAVDPLDGALVVSIGDILEILSNGRYRSIEHRAIVHPDKERISAAMFHQTCPNTTVGPLQELVERDSGGARYRSMDYMDFMKGFFAAKLDGRRSHMDALRIY

SEQ ID NO: 25184 - DNA, 1131 bp, Zea mays
  CDS (1)..(1131)
atggcaataagctgcttcagcggcggcgccggctggccggagcccgtggtgcgcgtccaggctgtgtcggacacgtgcggcgacacgatccccgagcggtacgtgaagcccctgtcggagcggccccggctctcaccggcctccgatggcggcggcccgaatatcccagtcgtagacctgtcaatgctagacgtggacgcgacatccagcgccgtggcggcggcgtgccgggagtggggctttttccaggcagtgaaccacggcgtccgcccggagctgctgcgcggcgcgcgcgcggcgtggcgtggcttcttccggcagcctgcggaggtgcgcgagcgttacgcgaactcgccggcgacgtacgagggctacggcagccgcctcggcacagccaagggcggcccgctggactggggcgactactacttcctccacctgctgccggcttccctcaagagccacgagaagtggccttccctgccttcctccctacggggggcaacggaggagtacggcgaggaagtgttgcagctgtgccggagggtgatgcggctgctctccagcgggctggggctggaagccgggagactgcaggcggcgttcggcggagagggcggcgaaggggcgtgcttgcgggtcaacttctacccgcagtgcccgcagccagagctgacgctgggcgtagcggggcactccgaccccggcggcatgaccatgctgctggtggacgaccacgtcaagggcctgcaggtaaggagccccgacggccagtggatcgtcgtcgaacccgtccccgacgccttcatcgtcaacgtcggcgaccagatccaggtgctgagcaacgcggcatacaagagcgtggagcaccgggtgacggtaagcgcggcagaggaccggctgtctatggctttcttctacaacccgcgaagcgacctgcccatcgcgccgatggcggagctggtggggcccgaccgcccggcgctgtacccggagatgaccttcgacgagtaccgtgtttttatccggcaacgtggtttggccggcaaggcgcagcttgagtccctgcaggtcaaagccaccgccggcggaggaggctgtagcgctgcagctgcctcctccaccagctag

SEQ ID NO: 25185 - protein, 376 aa, Zea mays
MAISCFSGGAGWPEPVVRVQAVSDTCGDTIPERYVKPLSERPRLSPASDGGGPNIPVVDLSMLDVDATSSAVAAACREWGFFQAVNHGVRPELLRGARAAWRGFFRQPAEVRERYANSPATYEGYGSRLGTAKGGPLDWGDYYFLHLLPASLKSHEKWPSLPSSLRGATEEYGEEVLQLCRRVMRLLSSGLGLEAGRLQAAFGGEGGEGACLRVNFYPQCPQPELTLGVAGHSDPGGMTMLLVDDHVKGLQVRSPDGQWIVVEPVPDAFIVNVGDQIQVLSNAAYKSVEHRVTVSAAEDRLSMAFFYNPRSDLPIAPMAELVGPDRPALYPEMTFDEYRVFIRQRGLAGKAQLESLQVKATAGGGGCSAAAASSTS

SEQ ID NO: 25186 - DNA, 1116 bp, Zea mays
  CDS (1)..(1116)
atggctcccgtgagcatcagcgctgttccgttcctcccgacggcggcggagggggagacgaagctgcgcgcgtcgttcgtgcgcgaggaggacgagcgccccaaggtgccgcacgaccgcttcagcgacgaggtgccggtggtgtcgctcgagggcatcgacggcgcgcggcgggccgagatccgcgcgcgcgtggccgcggcctgcgaggactggggcatcttccaggtggtggaccacggcgtggacgccgcgctcgtggccgacatggcgcgcctcgcgcgcgacttcttcgcgctcccgcccgaggacaagctccgcttcgacatgtccggcgggaagaagggcggcttcatcgtctccagccacctccagggggaggcggtgcaggactggcgtgagatcgtgacctacttctcgtacccggtgaaggcccgcgactactcccggtggcctgacaagccggcggcgtggcgggcggtggtggagcggtacagcgagcagctgatggcgctggcgtgcaggctcctgggcgtgctctcggaggccatgggcctggacacggaggcgctggccagggcctgcgtggacatggaccagaaggtggtggtcaacttctacccgaggtgcccgcagccggacctcacgctggggctcaagcgccacaccgaccccggcaccatcacgctgctgctgcaggacctcgtcggcggcctccaggccacgcgcgacggcggccggacctggatcaccgtgcagcccgtggagggcgccttcgtcgtcaacctcggcgaccacggccacctcctgagcaacggcaggttcaagaacgcggaccaccaggcggtggtgaactcggagtgcagccgcctgtccatcgccacgttccagaacccggcgcccgacgcgacggtgtacccgctggccgtgcgcgacggggaggcgcccatactggaccatcccatcaccttcgccgagatgtaccgccgcaagatggcccgcgacatcgagctcgccaggctcaagaagcaggccaaggccgacaagaagcagcagcagcagagtgccaacaaggagttcgccgactccaagcctctcgacgccattcttgcctga

SEQ ID NO: 25187 - protein, 371 aa, Zea mays
MAPVSISAVPFLPTAAEGETKLRASFVREEDERPKVPHDRFSDEVPVVSLEGIDGARRAEIRARVAAACEDWGIFQVVDHGVDAALVADMARLARDFFALPPEDKLRFDMSGGKKGGFIVSSHLQGEAVQDWREIVTYFSYPVKARDYSRWPDKPAAWRAVVERYSEQLMALACRLLGVLSEAMGLDTEALARACVDMDQKVVVNFYPRCPQPDLTLGLKRHTDPGTITLLLQDLVGGLQATRDGGRTWITVQPVEGAFVVNLGDHGHLLSNGRFKNADHQAVVNSECSRLSIATFQNPAPDATVYPLAVRDGEAPILDHPITFAEMYRRKMARDIELARLKKQAKADKKQQQQSANKEFADSKPLDAILA

SEQ ID NO: 25188 - DNA, 1035 bp, Zea mays
  CDS (1)..(1035)
atggagaatatgctccacctagccccgtcgtcccaggcccaggcattggccttggaccgctcctccgtcttctcgcgtgagcacgtgccgccggccgtctccgctgtcacctccctgccagttatcgacatgtctcgcagccgcgacgaggtccgccgcgctatcctcgacgccggaatggagttcggcttcttcctggtggtggagcacggcatcccagaggaggtgatgcgcgacatgctggaggtgtgcgaggagttcttccagctgccggcggcgagcaaggcgtacatgtactcggaggacagtcagaggcccaaccggatcttctccggcacaacctacgacacgggcggcgacaagtactggcgggactgcctccgcctcgcctgcccctcgtccttcccggtcggcacaagggacgactggccgcacacgccccagcggctgaggggtgtcgtcgagcgtttcaccgctctgacgagagggctgggggtggagctgctgcggctgctgtccgaggccatggggatccagcccgactacttcgagggcgacatcagcgccggcgacgtggtcctcaacgtcaaccactaccctccgtgccccagcccggagaagacgctcggcctgccgccacattgcgaccgcaacctcatcaccctcctcctccaaggctccgtctacggcctcgacgtcgcctacaggggagagtggataaaggtcgagcccatgcccggtgccttcgtcatcaacttcggccagcaactcgaggtggtgaccaacggattgctgaagagcgttgagcaccgcgtggtgaccagctcgacgctgacgcggacggcggtggccacattcatcatgcccaccccagactgcctcatcggcccgtcaaaggagttcctcgccggggacaagccaccgtgctaccgcaccatcaggttcggtgacttcatgcgcatgtacaacactgtcaagctggggtcatccatcaaccagactacagatcttaagaatgtccagaagaagatatga

SEQ ID NO: 25189 - protein, 344 aa, Zea mays
MENMLHLAPSSQAQALALDRSSVFSREHVPPAVSAVTSLPVIDMSRSRDEVRRAILDAGMEFGFFLVVEHGIPEEVMRDMLEVCEEFFQLPAASKAYMYSEDSQRPNRIFSGTTYDTGGDKYWRDCLRLACPSSFPVGTRDDWPHTPQRLRGVVERFTALTRGLGVELLRLLSEAMGIQPDYFEGDISAGDVVLNVNHYPPCPSPEKTLGLPPHCDRNLITLLLQGSVYGLDVAYRGEWIKVEPMPGAFVINFGQQLEVVTNGLLKSVEHRVVTSSTLTRTAVATFIMPTPDCLIGPSKEFLAGDKPPCYRTIRFGDFMRMYNTVKLGSSINQTTDLKNVQKKI

SEQ ID NO: 25190 - DNA, 1050 bp, Zea mays
  CDS (1)..(1050)
atgggcggcctcactatggaccaggccttcgtgcaggcccccgagcaccgccccaagcccatcgtcaccgaggccaccggcatccctctcatcgacctctcgcctctggccgccagcggcggcgccgtggacgcgctggccgccgaggtgggcgcggcgagccgggactggggcttcttcgtggtcgtgggccacggcgtgcccgcagagaccatggcgcgcgcgacggaggcgcagcgagcgttcttcgcgctgccggcagagcggaaggccgccgtgcggaggaacgaggcggagccgctcgggtactacgagtcggagcacaccaagaacgtgagggactggaaggaggtgtacgacctcgtgccgcgcgagccgccgccgccggcagccgtggccgacggcgagctcgtgttcgagaacaagtggccccaggatctgccgggcttcagagaggcgctggaggagtacgccaaagcgatggaagagctggcgttcaagctgctggagctgatcgcccggagcctgaagctgaggcccgaccggctgcacggcttcttcaaggaccagacgaccttcatccggctgaaccactaccctccttgcccgagccccgacctggccctcggcgtggggcggcacaaggacgccggcgccctgaccatcctgtaccaggacgacgtcggggggctcgacgtccggcggcgctccgacggcgagtgggtccgcgtcaggcccgtgcccgactcgttcatcatcaacgtcggcgacctcatccaggtgtggagcaacgacaggtacgagagcgcggagcaccgggtgtcggtgaactcggcgagggagaggttctccatgccctacttcttcaacccggcgacctacaccatggtggagccggtggaggagctggtgagcaaggacgatccgcccaggtacgacgcctacaactggggcgacttcttcagcaccaggaagaacagcaacttcaagaagctcaacgtggagaacattcagatcgcgcatttcaagaagagcctcgtcctcgcctaa

SEQ ID NO: 25191 - protein, 349 aa, Zea mays
MGGLTMDQAFVQAPEHRPKPIVTEATGIPLIDLSPLAASGGAVDALAAEVGAASRDWGFFVVVGHGVPAETMARATEAQRAFFALPAERKAAVRRNEAEPLGYYESEHTKNVRDWKEVYDLVPREPPPPAAVADGELVFENKWPQDLPGFREALEEYAKAMEELAFKLLELIARSLKLRPDRLHGFFKDQTTFIRLNHYPPCPSPDLALGVGRHKDAGALTILYQDDVGGLDVRRRSDGEWVRVRPVPDSFIINVGDLIQVWSNDRYESAEHRVSVNSARERFSMPYFFNPATYTMVEPVEELVSKDDPPRYDAYNWGDFFSTRKNSNFKKLNVENIQIAHFKKSLVLA

SEQ ID NO: 25192 - DNA, 1128 bp, Zea mays
  CDS (1)..(1128)
atggcggactgcatgcaggagtggccggagcccgtcgtccgcgtgcaggcgctcgccgagagcggcctgtccgtcatcccgagctgctacgtcaagccgccgtgcgaccgccccgccgtgtccccggcggcggcaacgacagtccaggagaccacggagccctcggacatgagcattccggtcgtcgatctcggcgcgctgctggcggcggacggcggcgccaccgtcaccgaggccgtcgccgccgcgtgccgggactggggcttcttccaggtggtcaaccacggggtgcgccccgagctgatgcgcgcggcgcgggaggcctggcgcggcttcttccgccgcccgcccgccgagaagcagcgctacgccaactcgccccgcacctacgagggctacggcagccgcctcggcgtccagaagggcgccgccctcgactggggcgactacttcttcctccacctcgcgccggaggcggccaagagcacgcccaagttctggccggcccagcccagcaactgcaaggaggtgtccgaggagtacggacgcgaggtggtgcggctgtgcgagctgctgatgcgggtgatgtcagtgagcctagggctggacgaggcgcacctccagcgggcgttcggcggggcggactgctgcggcgccaccctgcgcgccaactactacccgcggtgcccgcagccggacctgacgctgggcctctccgcgcactcggaccccggcgccctcaccgccctcctcgccgacgagcacgtccgcggcctgcaggtccgacgcagggccgccgacgactgggtcaacgtgcaccccgtccgcgacgccttcatcgtcaacgtcggcgaccaagtccagataatgagcaactccgtgtacaagagcgtggagcacagggtggtcgtgaacgccgaggaggagcgcatatccctcgccatcttctacaaccccaagggcgacgtccccatcgccccggcgccggagctggtcacggccgcgaagctgccaccgctctacccgacgatgaccttcgacgagtacaggctctacgtgaggagtaagggcgccaggggcaaggcgcagatcgaggctctcaagggccaggcatcaccagaaaattaa

SEQ ID NO: 25193 - protein, 375 aa, Zea mays
MADCMQEWPEPVVRVQALAESGLSVIPSCYVKPPCDRPAVSPAAATTVQETTEPSDMSIPVVDLGALLAADGGATVTEAVAAACRDWGFFQVVNHGVRPELMRAAREAWRGFFRRPPAEKQRYANSPRTYEGYGSRLGVQKGAALDWGDYFFLHLAPEAAKSTPKFWPAQPSNCKEVSEEYGREVVRLCELLMRVMSVSLGLDEAHLQRAFGGADCCGATLRANYYPRCPQPDLTLGLSAHSDPGALTALLADEHVRGLQVRRRAADDWVNVHPVRDAFIVNVGDQVQIMSNSVYKSVEHRVVVNAEEERISLAIFYNPKGDVPIAPAPELVTAAKLPPLYPTMTFDEYRLYVRSKGARGKAQIEALKGQASPEN

SEQ ID NO: 25194 - DNA, 1131 bp, Zea mays
  CDS (1)..(1131)
atggcaataagctgcttcaacggcggcgccggctggccggagcccgtggtgcgcgtccaggctgtgtcggacacgtgcggcgacacgatccccgagcggtacgtgaagcccctgtcggagcggccccggctctcaccggcctccgatggcagcggcccgaatatcccagtcgtagacctgtcaatgctagacgtggacgcgacatccagcgccgtggcggcggcgtgccgggagtggggctttttccaggcagtgaaccacggcgtccgcccggagctgctgcgcggcgcgcgcgcggcgtggcgtggcttcttccggcagcccgcggaggtgcgcgagcgttacgcgaactcgccggcgacgtacgagggctacggcagccgcctcggcacagccaagggcggcccgctggactggggcgactactacttcctccacctgctgccggcttccctcaagagccacgagaagtggccttccctgccttcctccctacggggggcaacggaggagtacggcgaggaagtgttgcagctgtgccggagggtgatgcggctgctctccagcgggctggggctggaagccgggagactgcaggcggcgttcggcggagagggcggcgaaggggcgtgcttgcgggtcaacttctacccgcagtgcccgcagccagagctgacgctgggcgtagcggggcactccgaccccggcggcatgaccatgctgctggtggacgaccacgtcaagggcctgcaggtaaggagccccgacggccagtggatcgtcgtcgaacccgtccccgacgccttcatcgtcaacgtcggcgaccagatccaggtgctgagcaacgcggcatacaagagcgtggagcaccgggtgacggtaagcgcggcagaggaccggctgtctatggctttcttctacaacccgcgaagcgacctgcccatcgcgccgatggcggagctggtggggcccgaccgcccggcgctgtacccggagatgaccttcgacgagtaccgcgttttcatccggcaacgtggtttggccggcaaggcgcagcttgagtccctgcaggtcaaagccgccgccggcggaggaggctgtagcgctgcagctgcctcctccaccagctag

SEQ ID NO: 25195 - protein, 376 aa, Zea mays
MAISCFNGGAGWPEPVVRVQAVSDTCGDTIPERYVKPLSERPRLSPASDGSGPNIPVVDLSMLDVDATSSAVAAACREWGFFQAVNHGVRPELLRGARAAWRGFFRQPAEVRERYANSPATYEGYGSRLGTAKGGPLDWGDYYFLHLLPASLKSHEKWPSLPSSLRGATEEYGEEVLQLCRRVMRLLSSGLGLEAGRLQAAFGGEGGEGACLRVNFYPQCPQPELTLGVAGHSDPGGMTMLLVDDHVKGLQVRSPDGQWIVVEPVPDAFIVNVGDQIQVLSNAAYKSVEHRVTVSAAEDRLSMAFFYNPRSDLPIAPMAELVGPDRPALYPEMTFDEYRVFIRQRGLAGKAQLESLQVKAAAGGGGCSAAAASSTS

SEQ ID NO: 25196 - DNA, 1170 bp, Zea mays
  CDS (1)..(1170)
atggatagtcttttccaatgcgataaaatcaaccgacatggcggcgatgctagactggaggcggaaccgcgcacgacaccaagctgccgcgccggactgctgcacgcaagcgcagcgcaggaccgaccgacctccgtaggcacgcacggcgccggcggcatggcggagcacctcctgtcgacggccgtgcacgacacgctgccggggagctacgtgcggccggagccggagcgcccgcgcctcgcggaggtcgtgaccggcgcgcgcatccccgtggtggacctgggcagccccgaccgcggcgcggtcgtggccgccgtcggcgacgcctgccgctcgcacggcttcttccaggtcgtcaaccacgggatacacgccgccctggtcgcggcggtgatggccgcggggcgcgtcttcttccggctgccccccgaggagaaggccaagctctactccgacgaccccgccaggaagatccggctgtccaccagcttcaacgtgcgcaaggagacggtgcacaactggcgcgactacctccgcctgcactgccatcccctcgacgagttcctgcccgattggccgtccaacccgcccgatttcaaggagaccatgggcacctactgcaaggaggtccgggagctcgggttcaggctgtacgccgcgatctcggagagcctgggcctagaggcgagctacatgaaggaggcgctgggcgagcaggagcagcacatggcggtcaacttctacccgccgtgcccggagccggagctcacctacggactcccggcgcacaccgaccccaacgcgctcaccatcctgctcatggacccggacgtcgccggcctgcaggtgctccacgccggccagtgggtcgccgtcaacccgcagcccggcgcgctcatcatcaacatcggcgaccagctgcaggcgctgagcaacgggcagtaccggagcgtgtggcaccgcgcggtggtgaactcggaccgggagcgcatgtccgtggcgtcgttcctgtgcccgtgcaaccacgtcgtgctcggccccgcgcggaagctcgtcaccgaggacaccccggccgtgtacaggaactacacgtacgacaagtactacgccaagttctggagcaggaacctggaccaggagcactgcctcgagctcttcagaacctag

SEQ ID NO: 25197 - protein, 389 aa, Zea mays
MDSLFQCDKINRHGGDARLEAEPRTTPSCRAGLLHASAAQDRPTSVGTHGAGGMAEHLLSTAVHDTLPGSYVRPEPERPRLAEVVTGARIPVVDLGSPDRGAVVAAVGDACRSHGFFQVVNHGIHAALVAAVMAAGRVFFRLPPEEKAKLYSDDPARKIRLSTSFNVRKETVHNWRDYLRLHCHPLDEFLPDWPSNPPDFKETMGTYCKEVRELGFRLYAAISESLGLEASYMKEALGEQEQHMAVNFYPPCPEPELTYGLPAHTDPNALTILLMDPDVAGLQVLHAGQWVAVNPQPGALIINIGDQLQALSNGQYRSVWHRAVVNSDRERMSVASFLCPCNHVVLGPARKLVTEDTPAVYRNYTYDKYYAKFWSRNLDQEHCLELFRT

SEQ ID NO: 25198 - DNA, 1038 bp, Zea mays
  CDS (1)..(1038)
atggaaaccgccgcgccggcgcgcgtccaagccctcgctgaggccggcgtgtcccgcctcccggcgcagtacatccagccgcctgagcacagaccaaccccctcgccttctcctattgccgcggcgctctccgtgccggtcgtcgacctctcaacctccaccgccgacgacgccgtccgcgccgcgtgcgcggactggggcgcctttcacgtggtcggccacggcgtgccgggggagctcctcgacgcggtgcgcgcggcagggctcgcgttcttccgcgcgcccatggaggacaagctccggttcgcctgcgacccggccaggggcgccgcctcggaagggtacggcagccgcatgctcgccaacgacgactccgtgctcgactggcgcgactactttgaccaccacacgctcccggagtcccgctgtgatcccgcccgctggcccgacttcgtccccggttacagagatactattgcaaaatacagccacagcatgaaggatcttgctaaaaaattgttgtgcatcatctcagaaaatctgagcctgccaccatcttatatacaagaggcggttggagaagttttccagaacattactattagctactattctccgtgtccacaacctgatcttgctcttgggttacaatctcattctgatatgggcgcaataacacttctgatacaagatgatgttggtgggcttgaagtattaaaggatggaatgtggatacctgtgcctgctttgcgtgatggcatccttgtgattctcgctgatcagacagagatcatcaccaatggaagatacaagagttcagttcatcgagctgttgtcaatgctgagcgtgcccgcttatcagtagcaacattttatgatccatcaaaatcaaggaaaatatgcactgccccgcagcttgtgagtgagaatgaaccacaaaagtatcgggatgtaatttatggtgactatgtctcatcttggtatagcaaaggtccagagggcaagcgaaacatcgacgccctcctgattcagcactag

SEQ ID NO: 25199 - protein, 345 aa, Zea mays
METAAPARVQALAEAGVSRLPAQYIQPPEHRPTPSPSPIAAALSVPVVDLSTSTADDAVRAACADWGAFHVVGHGVPGELLDAVRAAGLAFFRAPMEDKLRFACDPARGAASEGYGSRMLANDDSVLDWRDYFDHHTLPESRCDPARWPDFVPGYRDTIAKYSHSMKDLAKKLLCIISENLSLPPSYIQEAVGEVFQNITISYYSPCPQPDLALGLQSHSDMGAITLLIQDDVGGLEVLKDGMWIPVPALRDGILVILADQTEIITNGRYKSSVHRAVVNAERARLSVATFYDPSKSRKICTAPQLVSENEPQKYRDVIYGDYVSSWYSKGPEGKRNIDALLIQH

SEQ ID NO: 25200 - DNA, 882 bp, Zea mays
  CDS (1)..(882)
atggagattccagtgataaagatggatcagcttcatggcgagaagaggtcagagacgctttcactcctccacaatgcctgtgcgcaatggggtttcttttggcttgagaatcatggcgtcgatgaggacctcatgagtaaaatgaagggcttggtgaataaacactacgaacaagacatggagaagaacttctatagctcggagaatgcaaagatcctaggttgtgagaaagttccatcaaatgttgactgggagtgcagtttcatgtaccgtcatcagccagaatcaaacagccatgatattcctgagctgcttcgtgcaatggtatctgaatatgcagaagaggttatcaaactggctgaacagctcgcagcagccatgagtgaaaaccttgggctggacaagggctacatcgagaaggcgttttctaaaccttccgtaggcgtcaaggtggcaaagtatcccaggtgcagccatccagagcttgtgatgggtctcagggagcacactgacgctggggggatcgtacttctatttcaagacgaactgatcccaggtctggagtttctgaaagacggtaggtggatggcagtacctccaacacaaggcaacaggatccttgtaaaccttggagatcagattgaagtgataaccaatggaacctacaagagcatatgccaccgggtccttcccaacaagaacgggagccgcctatccatcgcaacattctataactctggtgccgacgccataatctgcccagcttcaaagctcacatatcctagccaatatcgtttccaagactaccttgatttctattctactaccaagtttactgataaggtgtttaggttccagactacaaaggcaatattgaagtga

SEQ ID NO: 25201 - protein, 293 aa, Zea mays
MEIPVIKMDQLHGEKRSETLSLLHNACAQWGFFWLENHGVDEDLMSKMKGLVNKHYEQDMEKNFYSSENAKILGCEKVPSNVDWECSFMYRHQPESNSHDIPELLRAMVSEYAEEVIKLAEQLAAAMSENLGLDKGYIEKAFSKPSVGVKVAKYPRCSHPELVMGLREHTDAGGIVLLFQDELIPGLEFLKDGRWMAVPPTQGNRILVNLGDQIEVITNGTYKSICHRVLPNKNGSRLSIATFYNSGADAIICPASKLTYPSQYRFQDYLDFYSTTKFTDKVFRFQTTKAILK

SEQ ID NO: 25202 - DNA, 1134 bp, Zea mays
  CDS (1)..(1134)
atggcaataagctgcttcagcggcggcgccggctggccggagcccgtggtgcgcgtccaggctgtgtcggacacgtgcggcgacacgatccccgagcggtacgtgaagcccctgtcggagcggccccggctctcaccggcctccgatggcggcggcccgaatatcccagtcgtagacctgtcaatgctagacgtggacgcgacatccagcgccgtggcggcggcgtgccgggagtggggctttttccaggcagtgaaccacggcgtccgcccggagctgctgcgcggcgcgcgcgcggcgtggcgtggcttcttccggcagcctgcggaggtgcgcgagcgttacgcgaactcgccggcgacgtacgagggctacggcagccgcctcggcacagccaagggcggcccgctggactggggcgactactacttcctccacctgctgccggcttccctcaagagccacgagaagtggccttccctgccttcctccctacggggggcaacggaggagtacggcgaggaagtgttgcagctgtgccggagggtgatgcggctgctctccagcgggctggggctggaagccgggagactgcaggcggcgttcggcggagacggcggcgaaggggcgtgcttgcgggtcaacttctacccgcagtgcccgcagccagagctgacgctgggcgtagcggggcactccgaccccggcggcatgaccatgctgctggtggacgaccacgtcaagggcctgcaggtaaggagccccgacggccagtggatcgtcgtcgaacccgtccccgacgccttcatcgtcaacgtcggcgaccagatccaggtgctgagcaacgcggcatacaagagcgtggagcaccgggtgacggtaagcgcggcagaggaccggctgtctatggctttcttctacaacccgcgaagcgacctgcccatcgcgccgatggcggagctggtggggcccgaccgcccggcgctgtacccggagatgaccttcgacgagtaccgcgttttcatccggcaacgtggtttggccggcaaggcgcagcttgagtccctgcaggtcaaagccgccgccggcggcggaggaggctgtagcgctgtagctgcctcctccaccagctag

SEQ ID NO: 25203 - protein, 377 aa, Zea mays
MAISCFSGGAGWPEPVVRVQAVSDTCGDTIPERYVKPLSERPRLSPASDGGGPNIPVVDLSMLDVDATSSAVAAACREWGFFQAVNHGVRPELLRGARAAWRGFFRQPAEVRERYANSPATYEGYGSRLGTAKGGPLDWGDYYFLHLLPASLKSHEKWPSLPSSLRGATEEYGEEVLQLCRRVMRLLSSGLGLEAGRLQAAFGGDGGEGACLRVNFYPQCPQPELTLGVAGHSDPGGMTMLLVDDHVKGLQVRSPDGQWIVVEPVPDAFIVNVGDQIQVLSNAAYKSVEHRVTVSAAEDRLSMAFFYNPRSDLPIAPMAELVGPDRPALYPEMTFDEYRVFIRQRGLAGKAQLESLQVKAAAGGGGGCSAVAASSTS

SEQ ID NO: 25204 - DNA, 1038 bp, Zea mays
  CDS (1)..(1038)
atggaaaccgccgcgccggcgcgcgtccaagccctcgctgaggccggcgtgtcccgcctcccggcgcagtacatccagccgcctgagcaccgaccaaccccctcgccttctcctattgccgcggcgctctccgtgccggtcgtcgacctctcaacctccaccgccgacgacgccgtccgcgccgcgtgcgcggactggggcgcctttcacgtggtcggccacggcgtgccggtggatctcctcgacgcggtgcgcgcggcagggctcgccttcttccgcgcgcccatggaggacaaactccggttcgcctgcgacccggccaggggcgccgcctcggaagggtacggcagccgcatgctcgccaacgacgactccgtgctcgactggcgcgactactttgaccaccacacgctcccggagtcccgctgtgatcccgcccgctggcccgacttcgtccccggttacagagatactattgcaaaatacagcaacagcatgaaggatcttgctcaaaaattgttgtgcatcatctcagaaaatctgagcctaccaccatcttatatacaagaggcggttggagaagttttccagaacattactattagctactattctccgtgtccacaacctgatcttgctcttggattacaatctcattctgatatgggcgcaataacacttctgatacaagatgatgttggtgggcttgaagtattaaaggatggaatgtggatacctgtgcctgctttgcgtgatggcatccttgtgattctcgctgatcagacagagatcatcaccaatggaagatacaagagttcagttcatcgagctgttgtcaatgctgagcatgcccgcttatcagtagcaacattttatgatccatcaaaatcaaggaaaatatgcactgccccgcagcttgtgagtgagaatgaaccacaaaagtatcgggatgtaatttatggtgactatgtctcatcttggtatagcaaaggtccagagggcaagcgaaacatcgacgccctcctgattcagcactag

SEQ ID NO: 25205 - protein, 345 aa, Zea mays
METAAPARVQALAEAGVSRLPAQYIQPPEHRPTPSPSPIAAALSVPVVDLSTSTADDAVRAACADWGAFHVVGHGVPVDLLDAVRAAGLAFFRAPMEDKLRFACDPARGAASEGYGSRMLANDDSVLDWRDYFDHHTLPESRCDPARWPDFVPGYRDTIAKYSNSMKDLAQKLLCIISENLSLPPSYIQEAVGEVFQNITISYYSPCPQPDLALGLQSHSDMGAITLLIQDDVGGLEVLKDGMWIPVPALRDGILVILADQTEIITNGRYKSSVHRAVVNAEHARLSVATFYDPSKSRKICTAPQLVSENEPQKYRDVIYGDYVSSWYSKGPEGKRNIDALLIQH

SEQ ID NO: 25206 - DNA, 1062 bp, Zea mays
  CDS (1)..(1062)
atggctgacgagtcatggagggtgccaaccccagtgcaagaactggccgcaggcgtggtggagccaccgacccagttcgtgctgcaggagcaggatcgtcctggatctgggaccctgctcttcgccactgacatgccggagcccattcccgtcgttgacctcagcaggctggcggctgccgacgaggcttccaagctccggtcagcactggagacctgggggctcttcctggttactaagcatgggatagaagcatctctcatggacgatgtgatggccgcgtcacgcgattttttctaccagccgctcgaagcgaagcaggaatacagtaacctgataggcggcaagcggttccagatggagggttatggtaatgacatggtgaaatccaaagatcagatactggactggcaagatcggctgcagctcagggtggaaccccaagatgagaggaacctcgcttattggcccaaacaccctgattctttcagggatcttctggagaagtatgcatcaaaaaccaagatagttaggaacaaagtcttacgggcgatgggcaaaacattggagcttggcgaagactatttcatcagccagattggtgacagggcctcagcaattgctaggttcaactactaccctccctgtccaaggcctgatcttgtctttggcattaagcctcactctgacggtggcgcggtgacgatacttctcgtcgacaaggatgttgggggccggcaagttcagaaagatggcgtttggtacactgttccgtccatgcctcacacgctgcttgtcaacttgggtgactccatggagataatgaacaatgggatcttcaaaagtccggtgcacagggttgtgacgaatgcagagaaagagagactctcactcgccatgttctacggcgtggaaggccagagagtgcttgagccagcgcttggtttgctgggtgaggagcgaccagcacggtacaggaaaattatggcctcagactacattattgggctccgtcaaggaattgcggaaggacagagatttatcgagactttgaagatatag

SEQ ID NO: 25207 - protein, 353 aa, Zea mays
MADESWRVPTPVQELAAGVVEPPTQFVLQEQDRPGSGTLLFATDMPEPIPVVDLSRLAAADEASKLRSALETWGLFLVTKHGIEASLMDDVMAASRDFFYQPLEAKQEYSNLIGGKRFQMEGYGNDMVKSKDQILDWQDRLQLRVEPQDERNLAYWPKHPDSFRDLLEKYASKTKIVRNKVLRAMGKTLELGEDYFISQIGDRASAIARFNYYPPCPRPDLVFGIKPHSDGGAVTILLVDKDVGGRQVQKDGVWYTVPSMPHTLLVNLGDSMEIMNNGIFKSPVHRVVTNAEKERLSLAMFYGVEGQRVLEPALGLLGEERPARYRKIMASDYIIGLRQGIAEGQRFIETLKI

SEQ ID NO: 25208 - DNA, 1131 bp, Zea mays
  CDS (1)..(1131)
atggcaataagctgcttcaacggcggcgccggctggccggagcccgtggtgcgcgtccaggctgtgtctgacacgtgcggcgacacgatccccgagcggtatgtgaagcccctgtcggagcggccccggctctcaccggcctccgatggcagcggcccgaatatcccagtcgtagacctgtcaatgctagacgtggacgcgacatccagcgccgtggcggcggcgtgccgggagtggggctttttccaggcagtgaaccacggcgtccgcccggagctgctgcgcggcgcgcgcgcggcgtggcgtggcttcttccggcagcccgcggaggtgcgcgagcgttacgcgaactcgccggcgacgtacgagggctacggcagccgcctcggcaccgccaagggcggcccgctggactggggcgactactacttcctccatctgctgccggcttccctcaagagccacgagaagtggccttccctgccttcctccctacggggggcaacggaggagtacggcgaggaagtgttgcagctgtgccggagggtgatgcggctgctctccagcgggctggggctggaagccgggagactgcaggcggcgttcggcggagagggcggcgaaggggcgtgcttgcgggtcaacttctacccgcagtgcccgcagccagagctgacgctgggcgtagcggggcactccgaccccggcggcatgaccatgctgctggtggacgaccacgtcaagggcctgcaggtaaggagccccgacggccagtggatcgtcgtcgaacccgtccccgacgccttcatcgtcaacgtcggcgaccagatccaggtgctgagcaacgcggcatacaagagcgtggagcaccgagtgacggtaagcgccacggaggaccggctgtctatggctttcttctacaacccgcgaagcgacctgcccatcgcgccgatggcggagctggtggggccaggccggccggcgctgtacccggagatgaccttcgatgagtaccgcgtcttcattcggcaacgcggtttggccggcaaggcgcaacttgagtccatgcaggtcaaagccaccgccggcggaggaggctgtagcgctgcagctgcctcctccaccagctag

SEQ ID NO: 25209 - protein, 376 aa, Zea mays
MAISCFNGGAGWPEPVVRVQAVSDTCGDTIPERYVKPLSERPRLSPASDGSGPNIPVVDLSMLDVDATSSAVAAACREWGFFQAVNHGVRPELLRGARAAWRGFFRQPAEVRERYANSPATYEGYGSRLGTAKGGPLDWGDYYFLHLLPASLKSHEKWPSLPSSLRGATEEYGEEVLQLCRRVMRLLSSGLGLEAGRLQAAFGGEGGEGACLRVNFYPQCPQPELTLGVAGHSDPGGMTMLLVDDHVKGLQVRSPDGQWIVVEPVPDAFIVNVGDQIQVLSNAAYKSVEHRVTVSATEDRLSMAFFYNPRSDLPIAPMAELVGPGRPALYPEMTFDEYRVFIRQRGLAGKAQLESMQVKATAGGGGCSAAAASSTS

SEQ ID NO: 25210 - DNA, 1125 bp, Zea mays
  CDS (1)..(1125)
atggcggactgcatgcaggagtggccggagcccgtcgtccgcgtgcaggcgctggccgagagcggcctgtccgtcatcccgcgctgctacgtcaagccgccgtgcgaccgccccgccgtgtccccggcggcggcaacgacagtccaggagaccacggagccctcggacatgagcattccggtcgtcgatctcggcgcgctgctggcggcggacggcggcgccgccgtcaccgaggccgtcgccgccgcgtgccgggagtggggcttcttccaggtggtcggccacggggtgcgccccgagctgttgcgcgcggcgcgggaggcctggcgcggcttcttccgccgcccgctcgcggagaggcagcgctacgccaactcgccccgcacgtacgagggctacggcagccgcctcggcgtccagaagggcgccgccctcgactggggcgactacttcttcctccacctcgcgccggaggcggccaagagcacgcccaagttctggccggccgtgcccggcaactgcaaggaggtgtccgaggagtacggacgcgaggtggtgcggctgtgcgagctgctgatgcgggtgatgtcagtgagcctagggctggacgaggcgcaccttcagcgggcgttcggcggggcgggctgctgcggcgccaccctgcgcgccaactactacccgcggtgcccgcagccggacctgacgctgggcctctccgcgcactcggacccgggcgtcctcaccgccctcctcgccgacgagcacgtccgcggcctgcaggtccgccgtagcgccggcgactgggtcgacgtgcgccccgtccgcgacgccttcatcgtcaacgtcggcgaccaagtccagataatgagcaactccgtgtacaagagcgtggagcaccgggtggtcgtgaacgccgaggaggagcgcatatccctcgccattttttacaaccccaagggcgacgtccccatctccccggcgccggagctggtcacggccgcgaagctgccaccgctctacccgacgatgaccttcgacgagtacaggctctacgtgaggagtaagggcgccaggggcaaggcgcagatcgaggctctcaagggccaggcatccccagaaaattaa

SEQ ID NO: 25211 - protein, 374 aa, Zea mays
MADCMQEWPEPVVRVQALAESGLSVIPRCYVKPPCDRPAVSPAAATTVQETTEPSDMSIPVVDLGALLAADGGAAVTEAVAAACREWGFFQVVGHGVRPELLRAAREAWRGFFRRPLAERQRYANSPRTYEGYGSRLGVQKGAALDWGDYFFLHLAPEAAKSTPKFWPAVPGNCKEVSEEYGREVVRLCELLMRVMSVSLGLDEAHLQRAFGGAGCCGATLRANYYPRCPQPDLTLGLSAHSDPGVLTALLADEHVRGLQVRRSAGDWVDVRPVRDAFIVNVGDQVQIMSNSVYKSVEHRVVVNAEEERISLAIFYNPKGDVPISPAPELVTAAKLPPLYPTMTFDEYRLYVRSKGARGKAQIEALKGQASPEN

SEQ ID NO: 25212 - DNA, 1074 bp, Zea mays
  CDS (1)..(1074)
atggaaagtgcaggaggggaagctcggccggtgctgccgccgccgccgccgccggtgcaagagctcgccggcgcagcgaacgacgtgccagctcggtacgtcgcgcgcgcaggcaacgagcccaaggtcacggtaaccgcgccggtcccggtcatcgacctcgcccggctgtgccagccgggcggcggcgccgacgaggcctcgaagctccggctggcgctcgagtcctggggtctcttcctggtgaccaaccacggcatcgaggccactctcatggacgccatgatggacgcgtcgagggagttcttcaggcagccgctccaggagaagcagaagcacagcaacatgatcgacggcaagcacttccagctccaagggtacgggaacgaccgggtggcgtcggaggaccaggtcctggactggtgcgaccgcctttacctcttggtggagcctcaggaggacaggagccttgacctatggcccgcatgtctaagggacgttctgcacgatttcaccacagagtgcacgagagtgaaggactgcctgcttcgagaaatggcgaaggcgctagatgagctcggcgacgacgacgactacttcatcgaccagttcggcgacagggccgacacccatgccaggttcagctactaccctccgtgcgcgcggccggacctcgtcttcggcctgaggcctcactccgacggcacgttcctctcgcttctcatgctagacgacagcgtcggcgggcttcaggttttccgggacggagcctggtacgacgtgcgcaccagacctcacaccctgctcgtcaatctaggagaccaaatagagataataagcaatgggatcttcaagagcccagtgcaccgggttgtaacaaacgcggagaaagagaggctatcagtggttctgttctattctatagatcctgagagagaaatccggcccgctgacaaactgatagacgagaaccatccagcactatacaagaaggtgaaagtcaaagaatatactgctggactctacgaacatttctctcgagggaaattggttaaagagactgcaaagatatag

SEQ ID NO: 25213 - protein, 357 aa, Zea mays
MESAGGEARPVLPPPPPPVQELAGAANDVPARYVARAGNEPKVTVTAPVPVIDLARLCQPGGGADEASKLRLALESWGLFLVTNHGIEATLMDAMMDASREFFRQPLQEKQKHSNMIDGKHFQLQGYGNDRVASEDQVLDWCDRLYLLVEPQEDRSLDLWPACLRDVLHDFTTECTRVKDCLLREMAKALDELGDDDDYFIDQFGDRADTHARFSYYPPCARPDLVFGLRPHSDGTFLSLLMLDDSVGGLQVFRDGAWYDVRTRPHTLLVNLGDQIEIISNGIFKSPVHRVVTNAEKERLSVVLFYSIDPEREIRPADKLIDENHPALYKKVKVKEYTAGLYEHFSRGKLVKETAKI

SEQ ID NO: 25214 - DNA, 981 bp, Zea mays
  CDS (1)..(981)
atggcgcctgcattgtcattcccgatcatcgacatggggctgctcgccggggaggagaggccggcggcgatggagctgctgcaagatgcgtgcgagaactggggcttcttcgagattctgaaccacggcatctcgacggagctgatggacgaggtagagaagctgaccaaggagcactacaagcgggtgcgcgagcagaggttcctcgagttcgccagcaagacgctcggggacggccgcgacattgcgcagggcgtgaaggcggacaacctggactgggagagcaccttcttcgtccgccacctcccggagcccaacatcgccgagataccggacctggacgacgagtaccggcgcgtcatgaagcggttcgccggcgagctggaggcgctggcggagcggctgctggacctgctgtgcgagaacctcggcctcgacaggggctacctggcgcgcgcgttccgcgggcccagcaagggcgccccgacgttcggcaccaaggtcagcagctacccgccgtgcccgcgcccggacctcgtcagcggcctgcgcgcgcacaccgacgccggcggcataatcctgctgttccaggacgaccgggtgggcggcctccagctgctcaaggacggcgagtgggtggacgtgccgcccatgcgccacgccgtcgtcgtcaacctgggcgaccagctggaggtgatcaccaacggcaggtacaagagcgtcatgcaccgggtggtggcgcagcccagcgggaacaggatgtccatcgcgtccttctacaacccgggcagcgacgcggtcatcttccccgcgccggcgctggtcaaggccgaggaggcggccgcgggggtgtaccccagcttcgtcttcgaggactacatgaagctgtacgtgcggcacaagttcgaggccaaggagccacggttcgaggccttcaagtccatggagacggacagctccaatcgcatagccatcgcgtga

SEQ ID NO: 25215 - protein, 326 aa, Zea mays
MAPALSFPIIDMGLLAGEERPAAMELLQDACENWGFFEILNHGISTELMDEVEKLTKEHYKRVREQRFLEFASKTLGDGRDIAQGVKADNLDWESTFFVRHLPEPNIAEIPDLDDEYRRVMKRFAGELEALAERLLDLLCENLGLDRGYLARAFRGPSKGAPTFGTKVSSYPPCPRPDLVSGLRAHTDAGGIILLFQDDRVGGLQLLKDGEWVDVPPMRHAVVVNLGDQLEVITNGRYKSVMHRVVAQPSGNRMSIASFYNPGSDAVIFPAPALVKAEEAAAGVYPSFVFEDYMKLYVRHKFEAKEPRFEAFKSMETDSSNRIAIA

SEQ ID NO: 25216 - DNA, 1011 bp, Zea mays
  CDS (1)..(1011)
atggcggagcacctcctgtcgacggccgtgcacgacacgctgccggggagctacgtgcggccggagccggagcgcccgcgcctcgcggaggtcgtgaccggcgcgcgcatccccgtggtggacctgggcagccccgaccgcggcgcggtcgtggccgccgtcggcgacgcctgccgctcgcacggcttcttccaggtcgtcaaccacgggatacacgccgccctggtcgcggcggtgatggccgcggggcgcgtcttcttccggctgccccccgaggagaaggccaagctctactccgacgaccccgccaggaagatccggctgtccaccagcttcaacgtgcgcaaggagacggtgcacaactggcgcgactacctccgcctgcactgccatcccctcgacgagttcctgcccgattggccgtccaacccgcccgatttcaaggagaccatgggcacctactgcaaggaggtccgggagctcgggttcaggctgtacgccgcgatctcggagagcctgggcctagaggcgagctacatgaaggaggcgctgggcgagcaggagcagcacatggcggtcaacttctacccgccgtgcccggagccggagctcacctacggactcccggcgcacaccgaccccaacgcgctcaccatcctgctcatggacccggacgtcgccggcctgcaggtgctccacgccggccagtgggtcgccgtcaacccgcagcccggcgcgctcatcatcaacatcggcgaccagctgcaggcgctgagcaacgggcagtaccggagcgtgtggcaccgcgcggtggtgaactcggaccgggagcgcatgtccgtggcgtcgttcctgtgcccgtgcaaccacgtcgtgctcggccccgcgcggaagctcgtcaccgaggacaccccggccgtgtacaggaactacacgtacgacgagtactacgccaagttctggagcaggaacctggaccaggagcactgcctcgagctcttcagaacctag

SEQ ID NO: 25217 - protein, 336 aa, Zea mays
MAEHLLSTAVHDTLPGSYVRPEPERPRLAEVVTGARIPVVDLGSPDRGAVVAAVGDACRSHGFFQVVNHGIHAALVAAVMAAGRVFFRLPPEEKAKLYSDDPARKIRLSTSFNVRKETVHNWRDYLRLHCHPLDEFLPDWPSNPPDFKETMGTYCKEVRELGFRLYAAISESLGLEASYMKEALGEQEQHMAVNFYPPCPEPELTYGLPAHTDPNALTILLMDPDVAGLQVLHAGQWVAVNPQPGALIINIGDQLQALSNGQYRSVWHRAVVNSDRERMSVASFLCPCNHVVLGPARKLVTEDTPAVYRNYTYDEYYAKFWSRNLDQEHCLELFRT

SEQ ID NO: 25218 - DNA, 20 bp, Artificial sequence
  primer
atggcaacggaatgcattgc

SEQ ID NO: 25219 - DNA, 24 bp, Artificial sequence
  primer
ttagaaacttcttctgttcttaag

SEQ ID NO: 25220 - protein, 314 aa, Artificial sequence
  consensus sequence
  Variant (2)..(3): Xaa in position 2 to 3 is any amino acid
  Variant (5)..(13): Xaa in position 5 to 13 is any amino acid
  Variant (14)..(30): Xaa in position 14 to 30 is any or no amino acid
  Variant (32)..(35): Xaa in position 32 to 35 is any amino acid
  Variant (37)..(37): Xaa in position 37 is any amino acid
  Variant (39)..(41): Xaa in position 39 to 41 is any amino acid
  Variant (45)..(58): Xaa in position 45 to 58 is any amino acid
  Variant (59)..(59): Xaa in position 59 is any or no amino acid
  Variant (62)..(67): Xaa in position 62 to 67 is any amino acid
  Variant (68)..(68): Xaa in position 68 is any or no amino acid
  Variant (70)..(85): Xaa in position 70 to 85 is any amino acid
  Variant (86)..(102): Xaa in position 86 to 102 is any or no amino acid
  Variant (104)..(125): Xaa in position 104 to 125 is any amino acid
  Variant (126)..(148): Xaa in position 126 to 148 is any or no amino acid
  Variant (150)..(155): Xaa in position 150 to 155 is any amino acid
  Variant (157)..(167): Xaa in position 157 to 167 is any amino acid
  Variant (168)..(168): Xaa in position 168 is any or no amino acid
  Variant (171)..(188): Xaa in position 171 to 188 is any amino acid
  Variant (189)..(197): Xaa in position 189 to 197 is any or no amino acid
  Variant (199)..(199): Xaa in position 199 is any amino acid
  Variant (202)..(202): Xaa in position 202 is any amino acid
  Variant (204)..(205): Xaa in position 204 to 205 is any amino acid
  Variant (206)..(215): Xaa in position 206 to 215 is any or no amino acid
  Variant (217)..(218): Xaa in position 217 to 218 is any amino acid
  Variant (219)..(220): Xaa in position 219 to 220 is any or no amino acid
  Variant (222)..(224): Xaa in position 222 to 224 is any amino acid
  Variant (226)..(226): Xaa in position 226 is any amino acid
  Variant (228)..(231): Xaa in position 228 to 231 is any amino acid
  Variant (233)..(233): Xaa in position 233 is any amino acid
  Variant (235)..(237): Xaa in position 235 to 237 is any amino acid
  Variant (238)..(240): Xaa in position 238 to 240 is any or no amino acid
  Variant (242)..(242): Xaa in position 242 is any amino acid
  Variant (246)..(251): Xaa in position 246 to 251 is any amino acid
  Variant (252)..(260): Xaa in position 252 to 260 is any or no amino acid
  Variant (262)..(273): Xaa in position 262 to 273 is any amino acid
  Variant (274)..(275): Xaa in position 274 to 275 is any or no amino acid
  Variant (277)..(277): Xaa in position 277 is any amino acid
  Variant (280)..(285): Xaa in position 280 to 285 is any amino acid
  Variant (287)..(290): Xaa in position 287 to 290 is any amino acid
  Variant (292)..(293): Xaa in position 292 to 293 is any amino acid
  Variant (296)..(298): Xaa in position 296 to 298 is any amino acid
  Variant (300)..(303): Xaa in position 300 to 303 is any amino acid
  Variant (304)..(304): Xaa in position 304 is any or no amino acid
  Variant (306)..(306): Xaa in position 306 is any amino acid
  Variant (308)..(310): Xaa in position 308 to 310 is any amino acid
  Variant (312)..(313): Xaa in position 312 to 313 is any amino acid
PXXDXXXXXXXXXXXXXXXXXXXXXXXXXXAXXXXGXFXXXNHGXXXXXXXXXXXXXXXFFXXXXXXXKXXXXXXXXXXXXXXXXXXXXXXXXXXXXXXXXXWXXXXXXXXXXXXXXXXXXXXXXXXXXXXXXXXXXXXXXXXXXXXXYXXXXXXLXXXXXXXXXXXXLGXXXXXXXXXXXXXXXXXXXXXXXXXXXNXYPXCXXXXXXXXXXXXPXXXXGXXXHXDXXXXTXLXXXXXXVXGLQXXXXXXXXXXXXXXXWXXXXXXXXXXXXXXNXGDXXXXXXNXXXXSXXHRXXXNXXXXXRXSXXXFXXP

SEQ ID NO: 25221 - protein, 26 aa, Artificial sequence
  protein pattern
  Variant (2)..(2): Xaa in position 2 is any amino acid
  Variant (3)..(7): Xaa in position 3 to 7 is any or no amino acid
  Variant (10)..(10): Xaa in position 10 is any amino acid
  Variant (11)..(11): Xaa in position 11 is Phe, Ile, Leu, Met or Val
  Variant (12)..(12): Xaa in position 12 is any amino acid
  Variant (13)..(13): Xaa in position 13 is Ala, Ile, Leu or Val
  Variant (14)..(14): Xaa in position 14 is any amino acid
  Variant (15)..(15): Xaa in position 15 is Ser or Thr
  Variant (17)..(17): Xaa in position 17 is Ala, Asp, Glu, Gly or Ser
  Variant (18)..(18): Xaa in position 18 is any amino acid
  Variant (19)..(19): Xaa in position 19 is Phe, His or Tyr
  Variant (20)..(20): Xaa in position 20 is any amino acid
  Variant (22)..(23): Xaa in position 22 to 23 is any amino acid
  Variant (26)..(26): Xaa in position 26 is Ala, Gly, Ser, Thr or Val
NXXXXXXGDXXXXXXNXXXXSXXHRX

SEQ ID NO: 25222 - DNA, 1512 bp, Arabidopsis thaliana
  CDS (1)..(1512)
atggaaacactagaaactgagaaattcttctcagacgataaacctctcctaaaaccaatttcagatcattctgagatcaagacaaaagcaagaagaaacgctgtcgtctcagttctaattcagcccttccaatggttacaaatgctgagttctaggctaaacctgagcttcgtgctaggtgtggtccttgtgtacggtgtaaaccaagggttctctggttcgatattcaaagtcgtcacagactattactggaaagatgtccagcaagtgcagccatcggttgtgcagctttacatggggttatattacattccatgggtcatgagacccatttggggtctcttcaccgatgtgttccctatcaaaggttacaaaagaaagccgtattttgtagtttctggtgttcttggtttggtatctgcgattgctattgttgttcttggtaagttgcccgctgctttggctttgagctgcctcttaggtgtctctgcagctatggccattgcagatgtggtgattgatgcgtgtatagcaacaaacagcatcaatatccgatctttggctcctgatatacagagcctttgtatggtttgttcatctgctggcgctttggttggatacgcaactagtggagtcttcgttcaccagcttggacctcagggagcattaggggtattagcattttcgcctgcaactatcgtcatacttgggtttttcatctacgagaaaagatcttctactgttcctacacaaaagaccaaaaaggacacagatggcttaggagtagcggtgaagggaatgtgcaaaacagtaaagtaccctgaagtgtggaagccatctctttacatgttcatatccttagctctcaacatcagcactcatgaaggccacttctactggtacactgatcctacagctgggcccgccttttcccaggagtttgtgggaataatctatgcagtcggggcattggcatctatgtttggagttctcatatatcacaagaagctcaaaggctattcctttaggaacatactcttctttgcacaacttctatacgtcttctcaggaatgcttgatctagtcttcatcaaacgctggaacttaactctcgggataccagattccttgtttgtgataaccgaagaatctttcacgaagatgataagtaagatcaggtggatccccatggtggttctcagtacaaggctttgtcctctgggaatcgaaggcaccttctttgctttcctcatgtgcattgatagttttggacagcttgcttctaaatggggtggagggtttgttcttcacgcttttggtgtcacgagacacgatttcggaaatctctggctcgtgattctgataaggaatattttgagactcgtcactgtgtgtttcgttttcctcgttccagattccgatcatttggatgatcttgtaccttctgatgtgttgccaaagaaacaatcagaagatgatgatgatgacgacattaaacttttgcttctgtaa

SEQ ID NO: 25223 - protein, 503 aa, Arabidopsis thaliana
METLETEKFFSDDKPLLKPISDHSEIKTKARRNAVVSVLIQPFQWLQMLSSRLNLSFVLGVVLVYGVNQGFSGSIFKVVTDYYWKDVQQVQPSVVQLYMGLYYIPWVMRPIWGLFTDVFPIKGYKRKPYFVVSGVLGLVSAIAIVVLGKLPAALALSCLLGVSAAMAIADVVIDACIATNSINIRSLAPDIQSLCMVCSSAGALVGYATSGVFVHQLGPQGALGVLAFSPATIVILGFFIYEKRSSTVPTQKTKKDTDGLGVAVKGMCKTVKYPEVWKPSLYMFISLALNISTHEGHFYWYTDPTAGPAFSQEFVGIIYAVGALASMFGVLIYHKKLKGYSFRNILFFAQLLYVFSGMLDLVFIKRWNLTLGIPDSLFVITEESFTKMISKIRWIPMVVLSTRLCPLGIEGTFFAFLMCIDSFGQLASKWGGGFVLHAFGVTRHDFGNLWLVILIRNILRLVTVCFVFLVPDSDHLDDLVPSDVLPKKQSEDDDDDDIKLLLL

SEQ ID NO: 25224 - DNA, 1904 bp, Oryza sativa
  CDS (123)..(1637)
caaatgccgacctcgcttccggtgctcgagctcatcggcgaggcgtccgcacgtgcgccaagaacccctcatgagcaggtgaggtgatccttcaagaaaccagcaaaagaaatccaaggtcaatgccggaagaacaacaagaagcggaagaggggatcgccggcggcggcggcggatgggcgagcacggcgctgcagccggtgcggtggctgcggatgctgtgccgggagctgggcgcgacgttcgtcgccggcgtggtgctggtgtacgggctgagccaggggttcgccgggtccttcttccgcgtggcgtcggactactactggaaggacgtgcagcgggtgcagccggccaccgtgcagctcctctccgccgtcttcttcatcccctgggtcctcaagcccctctgggggatcatgaccgacgtcttccccgtccgcggctaccgccgccgcccctacttcctcttcgcaggagtacttggaacggcttcagctgctattgttaccatggttaatggactaccgatgacttccgctatactttcctttgtggggatatcaacagcagttgccatagcagatgttacaatagatgcatgcattgcgaagaatggtattgataagccatcattagtcccagacatgcaaagcctttgtgcattctcatcatctctaggtgcacttattgggtatgctacaagtggaatgtttgtccaccatcttggggcacagggtgcattaggtgtgatggctttacctcctgcaacgttggtttttctaggatttttcatatatgagctgaaaatgtatcagcataatgtgaaagagaaggttttgaataaggttcatatggcagtgaaagggatggctcagacaataaagtacccagtagtgtggaagccatccctgtacatgtctctttccctggcgcttagtatcagcactcatgagggacagttctactggtatactagcaaggaaccacctaatcctggattttctcaggaatttgttggtatggtccatgccatcggcgcagttgcatccatggtgggcgtcctggtgtaccacaagtacctcaaggactaccctttccggagcatcctcttctacgcgcagctgctgtacggcgtctccggcctcctcgacctcaccttcgtgctccggtggaacctcctcctcggcgtgcccgacgccgccttcgtcaccctggaggagtgctgcgcccgcgtcgtcggccgcgtcaggctgatgccgatgatggtgctcagcaccaagctgtgcccgccgggcgccgagggcaccttcttcgcgctgctcatgtgcatcgacagcgccggcatgctggcggccaaggccggcggcgccgccgtgctgcgcgcgctccgggtgaccaggaccgacttcgcccgcctctggctcgccgtcctcgtcaggaacctgctccggctgtccacgctcgccgccatctcgctcgtccccacggccgaccagaccgacgtgctcctgccgcgcgacctcctcgccgtcgccggcgacggctctcctcccgccgccggcgacggcgacgacgaggagaggctgcagctcgcgaaattcgctgatcacgtcgacgacgacgacgacgacgactgaacatagttgatcatacgacattgttgcagcgcgttcttgcatgcatcctgtcactgtcaggtgaggatgcagctatagtagctctgatcaatcgatcagatagattcgttgattcgttcatggcgagcgcatgcatgtctctgatgagacgttgccaggtgacagaaatggcatctctctctgtacgggcaacccggagtggaaagatgagctgggatgtacggattctgttttctgttcagtttggttagcataggaggattctac

SEQ ID NO: 25225 - protein, 504 aa, Oryza sativa
MPEEQQEAEEGIAGGGGGWASTALQPVRWLRMLCRELGATFVAGVVLVYGLSQGFAGSFFRVASDYYWKDVQRVQPATVQLLSAVFFIPWVLKPLWGIMTDVFPVRGYRRRPYFLFAGVLGTASAAIVTMVNGLPMTSAILSFVGISTAVAIADVTIDACIAKNGIDKPSLVPDMQSLCAFSSSLGALIGYATSGMFVHHLGAQGALGVMALPPATLVFLGFFIYELKMYQHNVKEKVLNKVHMAVKGMAQTIKYPVVWKPSLYMSLSLALSISTHEGQFYWYTSKEPPNPGFSQEFVGMVHAIGAVASMVGVLVYHKYLKDYPFRSILFYAQLLYGVSGLLDLTFVLRWNLLLGVPDAAFVTLEECCARVVGRVRLMPMMVLSTKLCPPGAEGTFFALLMCIDSAGMLAAKAGGAAVLRALRVTRTDFARLWLAVLVRNLLRLSTLAAISLVPTADQTDVLLPRDLLAVAGDGSPPAAGDGDDEERLQLAKFADHVDDDDDDD

SEQ ID NO: 25226 - DNA, 1861 bp, Oryza sativa
  CDS (272)..(1861)
gcgcccacgcgtccgcccacgcgtccgcccacgcgtccgtttctgttcagtttggttagcataggaggattctacatcccagctcatctgtctctgtacgggcaacccggagtggaaagatgagctgggatgtacggattctgttttctgttcagtttggttagcataggaggattctacagagaaaaaaaaaaaagggagaatttgaaccatgccacacaaattttacaaaatttgtgatatgccaccctgacccacatgttattgactcatgtgggtcttatatgtcattgagatacgggtggtatatctcaaatttataaatatagggtggcatggttccaacatgccggaagaacaacaagaagcggaagaggggatcgccggcggcggcggcggatgggcgagcacggcgctgcagccggtgcggtggctgcggatgctgtgccgggagctgggcgcgacgttcgtcgccggcgtggtgctggtgtacgggctgagccaggggttcgccgggtccttcttccgcgtggcgtcggactactactggaaggacgtgcagcgggtgcagccggccaccgtgcagctcctctccgccgtcttcttcatcccctgggtcctcaagcccctctgggggatcatgaccgacgtcttccccgtccgcggctaccgccgccgcccctacttcctcttcgcaggagtacttggaacggcttcagctgctattgttaccatggttaatggactaccgatgacttccgctatactttcctttgtggggatatcaacagcagttgccatagcagatgttacaatagatgcatgcattgcgaagaatggtattgataagccatcattagtcccagacatgcaaagcctttgtgcattctcatcatctctaggtgcacttattgggtatgctacaagtggaatgtttgtccaccatcttggggcacagggtgcattaggtgtgatggctttacctcctgcaacgttggtttttctaggatttttcatatatgagctgaaaatgtatcagcataatgtgaaagagaaggttttgaataaggttcatatggcagtgaaagggatggctcagacaataaagtacccagtagtgtggaagccatccctgtacatgtttctttccctggcgcttagtatcagcactcatgagggacagttctactggtatactagcaaggaaccacctaatcctggattttctcaggaatttgttggtatggtccatgccatcggcgcagttgcatccatggtgggcgtcctggtgtaccacaagtacctcaaggactaccctttccggagcatcctcttctacgcgcagctgctgtacggcgtctccggcctcctcgacctcaccttcgtgctccggtggaacctcctcctcggcgtgcccgacgccgccttcgtcaccctggaggagtgctgcgcccgcgtcgtcggccgcgtcaggctgatgccgatgatggtgctcagcaccaagctgtgcccgccgggcgccgagggcaccttcttcgcgctgctcatgtgcatcgacagcgccggcatgctggcggccaaggccggcggcgccgccgtgctgcgcgcgctccgggtgaccaggaccgacttcgcccgcctctggctcgccgtcctcgtcaggaacctgctccggctgtccacgctcgccgccatctcgctcgtccccacggccgaccagaccgacgtgctcctgccgcgcgacctcctcgccgtcgccggcgacggctctcctcccgccgccggcgacggcgacgacgaggagaggctgcagctcgcgaaattcgctgatcacgtcgacgacgacgacgacgacgactga

SEQ ID NO: 25227 - protein, 529 aa, Oryza sativa
MWVLYVIEIRVVYLKFINIGWHGSNMPEEQQEAEEGIAGGGGGWASTALQPVRWLRMLCRELGATFVAGVVLVYGLSQGFAGSFFRVASDYYWKDVQRVQPATVQLLSAVFFIPWVLKPLWGIMTDVFPVRGYRRRPYFLFAGVLGTASAAIVTMVNGLPMTSAILSFVGISTAVAIADVTIDACIAKNGIDKPSLVPDMQSLCAFSSSLGALIGYATSGMFVHHLGAQGALGVMALPPATLVFLGFFIYELKMYQHNVKEKVLNKVHMAVKGMAQTIKYPVVWKPSLYMFLSLALSISTHEGQFYWYTSKEPPNPGFSQEFVGMVHAIGAVASMVGVLVYHKYLKDYPFRSILFYAQLLYGVSGLLDLTFVLRWNLLLGVPDAAFVTLEECCARVVGRVRLMPMMVLSTKLCPPGAEGTFFALLMCIDSAGMLAAKAGGAAVLRALRVTRTDFARLWLAVLVRNLLRLSTLAAISLVPTADQTDVLLPRDLLAVAGDGSPPAAGDGDDEERLQLAKFADHVDDDDDDD

SEQ ID NO: 25228 - DNA, 1869 bp, Oryza sativa (japonica cultivar-group)
  CDS (1)..(1869)
atgccctcacggctgcagcggcgaaggacggtcttgacgggaggcggcggctggtttgcggtgcagcgcggagggggggacagcgcccggctccgttgtgaaagggggcgcggcgaggaggaagacgagggccgcgggtggtcggtggggttagggccaattgacggcggagatgaggcgacttgggagagaggaacgaacaggagactgggagaggcggagagtaggaactggagcagctgctggaaaagccatcatgctcaagaaccccgtagtgaccttggccacgtagcttgtgttgccatcggggtaagccgagggggcaacatgatgttacgcaatcgaggtcgatgctgggttcctgagggtcgtaagcagctacgcagtaataacgcagtgcaaagagctcgccaacgccaagatgcgcctcgtcaatctctcccaccgagcaatcgcgagacctgcattctagccgtgcgaattccggcgggcttccgccgtagatccccaagaaacccccggcaagaaatcgctgcccagatggatcgccaagaggaggacgacgacgcggcgcttcgagaagccggcggcggcgcctccttccccggcggctggctccggcgtctgtcccgcgagctgcgctggagcttcgtgctcgccgtcgtggccgtctacggggcctgccagggcgtcggcgacgccgtcggcggcgtcacggcggggtactactggaaggacgtgcagcgcgtgcagccgtcggcggcgcagttctaccaggggttcggcctgctcaccgacgtcgtccccgtcgccggctaccgccgccgcccgtacttcctcctgccgctgggcatcatgccggcgatcttggcgctgacggcgcagagcgcgggcgcggcggtggccgacgtgacggtggacgcgctggttgctcagaacagcatcacgcaccagccgctagccgcagacatgcagagcctgtgtgggttcagctcctccgttggggcattgcttggattctccatcagcggtcttcttgtccactccatagggtctcagggtgctcttggattactaagcatcccttctgcactggtgttcttggctggtgttttgctgaaggagaggcgagttacagatttcgattacaagcaggaatttattggccttgtgtattcggtcggttcaatcggttcgctgctcggagttttactataccaaatttcactgaaggactaccctttccgcggcgtgctattctggggccaagttctttcaagcctggcaggaatgctcaatctgataatggtgacccggctcaacacaagaatcggcattccggattacgtctttgcggtgatcgacaacagtgtctcccagatggttgggaggctcaaatggttgccgctcctcgtgctttgctccaagctttgtcctccaggcatcgaaggaactttctatgcgctgctcatgtccatccaaaatgccgggttgctgatgtctggctggtggggtggcctgatgctgcacttgctgaatgtgactcgaacagagttcagtaacctctgggttgccgtcctgatcagaaacttgtcgaggctgctcccgctgatgctgctgtttcttgttccccagagtgaccaaaactcaatgctcctcccggcagagatgcttcaggacaatgaatctactgaagctaggaaaggaggtcaagacactgctgaattttccgtccttgtcgcagatgattctagctgtcatgctctgaatgtggctgtcgaagatgaaagaatcaaagtggtcgatgctggaacgggtactgtggagttgattcctctcatgaacgagctacaagaccgtgggagttga

SEQ ID NO: 25229 - protein, 622 aa, Oryza sativa (japonica cultivar-group)
MPSRLQRRRTVLTGGGGWFAVQRGGGDSARLRCERGRGEEEDEGRGWSVGLGPIDGGDEATWERGTNRRLGEAESRNWSSCWKSHHAQEPRSDLGHVACVAIGVSRGGNMMLRNRGRCWVPEGRKQLRSNNAVQRARQRQDAPRQSLPPSNRETCILAVRIPAGFRRRSPRNPRQEIAAQMDRQEEDDDAALREAGGGASFPGGWLRRLSRELRWSFVLAVVAVYGACQGVGDAVGGVTAGYYWKDVQRVQPSAAQFYQGFGLLTDVVPVAGYRRRPYFLLPLGIMPAILALTAQSAGAAVADVTVDALVAQNSITHQPLAADMQSLCGFSSSVGALLGFSISGLLVHSIGSQGALGLLSIPSALVFLAGVLLKERRVTDFDYKQEFIGLVYSVGSIGSLLGVLLYQISLKDYPFRGVLFWGQVLSSLAGMLNLIMVTRLNTRIGIPDYVFAVIDNSVSQMVGRLKWLPLLVLCSKLCPPGIEGTFYALLMSIQNAGLLMSGWWGGLMLHLLNVTRTEFSNLWVAVLIRNLSRLLPLMLLFLVPQSDQNSMLLPAEMLQDNESTEARKGGQDTAEFSVLVADDSSCHALNVAVEDERIKVVDAGTGTVELIPLMNELQDRGS

SEQ ID NO: 25230 - DNA, 1494 bp, Arabidopsis thaliana
  CDS (1)..(1494)
atggccaatcgatcggaggaagcagagtacgagaacgattctcggcgaaatcatcaagacaagaagaaagaaggagttttagatctggtactgaaacgacctttacggtggctaagaatgctcatcgaagagcttcactggagcttcttcttcggtgtgattatcgtctatggagttagccaaggacttggtaaaggtctcagcaaagtcagcacacagtactacttcaaagacgagcagaagatacaaccctctcaagctcagatttacgttggtttgattcagattccttggattattaaacctctctggggattgttgactgatgttgtcccagttttgggttacaggagacgaccctatttcatattagccggttttcttgctatgatctccatgatggtgttatggcttcacacgaatctgcatcttgcactggctttgtcctgtcttgtggcaggaagtgctggagttgctatagcagatgtaactattgatgcttgtgtgacacaatgtagcataagccatcctacacttgctgcagatatgcaaagtttgtgtggtttgtgttcttcgattggttccttggttggtttctcccttagcggcgttttggtgcacttggttgggtccaaaggtgtgtacggtttactcggtgtgacggcaggattgcttgttgtggttgggatggttctgaaagaatctccttctcgcagtctaggtcgcaagcatgttaacgacaagtttctggatgctggaagtgcaatatggaaaacctttcaatatggtgaggtgtggcgaccatgcttgttcatgctattgtcagctgcagtgagcttgcacattcacgaaggcatgttctattggtacacggattcaaaggatggcccttccttttcaaaggaagccgttggatccattatgtcgtttggtgcaattggctctcttgtgggaatacttctctatcagaactttctgaagaacttccctttcaggaatgtcgtcttctgggcactttccctatctgtcctgtcaggatttctggatttaatcctggtgctgcgcataaatctgaagcttggtctccctgattacttctttattgtggtagatgagtttgtttcacatatgataagtagaatcaagtggttacccttacttgttctcagctccaagctctgccctgccggtatggaaggcactttctttgctttgctcatgtctattgaacatataggacatctagtgtcgtcatggggcggaggagtactactccatgccctgaaagttacgcgtactcagtttgataatctctggttggttattgtgatcaggagtttattgagggtaatcccaattggattggtctttttgataccaaatgttgattcaaactcaaccattctccctgctgagatgttaacaagtagaataagtgaaggtgttgataccgagaagatagagatgaccgctctgatcagtgatgaagcttga

SEQ ID NO: 25231 - protein, 497 aa, Arabidopsis thaliana
MANRSEEAEYENDSRRNHQDKKKEGVLDLVLKRPLRWLRMLIEELHWSFFFGVIIVYGVSQGLGKGLSKVSTQYYFKDEQKIQPSQAQIYVGLIQIPWIIKPLWGLLTDVVPVLGYRRRPYFILAGFLAMISMMVLWLHTNLHLALALSCLVAGSAGVAIADVTIDACVTQCSISHPTLAADMQSLCGLCSSIGSLVGFSLSGVLVHLVGSKGVYGLLGVTAGLLVVVGMVLKESPSRSLGRKHVNDKFLDAGSAIWKTFQYGEVWRPCLFMLLSAAVSLHIHEGMFYWYTDSKDGPSFSKEAVGSIMSFGAIGSLVGILLYQNFLKNFPFRNVVFWALSLSVLSGFLDLILVLRINLKLGLPDYFFIVVDEFVSHMISRIKWLPLLVLSSKLCPAGMEGTFFALLMSIEHIGHLVSSWGGGVLLHALKVTRTQFDNLWLVIVIRSLLRVIPIGLVFLIPNVDSNSTILPAEMLTSRISEGVDTEKIEMTALISDEA

SEQ ID NO: 25232 - DNA, 1305 bp, Arabidopsis thaliana
  CDS (1)..(1305)
atggcaagagaagagcaaaacattgaaaacagaggatccgtacatgtggtcgaaagagaaagtaatttacgtagtgtggtgtgtggtcctgtgcggtggctaaagatgttggcgtcaaagcttcactggagctatgtgtttgctgtggtctccaattgtggaataaaccaagggtttggttactcattgggtcatgtagctacagattattacatgaaagatgttcaaaaggttcagccttctcaatatcaagctctctctgcaatcactaggatttcatggatcatatttaagcctctttttggcattctcactgatgttcttcccatctttggtttccatagacgtccttacttcattttagcaggggtgattggagtggtttctttgttgtttatatcacttcaaagtaatctacatctttacttggcactgttttggatgacaatatcaagtgctgcaatggcgatagccgatgtaacaattgatgcttgtactacttacaatagtaacaaacacccttctcttgcatcggatatgcagagtttatgtagtttaagctattccattggagaacttcttggtttctttatgagtggtatcttagttcatcttgttggctccaagggcgtgttcggcttgttaacattcacattcgcattagtatcggtagtcggggtcttgtttagtgagcctcgtgttcatggtttctctttcaaacagaactttaccaatgcaatgaaagcgatgtggaggacaatcaagtgctcagatgtgtggcagccaagtctatatatgttcattacccgtgctcttggtttagacattaaagaaggtcttttctattggttcactgattcaaaagatggtcctttgtttgctcaggaaacggttggtttcattctctcaattggttctatagggtcgattctaggagtactgttgtacaacctacgcctaaaggatcatccgttccgtaaactatttttgtggactcaacttctctttgctttatcaggaatgtttgacctcattcttgtgctacgtctcaacttaaaatttggtttacctgattatctcttcatagtagtggacgggatagtttctaagatgatcatacgtctgacatggatggtgatattcgttctcaatacaaagctttgtcctcacggaattgaagggaccttttttgcgttgttaatgtcaattgacaatgcaggcctcatgacctcatcttggcttggagggaaaatgttgcatgtcctcaaggagatcagaacacgttcaagctcccggctgagataa

SEQ ID NO: 25233 - protein, 434 aa, Arabidopsis thaliana
MAREEQNIENRGSVHVVERESNLRSVVCGPVRWLKMLASKLHWSYVFAVVSNCGINQGFGYSLGHVATDYYMKDVQKVQPSQYQALSAITRISWIIFKPLFGILTDVLPIFGFHRRPYFILAGVIGVVSLLFISLQSNLHLYLALFWMTISSAAMAIADVTIDACTTYNSNKHPSLASDMQSLCSLSYSIGELLGFFMSGILVHLVGSKGVFGLLTFTFALVSVVGVLFSEPRVHGFSFKQNFTNAMKAMWRTIKCSDVWQPSLYMFITRALGLDIKEGLFYWFTDSKDGPLFAQETVGFILSIGSIGSILGVLLYNLRLKDHPFRKLFLWTQLLFALSGMFDLILVLRLNLKFGLPDYLFIVVDGIVSKMIIRLTWMVIFVLNTKLCPHGIEGTFFALLMSIDNAGLMTSSWLGGKMLHVLKEIRTRSSSRLR

SEQ ID NO: 25234 - DNA, 1500 bp, Arabidopsis thaliana
  CDS (1)..(1500)
atggtagtagaagagcaaagccttgaaaacggcggatccgtacatgtggtcaaaggagaaagtaatttccgtaatgtggtgtgtggtcctgtacggtggctaaagatgttgtcttcagagcttcattggagctttgtgtttggtgtagtctcactatatggaattaaccaagggcttggtggctcattaggtcgtgtagctacagagtattatatgaaagatgttcaaaaagttcagccttctgaatctcaagctctcactgcaatcactaagattccatggatcattaaaccactttggggcattctcactgatgttcttcccatctttggtttccatagacgtccttacttcattttagcaggggtgcttggagtggtttcattgttgtttatttcactgcatagtaatctacacctttacttggcactgttttggatgacaatatcaagtgctgcaatggcgattgctgatgtaaccattgatgcttgtactgcttacaatagtatcaaacatccttctcttgcatcggatatgcagagtttatgcagtttaagctcttccattggagcacttcttggtttctttatgagtggcatcttagttcatcttgttggctctaagggtgtctttggattgctgacattcccattcgcgttagtatcggtagtcgggatcgtgtttagtgagccccatgttcctggtttctcttacaaacaggtgaaccagaaatttaccgatgcagggaaagcgatgtggaggacaatgaagtgttcagatgtgtggcggccgagtttgtatatgtacatttcccttactcttggtttgaacatacatgaaggtctcttctattggttcacagattcaaaggatggtcctttgtttgctcaggaaacagttggtttcattctctccattggttcaatcggatcgattctagcagcaacgttataccaactagtcctaaaggatcatccgttccgcggactttgtttgtggactcaacttctctttgctctatcgggaatgcttgacctcattcttgtgttccgtctcaacttaaaatttggtttaccggattatctcttcatagtagtggacgagatagtttctcagatgatcggacgcttgaaatggatgccgctgcttgtcctcacttcaaagctttgtccccacggaattgaagggacgttctttgcattgctaatgtcaattgacaatgcaggcctcatgacctcatcttggcttggagggataatgttgcatgtcctcaaggtgactcggactgagtttggtaacctgtggcttgcggttttggtcaggaatgtcatgagacttttgccgctttgttttctgtttcttgtgcctaaaggagatcaaaacacgttcaagctcccggatgagataatgggcgaagattcggacgaagagaaagatgaaaaagaaggaactcggaatttggaattggcttctcttgttcactctgttgatagaagatag

SEQ ID NO: 25235 - protein, 499 aa, Arabidopsis thaliana
MVVEEQSLENGGSVHVVKGESNFRNVVCGPVRWLKMLSSELHWSFVFGVVSLYGINQGLGGSLGRVATEYYMKDVQKVQPSESQALTAITKIPWIIKPLWGILTDVLPIFGFHRRPYFILAGVLGVVSLLFISLHSNLHLYLALFWMTISSAAMAIADVTIDACTAYNSIKHPSLASDMQSLCSLSSSIGALLGFFMSGILVHLVGSKGVFGLLTFPFALVSVVGIVFSEPHVPGFSYKQVNQKFTDAGKAMWRTMKCSDVWRPSLYMYISLTLGLNIHEGLFYWFTDSKDGPLFAQETVGFILSIGSIGSILAATLYQLVLKDHPFRGLCLWTQLLFALSGMLDLILVFRLNLKFGLPDYLFIVVDEIVSQMIGRLKWMPLLVLTSKLCPHGIEGTFFALLMSIDNAGLMTSSWLGGIMLHVLKVTRTEFGNLWLAVLVRNVMRLLPLCFLFLVPKGDQNTFKLPDEIMGEDSDEEKDEKEGTRNLELASLVHSVDRR

SEQ ID NO: 25236 - DNA, 1476 bp, Arabidopsis thaliana
  CDS (1)..(1476)
atgatacattggttgaagcagctgcgatcggcgtttggcgtcgcgtttctgtggctcgtttgtctcatttacttcactcagggatttagatcgtttgtgtggacagctgtttcgtaccagctcaaagacaggctacagttatcaccatcagcttctcagtttgtcttttcggttgccttttttccatggagcataaaaccattatatggaatcatttcagattgtataccaattggagggaaaaagaggacgccgtatttggtgatatcgactgtgctctctcttgtgccatggctcgtgcttggtctagattcaacctcgagaagttcaagtctctatctgatgattttcttgactgtacaaaatctaggatcagctatggctgatgttgtgattgatgctatgatagctgaggcagtaagacttgaaaaggcttcgtttgctggagatcttcagtctgtatcatggtttgcaatggctgtgggtggagtatgcggtagtttattaggaggctatgcgttatctaacttgaagatagaaacaatattcctccttttcacggtactaccagcgttacaattactatcatgtgctctcgtcgaagaaagtcctgctaacaatgaaccattgcctgagttgttggattcaaacgagtttgaagagaaaagcttgacgagcaatgataactatccagatacgagtaagtccaatacaagaagaaggaaggggcagaagaaaggtaaaaaaggagattccaacggaaagtctgagacacagaagaagcaatcgaagtctttagcttcacagtggttccagtcactaaaagcagccacttttggtttgggccgtgcgtttaagcaaccgatcattttgagacctatggcatggtttttcattgcacatatcactgtgccaaatctctctaccgtcatgttctattaccaaaccgaggtcttgcaattagacgctgctttcctaggaactgcccgtgttgttggttggttaggtctcatgtttggaacctttatctacaatcgctatctgcaagatatgactctacgcaagtctctcctgtttgctcacatcgggctgtctgtaacgatactcctagatatggttctagtatcaagagctaatgtgggctacggagtttcagacaagacaatggtgctcttcggatcagctctaggtgatgccatcaatcaactcaaattcatgccgttcctgatcttgtctggtcgtctatgtccacctgggattgaaggaacactgtttgcgctgtttatgtcgataaacaacctaggaaacacagttggatcgttcatgggagcaggattggcttcacttctgggaatatcgtcagggtcgtttgacaatatgtttatgggcttagccattcaagtgttttgcacttatatacccgttttgtttcttttcttgattcccaaagaagctacaggagtatcagcatcatag

SEQ ID NO: 25237 - protein, 491 aa, Arabidopsis thaliana
MIHWLKQLRSAFGVAFLWLVCLIYFTQGFRSFVWTAVSYQLKDRLQLSPSASQFVFSVAFFPWSIKPLYGIISDCIPIGGKKRTPYLVISTVLSLVPWLVLGLDSTSRSSSLYLMIFLTVQNLGSAMADVVIDAMIAEAVRLEKASFAGDLQSVSWFAMAVGGVCGSLLGGYALSNLKIETIFLLFTVLPALQLLSCALVEESPANNEPLPELLDSNEFEEKSLTSNDNYPDTSKSNTRRRKGQKKGKKGDSNGKSETQKKQSKSLASQWFQSLKAATFGLGRAFKQPIILRPMAWFFIAHITVPNLSTVMFYYQTEVLQLDAAFLGTARVVGWLGLMFGTFIYNRYLQDMTLRKSLLFAHIGLSVTILLDMVLVSRANVGYGVSDKTMVLFGSALGDAINQLKFMPFLILSGRLCPPGIEGTLFALFMSINNLGNTVGSFMGAGLASLLGISSGSFDNMFMGLAIQVFCTYIPVLFLFLIPKEATGVSAS

SEQ ID NO: 25238 - DNA, 1422 bp, Nostoc sp. PCC 7120
  CDS (1)..(1422): transl_table=11
atgctgattgactcctctggcttgtccaaggtcaaagactcagtaagaaaacaaattttcttcggtaatgaacctagtgccgaattaattgccatccttagcgtctattttgtccaagggattttaggcctggcgcgtctagccgtcagctttttcctcaaagatgaattgttgttaagtcctgttcaggtatcggcattaatgggaattgttgccttaccttggatggttaagccattatttggctttgtttcagacggcttaccgatattcggctaccgtcgccgaccatacctagtgttatcagggatactgggggcaatttcttggatcagtttggccacaatagttcatactagctgggcagctaccgtggcgatcgctcttggttctctatctgttgcggtgagtgatgtgatagttgactccctagttgtggaacgtgccagagaagaatcagtggctcatgttggttcactacaagcattatgttggggagcttctgcctttggcggtttgattactgcctacttcagtgggttgctactggagcatttcacaacccgtactgtatttgggattacagcctcatttcccctcatagtctcaggggtcgcttggttgattgctgagtctcccgttagtaaagatgggagtggtaatactaacctcctcagtgtcaagcatcaactacagcaactgcgccaagcattcacccaaaaaagtatttggctacccactgcattcgtatttatttggcaagccacaccaactgctgactcagcctttttcttcttcagcaccaatgaactccactttgaaccagagtttttagggcgagtgcgtttagttactagtctggcatctttgattggtgtttggatttttcaacgtttcttaaaaagtgtctctttccggctaatttttggttggagtacggtcatttccgcagttttgggcatgaccatgctattgctggtgacacacacaaatcgggctttgggtatagacgaccgttggtttagtttgggtgatagcctcattctcacagtgatgggacaaattgcttatatgccagttttggtactctctgccagactttgcccccctggtgtagaagccacattatttgccttgttgatgtcagtctttaatttagcaggcatggtttcttacgaagcgggagccatcatcatgcactggctaggaattactgaaactaactttgatttactttggcttttggtattaattactaacttgagtacactattaccattgccgtttctcaactggctaccatccgatgatgcagaaatagaaacccaggcattagcaccagcttcagctaatactcaagtgtccaatttagttccggaattaaggttgcgagaagcagaacccagaaccgaaagtagttga

SEQ ID NO: 25239 - protein, 473 aa, Nostoc sp. PCC 7120
MLIDSSGLSKVKDSVRKQIFFGNEPSAELIAILSVYFVQGILGLARLAVSFFLKDELLLSPVQVSALMGIVALPWMVKPLFGFVSDGLPIFGYRRRPYLVLSGILGAISWISLATIVHTSWAATVAIALGSLSVAVSDVIVDSLVVERAREESVAHVGSLQALCWGASAFGGLITAYFSGLLLEHFTTRTVFGITASFPLIVSGVAWLIAESPVSKDGSGNTNLLSVKHQLQQLRQAFTQKSIWLPTAFVFIWQATPTADSAFFFFSTNELHFEPEFLGRVRLVTSLASLIGVWIFQRFLKSVSFRLIFGWSTVISAVLGMTMLLLVTHTNRALGIDDRWFSLGDSLILTVMGQIAYMPVLVLSARLCPPGVEATLFALLMSVFNLAGMVSYEAGAIIMHWLGITETNFDLLWLLVLITNLSTLLPLPFLNWLPSDDAEIETQALAPASANTQVSNLVPELRLREAEPRTESS

SEQ ID NO: 25240 - DNA, 1683 bp, Arabidopsis thaliana
  CDS (1)..(1683)
atggcgagtcgctctcttttctctatctcaatctcaccttctcaatttacagttttgccatccatcaacaacgagagacgacgccttgctatcgccgctcgatctcaccgactatcacgccggaagattcgtaagagacctcctgatagagatatgtcctccatagtttcaatcccggagcttcctcgccggcgggattctgaggaaagcctgcttttagattctcgaatcagtgtagctgaaggagatacatcgaatacagatgtagaaggagacagagatactacttctagtattagaacacagcctccccctcgtaaaggaagaaatcttagtagcagcagaatcaaattctacggtgttgaattatcaccagataatgttgctgtagcaatggtgtattttgttcaaggtgttttaggactcgctaggctcgctgttagtttctatttaaaagatgacttgcatcttgatcctgctgagacagctgtgataacgggtctttcttcattgccgtggcttgttaagcctctctatggttttatcagtgattcagtgcctctatttggttatcgaaggaggtcatatctagttctctcgggacttcttggtgcattttcttggagtttgatggctggttttgttgacagtaaatatagtgctgctttttgtatacttctcggttccctctctgtcgccttttctgatgttgtagtagactcaatggtagtggaacgggctcgtggtgagtcacaaagcgtgtcaggatcgctgcagtctttgtgctggggatcctcagcttttggtggaattgtgagttcctactttagcggctccctggtggagtcatatggtgtgaggtttgtatttggggtgacagctttactacccttgataacttcagcagttgctgttctcgtgaatgaacaacgtgtggtcagaccagcatcagggcagaaagagaatataacgctgctcagtcctggttttcttcagacctcaaagcagaacatgattcagctatggggtgccattaagcaaccgaatgtttttctccccaccttatttatattcttatggcaagccacaccacactcagattctgcaatgttttacttcacaacgaacaaactcggttttaccccggagtttctgggacgagttaaacttgtgacctcaattgcctcattgcttggagtaggactgtacaatggattcctgaagactgttccattgagaaaaatctttctcgtgacgacaatttttggcacgggtcttgggatgactcaggttatcctcgtgtcaggttttaacagacagttggggattagcgacgaatggtttgctataggagactctctaatcctaacagtccttgctcaggcttcattcatgccggttcttgtgttagcagcgagattatgtccagaaggaatggaagcaactctgttcgctacactcatgtcaatctctaacggaggcagtgttctaggtgggcttatgggtgcaggactgactcaagcattcggcattacaagagacagttttggtaacttatcaacacttattatcctctgcaatcttagctcattgctccctctgcctcttctcggtcttttaccgcgagattctccagatactcttactaaagatgacgcagacgttgagatgaagtccaattaa

SEQ ID NO: 25241 - protein, 560 aa, Arabidopsis thaliana
MASRSLFSISISPSQFTVLPSINNERRRLAIAARSHRLSRRKIRKRPPDRDMSSIVSIPELPRRRDSEESLLLDSRISVAEGDTSNTDVEGDRDTTSSIRTQPPPRKGRNLSSSRIKFYGVELSPDNVAVAMVYFVQGVLGLARLAVSFYLKDDLHLDPAETAVITGLSSLPWLVKPLYGFISDSVPLFGYRRRSYLVLSGLLGAFSWSLMAGFVDSKYSAAFCILLGSLSVAFSDVVVDSMVVERARGESQSVSGSLQSLCWGSSAFGGIVSSYFSGSLVESYGVRFVFGVTALLPLITSAVAVLVNEQRVVRPASGQKENITLLSPGFLQTSKQNMIQLWGAIKQPNVFLPTLFIFLWQATPHSDSAMFYFTTNKLGFTPEFLGRVKLVTSIASLLGVGLYNGFLKTVPLRKIFLVTTIFGTGLGMTQVILVSGFNRQLGISDEWFAIGDSLILTVLAQASFMPVLVLAARLCPEGMEATLFATLMSISNGGSVLGGLMGAGLTQAFGITRDSFGNLSTLIILCNLSSLLPLPLLGLLPRDSPDTLTKDDADVEMKSN

SEQ ID NO: 25242 - DNA, 1377 bp, Trichodesmium erythraeum IMS101
  CDS (1)..(1377): transl_table=11
atgtttatatcctctgaaggtataatcaagcttcaaaaatactttaaacaaaaggtattttttggaaatgaaccaacacctgaacttatagccatactgcttgtttactttgtccaaggaattttagggttagggagtctcgctatcagcttttttctcaaagatgaattggccatgactccggcagaggtatcagcaatgttgggtattgttattataccgtggatgattaaacctctttttgggtttattactgatggagtaccaatattaggctatcgacgaggaccttacataattttttctggaatactgggggcgttttcttgggtagcattggcaacatgggtagatactccactaacagcgacagtagcgatcgctatgagttccttgtcagtagctatgagcgatgtaataattgattcccttgttgtagaaagagtgcaaaaagaatctgtcagtaatacaggttctctccaatctttatgttggtctgcctcagcattaggaggactaataactgcttatttcagtggttatttactagaacatttcagccctcaaactgtatttttaattacagccacttttcctttgattgtttctttagtacccctattaattgaggaaaaaaaagtttctattaggattaactttgataacgtaaaacagcaaattaaacaagtcaaaaaagcagttataaaaaaatcaattttattaccaactgctttcctagttatttggcaagcaaccccaaattctgaatcagctttctttttcttttcaaccaatgaattaggatttcaagcagaatttttaggcaggataaggttagtaacaagtattgctgctttatttggtgtttggctatttcaacgcttttttaaatctgttccatttcggaaaattttcggatggtctacagttatttctgctcttttaggaatgactactttactgttagttactcacactaatagaacattggggatagatgatcattggtttagcttaggagatagtttagtactaactgtaatgggcaaaattgcttttatgccagtattagttttagctgctagactttgcccaccaggagtagaagcaactgtatttgctttattaatgtcaatttataacttagctgcattaatttcccatgaaggcggtgctttattaatgcactggctaaaagttacagagacaaactttgataatttgtggttgttgatagttatcactaacttatccactttattgccattacctttactaaattggttgcctacagctaatgctcaaacagatgaagaagaaaatcttaattcacaaccaatattagaacctgaatctagtgaaattatctcccgttaa

SEQ ID NO: 25243 - protein, 458 aa, Trichodesmium erythraeum IMS101
MFISSEGIIKLQKYFKQKVFFGNEPTPELIAILLVYFVQGILGLGSLAISFFLKDELAMTPAEVSAMLGIVIIPWMIKPLFGFITDGVPILGYRRGPYIIFSGILGAFSWVALATWVDTPLTATVAIAMSSLSVAMSDVIIDSLVVERVQKESVSNTGSLQSLCWSASALGGLITAYFSGYLLEHFSPQTVFLITATFPLIVSLVPLLIEEKKVSIRINFDNVKQQIKQVKKAVIKKSILLPTAFLVIWQATPNSESAFFFFSTNELGFQAEFLGRIRLVTSIAALFGVWLFQRFFKSVPFRKIFGWSTVISALLGMTTLLLVTHTNRTLGIDDHWFSLGDSLVLTVMGKIAFMPVLVLAARLCPPGVEATVFALLMSIYNLAALISHEGGALLMHWLKVTETNFDNLWLLIVITNLSTLLPLPLLNWLPTANAQTDEEENLNSQPILEPESSEIISR

SEQ ID NO: 25244 - DNA, 1455 bp, Crocosphaera watsonii WH 8501
  CDS (1)..(1455): transl_table=11
atgagtgcgacgttttctgccctgagacaaattaaaaagacattcacaaaaacggtattattcggcaataaacctagtgctgaactatttgcaatcctgagcgtctattttgtgcaaggaatcttaggtttagcccgtttagcggtgagtttcttcctcaaagatgatttaggcttaacccctgcacaaatgggtgcattaacaggtattgctgcgattccttgggtgatcaaacccctatttgggtttatttcggacggtttacccatatttagctatcgtcgtcgtccttatctggttatttcgggactattaggcagtttatcctggatattattggctacagtggttagtaatgtctggttagctactgtcaccctcctgttaacctctctttctgtcgctatcagcgatgttatcgttgactccttggtggtagaaagggccagaaaagagtctttaagtcaagcaggatcgttacaatccttaacttggggagtatcagcttttggggggttaattacagcttatttaagtggtttgttgttagaaagatttagcaatcaaattgtatttgaaattacggctatttttccttttattgtctgtttggctgcttggttgattgctgaggaacctgttagtaaaaatgagttactttctcaacaggatcaatctttggttaaacaacaaataaaacaggtatggaaagccattaaacagaaatcaatttttttaccaactgcttttgtttttctctggcaagctactcctaatggtgactcagccttcttttattttgctaccaatgaattagggtttgaaccagaatttttagggcgagttcgtctggttactagcgtggctgcattgttaggagtattgatttatcaaaagttccttaaaaatgtttcctttagaaatatcttgggttggagtgtggttatttcttctgcttttggaatgaccacattattgctagttactcatactaaccgcttattgggaattgacgaccattggttcagtttaggggacagtttaattttaactgttgctggtcaaattgcttttttacccatcttggtattatctgctaggttatgtcctaaaggcatcgaagcaaccttatttgctttattgatgtccattgtcaatctagcaaacttattatcccatgaattaggatcactactcacccattggttaggagtaacagaaactaattttaataatctctggttactgataactattaccaacctctcaactttattacctttacccttagttaagtggttacctaataacgatccccaagctgaagagttagaggaacaagaaaatataagttatgtcggtgaagtctatgaaggtaaagctttagggacggttactgatgatgctctaatccctgatgtcattcccgaatttattaccaataaaaagaagtaa

SEQ ID NO: 25245 - protein, 484 aa, Crocosphaera watsonii WH 8501
MSATFSALRQIKKTFTKTVLFGNKPSAELFAILSVYFVQGILGLARLAVSFFLKDDLGLTPAQMGALTGIAAIPWVIKPLFGFISDGLPIFSYRRRPYLVISGLLGSLSWILLATVVSNVWLATVTLLLTSLSVAISDVIVDSLVVERARKESLSQAGSLQSLTWGVSAFGGLITAYLSGLLLERFSNQIVFEITAIFPFIVCLAAWLIAEEPVSKNELLSQQDQSLVKQQIKQVWKAIKQKSIFLPTAFVFLWQATPNGDSAFFYFATNELGFEPEFLGRVRLVTSVAALLGVLIYQKFLKNVSFRNILGWSVVISSAFGMTTLLLVTHTNRLLGIDDHWFSLGDSLILTVAGQIAFLPILVLSARLCPKGIEATLFALLMSIVNLANLLSHELGSLLTHWLGVTETNFNNLWLLITITNLSTLLPLPLVKWLPNNDPQAEELEEQENISYVGEVYEGKALGTVTDDALIPDVIPEFITNKKK

SEQ ID NO: 25246 - DNA, 1611 bp, Oryza sativa subsp
  CDS (1)..(1611)
atggatcgccaagaggaggaggacgacgacgcggcgcttcgagaagccggcggcggcagcagcgatccccacgacggcggcggcggcggcgaatgcggcggctggctccggcgtctgtcccgcgagctgcactggagcttcgtgctcgccgtcgtggccgtctacggggcctgccagggcgtcggcgacgccgtcggcggcgtcgccgcggggtactactggaaggacgtgcagcgcgtgcagccgtcggcagcgcagttctaccaggggttcgtcagcgccccctgggtcgtcaagcccgtctggggcctgctcaccgacgtcgtccccgtcgccggctaccgccgccgcccgtacttcctcctcgccggagtgattggggcgtcgtccatgctcacgctcgctctccaccgcaagctggggatcatgccggcgatcttggcgctgacggcgcagagcgcgggcgcggcggtggccgacgtgacggtggacgcgctggttgctcagaacagcatcacgcaccagccgctagccgcagacatgcagagcctgtgtgggttcagctcctccgttggtgcattgcttggattctccatcagtggtcttcttgtccactccatggggtctcagggtgctcttggattactaagcatcccctctgcactggtgttcttggctggggttttgctgaaggagaggcgagttacagatttcgattacaagcaggttcataggaaattctacaaagcaattcagtccatgggggcaacactgaagtgcgccgaagtttggcggccgtgtgtgtatatgtatgtttctctcagtctaagcctggatatccaagcaggaatgttctactggtacactgatccaatagtgggaccaggattctccgaggaatttattggccttgtgtattcaatcggttcaatcggttcgctgctcggagttttactataccaaatttcactgaaggactaccctttccgcggcgtgctattctggggccaagttctttcaagcctggcaggaatgctcgatctgataatggtgacccggctgaacacaagagtcggcattccggattacgtctttgcggtgatcgacaacagtgtctcccagatggttgggaggctcaaatggttgccgctcctcgtgctttgctccaagctttgtcctccaggcatcgaaggaactttctatgcgctgctcatgtccatccaaaatgccgggttgctcatgtccggctggtggggtggcctgatgctgcacttgctgaatgtgactcgaacggagttcagtaacctctgggttgccgtcctgatcagaaacttgtcgaggttgctcccgctgatgctgctgtttcttgttccccagagtgaccaaaactcaatgctcctcccggcagagatgcttcaggacaatgaatctactgaagctaggaaaggaggtcaagacactgctgaattttccgtccttgttgcagatgattctagctgtcatgctctgagtgtggctgtcgaagatgaaagaatcaaagtggtcgatgctggaacgggtactgtggagttgatccctctcatgaacgagctacaagaccgtgggagttga

SEQ ID NO: 25247 - protein, 536 aa, Oryza sativa subsp
MDRQEEEDDDAALREAGGGSSDPHDGGGGGECGGWLRRLSRELHWSFVLAVVAVYGACQGVGDAVGGVAAGYYWKDVQRVQPSAAQFYQGFVSAPWVVKPVWGLLTDVVPVAGYRRRPYFLLAGVIGASSMLTLALHRKLGIMPAILALTAQSAGAAVADVTVDALVAQNSITHQPLAADMQSLCGFSSSVGALLGFSISGLLVHSMGSQGALGLLSIPSALVFLAGVLLKERRVTDFDYKQVHRKFYKAIQSMGATLKCAEVWRPCVYMYVSLSLSLDIQAGMFYWYTDPIVGPGFSEEFIGLVYSIGSIGSLLGVLLYQISLKDYPFRGVLFWGQVLSSLAGMLDLIMVTRLNTRVGIPDYVFAVIDNSVSQMVGRLKWLPLLVLCSKLCPPGIEGTFYALLMSIQNAGLLMSGWWGGLMLHLLNVTRTEFSNLWVAVLIRNLSRLLPLMLLFLVPQSDQNSMLLPAEMLQDNESTEARKGGQDTAEFSVLVADDSSCHALSVAVEDERIKVVDAGTGTVELIPLMNELQDRGS

SEQ ID NO: 25248 - DNA, 1809 bp, Oryza sativa subsp
  CDS (1)..(1809)
atgtcccatctgtcagaagctgtgatattgcatagggatgcacctacctcgcagctccgagctttggattcaagaaacccaaatctggtgctggaatccgagctccagattcaagccggagcaattcgggtaaaaccaggcgagaaatctttgcgcaagaagatgtcgccggccaccgccgccgccgccgacctccccgccgaggaggaggggaagggggggaggagcagcagcaggcaagaggaggccaatgtcctcctcgccgtcgatgcggcggcggagggcggcggcgcgtggtcaccggtggggtggttcaggatgctggggagggagctacactggagcttcgtggcggcggtggtggcgacgtacggcgtcagccagggcctcggcggcggcatcatgcgggtggcgtcggactactactggaaggacgtgcagcgggtgcagccgtcggcggcgcaggtgtaccagggggtgacctccatcccgtggatggtcaagccgctctggggcctcctcaccgacgtcctccccatcgccggctaccgccgccgcccctacttcgtcatcgcaggtggcttcatgggagtagtcgcgatgcttgtattatctctccacagcaagcttcatgtattgttcgcattgttggcattgatggccggaagtgccagtgtggcaatagctgatgtaactatagatgcctgtgttgctgaaaacagtatagtgcaccctcatcttgctgctgacatgataagcttaaacggattctgtgcatctgtgggagggcttattggattctcaataagtggtttccttgtccatgcaataggctctcaaattaatcttgtgtttctcaagggtgcccttggcatgttggcaataccttctgccctggtaatcctagctggaatgatgataaaggacgtccatatgcccaactttccatatgagctggcccatatgaagtttgtagaggcaagtagaacaatgatggcaaccctaaaatgtcctgaagtatggcgaccatgtgtttacatgtacatgtctctcgctttgagcgtggatattcaagaaggaatgttctattggtacacagatcaaaatgcagggctatctttttcagagggattcattgggtttatcttcgcagttgggtcagttggttctcttattggggtcatactttaccaaaatattctgaaggaccattcttttcgcagcgttctctgtttaagtcagttgttgctgagcttgtcaggaatgcttgacctgatcttggtacttcgtctcaacctaaaacttgggatacctgactactactttgctgtgatcgacgagggtgtctccaaaatgatcaaccgcataaaatggatgcctcttttggtacttagctcaaagctttgccctgctggcattgagggcacattctatgcgttgctcatgtccatcgacaatgttggcttgctatctggatcttgggcaggtggattgatccttcatgtgttgaacatcacaagaacagagttcaaaaacctctgggccgcgatcctaatccgaaatgcaatgaggttactacctttggccctgttgtttttggtgccgagaagtgaccagaactctaatctccttccagctgacttgctacctgaggatgatggtgcccaatatcaagtggacaatgttgagttaacctctcttacagtggatgggaaatcgagcaccggtagtttgcaccaagaattcaaaaatcaggacgttgtcgaaaacgacgatgacgaggcttcactgcttgccaacagtagttga

SEQ ID NO: 25249 - protein, 602 aa, Oryza sativa subsp
MSHLSEAVILHRDAPTSQLRALDSRNPNLVLESELQIQAGAIRVKPGEKSLRKKMSPATAAAADLPAEEEGKGGRSSSRQEEANVLLAVDAAAEGGGAWSPVGWFRMLGRELHWSFVAAVVATYGVSQGLGGGIMRVASDYYWKDVQRVQPSAAQVYQGVTSIPWMVKPLWGLLTDVLPIAGYRRRPYFVIAGGFMGVVAMLVLSLHSKLHVLFALLALMAGSASVAIADVTIDACVAENSIVHPHLAADMISLNGFCASVGGLIGFSISGFLVHAIGSQINLVFLKGALGMLAIPSALVILAGMMIKDVHMPNFPYELAHMKFVEASRTMMATLKCPEVWRPCVYMYMSLALSVDIQEGMFYWYTDQNAGLSFSEGFIGFIFAVGSVGSLIGVILYQNILKDHSFRSVLCLSQLLLSLSGMLDLILVLRLNLKLGIPDYYFAVIDEGVSKMINRIKWMPLLVLSSKLCPAGIEGTFYALLMSIDNVGLLSGSWAGGLILHVLNITRTEFKNLWAAILIRNAMRLLPLALLFLVPRSDQNSNLLPADLLPEDDGAQYQVDNVELTSLTVDGKSSTGSLHQEFKNQDVVENDDDEASLLANSS

SEQ ID NO: 25250 - DNA, 1686 bp, Oryza sativa subsp
  CDS (1)..(1686)
atggacgcccggacgagcgctgtgacctcggaacgttgttgggacttggctgggggtgaaaacgatccccaagaaacccccggcaagaaatcgctgcccagatggatcgccaagaggaggaggacgacgacgcggcgcttcgagaagccggcggcggcgcctccttccccggcggctggctccggcgtctgtcccgcgagctgcactggagcttcgtgctcgccgtcgtggccgtctacggggcctgccagggtgtccggcgacgccgtcggcggcgtcgcggcggggtactactggaaggacgtgcagcgcgtgcagccgtcggcggcgcagttctaccaggggttcgtcagcgccccctgggtcgtcaagcccatctggggtctactcaccgacgtcgtccccgtcgccggctaccgccgccgcccgtacttcctcctcgccggagtgattggggcgtcgtccatgctcacgctctctctccaccgcaagctgggcatcatgccggcgatcttggcgctgacggcgcagagcgcgggcgcggcggtggccgacgtgacggtggacgcgctggttgctcagaacagcatcacgcaccagccgctagccgcagacatgcagagcctgtgtgggttcagctcctccgttggggcattgcttggattctccatcagtggtcttcttgtccactccatggggtctcagggtgctcttggattactaagcatcccttctgcactggtgttcttggctggtgttttgctgaaggagaggcgagttacagatttcgattacaagcaggttcataggaaattctacaaagcaattcagtccatgggggcaacactgaagtgtgccgaagtttggcggccgtgtgtgtatatgtatgtttctctcagtctaagcctggatatccaagcaggaatgttctactggtacactgatccaatagtgggaccaggattctctgaggaatttattggccttgtgtattcggtcggttcaatcggttcgctgctcggagttttactataccaaatttcactgaaggactgccctttccgcggcgtgctattctggggccaagttctttcaagcctggcaggaatgctcgatctgataatggtgacccggctcaacacaagaatcggcattccggattacgtctttgcggtgattgacaacagtgtctcccagatggttgggaggctcaaatggttgccgctcctcgtgctttgctccaagctttgtcctccaggcatcgaaggaactttctatgcgctgctcatgtccatccaaaatgccgggttgctgatgtctggctggtggggtggcctgatgctgcagttgctgaatgtgactcgaacggagttcagtaacctctgggttgccgtcctgatcagaaacttgtcgaggctgctcccgctgatgctgctgtttcttgttccccagagtgaccaaaactcaatgctcctcccggcagagatgcttcaggacaatgaatctactgaagctaggaaaggaggtcaagacactgctgaattttccgtccttgtcgcagatgattctagctgtcatgctctgaatgtggctgtcgaagatgaaagaatcaaagtggtcgatgctggaacgggtactgtggagttgattcctctcatgaacgagctacaagaccgtgggagttga

SEQ ID NO: 25251 - protein, 561 aa, Oryza sativa subsp
MDARTSAVTSERCWDLAGGENDPQETPGKKSLPRWIAKRRRTTTRRFEKPAAAPPSPAAGSGVCPASCTGASCSPSWPSTGPARVSGDAVGGVAAGYYWKDVQRVQPSAAQFYQGFVSAPWVVKPIWGLLTDVVPVAGYRRRPYFLLAGVIGASSMLTLSLHRKLGIMPAILALTAQSAGAAVADVTVDALVAQNSITHQPLAADMQSLCGFSSSVGALLGFSISGLLVHSMGSQGALGLLSIPSALVFLAGVLLKERRVTDFDYKQVHRKFYKAIQSMGATLKCAEVWRPCVYMYVSLSLSLDIQAGMFYWYTDPIVGPGFSEEFIGLVYSVGSIGSLLGVLLYQISLKDCPFRGVLFWGQVLSSLAGMLDLIMVTRLNTRIGIPDYVFAVIDNSVSQMVGRLKWLPLLVLCSKLCPPGIEGTFYALLMSIQNAGLLMSGWWGGLMLQLLNVTRTEFSNLWVAVLIRNLSRLLPLMLLFLVPQSDQNSMLLPAEMLQDNESTEARKGGQDTAEFSVLVADDSSCHALNVAVEDERIKVVDAGTGTVELIPLMNELQDRGS

SEQ ID NO: 25252 - DNA, 1644 bp, Oryza sativa subsp
  CDS (1)..(1644)
atgtcgccggccaccgccgccgccgacgacctccgcgccgaggaggaggggaagggggggaggagcagcagcaggcaagaggaggccaatgtcctcctcgccgtcgatgcggcggagggcggcggcgcgtggtcgccggtggggtggttcaggatgctggggagggagctgcactggagcttcgtggcgggcgtggtggcgacgtacggcgccagccaggggctcggcggcggcgtcatgcgggtggcgtcggactactactggaaggacgtgcagcgggtgcagccgtcggcggcgcaggtgtaccagggggtgacctccatcccgtggatggtcaagccgctctggggcctcctcaccgacgtcctccccatcgccggctaccgccgccgcccttacttcgtcatcgcaggtggcttcatgggagtagtcgcgatgcttgtattatctctccacagcaagcttcatgtattgttcgcgttgttggcattgatggccggaagtgctagtgtggcaatagccgatgtaactatagatgcctgtgttgctgaaaacagtatagtgcaccctcatcttgctgctgacatgataagcttaaacggattctgtgcatctgtgggagggcttattggattctcaataagtggtttccttgtccatgcaataggctctcaaattaatcttgtgtttctcaagggtgcccttggcatgttggcaataccttctgccctggtaatcctagctggaatgatgataaaggacgtccatatgcccaactttccatatgagctggcccatatgaagtttgtagaagcaagtagaacaatgatggcaaccttaaaatgtcctgaagtatggcgaccatgtgtttacatgtacatgtctcttgctttgagcgtggacattcaagaaggaatgttctattggtacacagatagaaatgcagggctatctttttcagagggattaattgggtttatcttcgcagttgggtcagttggttctcttattggggtcatactttaccaaaatattctgaaggaccattcttttcgcagcgttctctgtttaagtcagttgttgctgagcttgtcaggaatgcttgacctgatcttggtacttcgtctcaatctaaaactggggatacctgactactactttgctgtgatcgacgagggtgtctccaaaatgatcaaccgcataaaatggatgcctcttttggtacttagctcaaagctttgccctcctggcattgagggcacattctatgcgttgctcatgtccatcgacaatgttggcttgctatctggatcttgggcaggtggattgatccttcatgtgttgaacatcacaagaacagagttcaaaaacctctgggccgcgatcctaatccgaaatgcaatgaggttactacctttggccctgttgtttttggtgccgagaagtgaccagaactctaatctccttccagctgacttgctacctgaggatgatgctgcccaatatcaaatggacaatgttgagttaacctctcttacagtggatgggaaatcgagcaccggtagtttgcaccaagaatgcaaaaatcaggacgttgtcgaaaacgacgatgacgaggcttcactgcttgccaacaggagttga

SEQ ID NO: 25253 - protein, 547 aa, Oryza sativa subsp
MSPATAAADDLRAEEEGKGGRSSSRQEEANVLLAVDAAEGGGAWSPVGWFRMLGRELHWSFVAGVVATYGASQGLGGGVMRVASDYYWKDVQRVQPSAAQVYQGVTSIPWMVKPLWGLLTDVLPIAGYRRRPYFVIAGGFMGVVAMLVLSLHSKLHVLFALLALMAGSASVAIADVTIDACVAENSIVHPHLAADMISLNGFCASVGGLIGFSISGFLVHAIGSQINLVFLKGALGMLAIPSALVILAGMMIKDVHMPNFPYELAHMKFVEASRTMMATLKCPEVWRPCVYMYMSLALSVDIQEGMFYWYTDRNAGLSFSEGLIGFIFAVGSVGSLIGVILYQNILKDHSFRSVLCLSQLLLSLSGMLDLILVLRLNLKLGIPDYYFAVIDEGVSKMINRIKWMPLLVLSSKLCPPGIEGTFYALLMSIDNVGLLSGSWAGGLILHVLNITRTEFKNLWAAILIRNAMRLLPLALLFLVPRSDQNSNLLPADLLPEDDAAQYQMDNVELTSLTVDGKSSTGSLHQECKNQDVVENDDDEASLLANRS

SEQ ID NO: 25254 - DNA, 1407 bp, Vitis vinifera
  CDS (1)..(1407)
  misc_feature (1023)..(1023): y is t or c
  misc_feature (1164)..(1164): r is g or a
atggacgaggtggaggaaacagaaactcttaaacatcaagaagagacccataagaggaagaacccaaaagtggtgttttggaacttcatatggaggcctgtgtattggttcagaatgcttggtgatgaattgcattggagctttgtgctgagtgtggtgattgtgtatgggatgaatcagggtttgagtgtgggtttgagcagggttagtacacagtattacatgaaagatgagcaaaaggtacagccttctgaagcacaagtcttctttgggatgattcaactcccttgggttatcaaacctctttggggtctgctcactgatattcttcccattattggctacagaagaaggccctatttcatttttgctggaagtgctggcgtagcaatagcagatgtgaccatcgatgcctgtgtggcacagaacagtataagtcatccttcccttgctggtgacatgcaaagcttgtgtggactgagctcttccattggagccctggtgggatactcactcagtggctttcttgttcactttgttgggcctaagggtgtgttcggggtgctgagtgtcccagctgggttggtcatcttggttgggatgtttctgagagagccccatgtgcacaacttttcatacagacgggtgaaccagaaatttctggatgcctgcaaagctatgtggaccacactgaaatgccgagaggtgtggaggccttgcttatacatgtatttgtcacttgcagtgagcttgaatgtgcgtgaagggatgttctattggtatacagatgcaaagggaggtccatctttttcgaaggaggttgttggatccatattctctgttggtgcagttgggtccctcttaggggttcttctctaccaaaatgttttaaaaaaccaccccttccgtgatatactcttctggacccagttgctgtatggtttatctggtatgctggatttgatattggtattacgtataaacttgaaacttggtatatcagattatttctttgctgtgatygatgaagctgtcactcacatgattggacgtgtcaaatggatgcctctccttgtgcttagttccaagctttgtccccctggtattgaaggcactttctttgctttgcttatgtcaattgataatgtggggatgctttcatcrtcttgggcaggaggcctcctacttcatgtcttggaggttactagaactcaatttgacaacctttggttgtccattttgatccggagcatgtttagaatcattccacttgggctgttatttctggtgcccagaagtgatcccaacttatcaatccttccaactgagatgctgaggaccaaaaagggtgatgatatacctgaatctgataacattgaaatggcacctcttgttaatggaacttga

SEQ ID NO: 25255 - protein, 468 aa, Vitis vinifera
MDEVEETETLKHQEETHKRKNPKVVFWNFIWRPVYWFRMLGDELHWSFVLSVVIVYGMNQGLSVGLSRVSTQYYMKDEQKVQPSEAQVFFGMIQLPWVIKPLWGLLTDILPIIGYRRRPYFIFAGSAGVAIADVTIDACVAQNSISHPSLAGDMQSLCGLSSSIGALVGYSLSGFLVHFVGPKGVFGVLSVPAGLVILVGMFLREPHVHNFSYRRVNQKFLDACKAMWTTLKCREVWRPCLYMYLSLAVSLNVREGMFYWYTDAKGGPSFSKEVVGSIFSVGAVGSLLGVLLYQNVLKNHPFRDILFWTQLLYGLSGMLDLILVLRINLKLGISDYFFAVIDEAVTHMIGRVKWMPLLVLSSKLCPPGIEGTFFALLMSIDNVGMLSSSWAGGLLLHVLEVTRTQFDNLWLSILIRSMFRIIPLGLLFLVPRSDPNLSILPTEMLRTKKGDDIPESDNIEMAPLVNGT

SEQ ID NO: 25256 - DNA, 1518 bp, Medicago truncatula
  CDS (1)..(1518)
atgcaagaagaagagaatcaagaagattcaattccagaatctaagcaacaaaatgaagaaagaaagtcaaagggtgttaggatatggaagtgtttttgtattccaagtgaatggtttaaaatgctatcaagagaaatgcattggagttttgtttttggagttgttgttgtttatggaataagtcaaggtttaggtggtgctcttgctggtgttggaacaaaatattatatgaaagatgttcagaaagttcaaccttctgaagcacaggtttatgctggaattacatctattccttggattgttaagcctttatggggtcttcttactgatgttcttcctatttttggataccgtagaaaaccttatttcatttttgctggtttattaggagcaactgccatgcttttgttatcattccatgaaaaccttcatcttgtgttggcaattttggcattaacagcagggagtgctggagtggcgatagcagatgtgaccattgatgcatgtgttgcacagaacagtatctctcatccttcccttgcttctgacatgcaaagtttatgtgcctttagttcttctattggcgcactattaggattctctattagtggcatctttgttcaccttataggccctatgggggtgtttggtttgatgactatcccagctggacttatgattttggtcggctttctgcttgatgagcctcgtatacaaaacttctcttacagacaggtgagccaaaattttgtggatgccggcaaggctatgtggactacattgaagaatcaagatgtatggaggccttgtctatacatgtatttatcctttgcactgagtttgaatatccttgaaggaatgttttattggtatacagactcaaaggatggcccatctttctcacaggagagtataggtttcatattttcaatcagttcaattggttcccttttaggcgcaatactataccaatacgctctaaaggattacgcattcagagacttactcttttggactcagttgctctatggtctatcagggatgtttgatctaattttggtcatgagattgaacctgaagtttggtataccggactacgtctttgttgtgattgtcgaaagcattgctcaaatgactagtagactaaagtggatgcctatgcttgtactcagctcaaagctttgtccatctggcattgaaggaacattctttgctctattaatgtcaattgataatgctggacttctttcatcatcatggggtggtggatttgtacttcatgtactaaagattacaagaacaaagtttgataatctttggttagcgattttgattcggaatattttaagactcactccactttgcatgctgtttttggtgcctagagttgatcctaactctttcattcttcttccaaaagaaaatgtggattcaaaggtgattgctattgacgacgcttcagaaaccaaggatgttgaattggtgtctcttgtacacagtgttgatggtaatatataa

SEQ ID NO: 25257 - protein, 505 aa, Medicago truncatula
MQEEENQEDSIPESKQQNEERKSKGVRIWKCFCIPSEWFKMLSREMHWSFVFGVVVVYGISQGLGGALAGVGTKYYMKDVQKVQPSEAQVYAGITSIPWIVKPLWGLLTDVLPIFGYRRKPYFIFAGLLGATAMLLLSFHENLHLVLAILALTAGSAGVAIADVTIDACVAQNSISHPSLASDMQSLCAFSSSIGALLGFSISGIFVHLIGPMGVFGLMTIPAGLMILVGFLLDEPRIQNFSYRQVSQNFVDAGKAMWTTLKNQDVWRPCLYMYLSFALSLNILEGMFYWYTDSKDGPSFSQESIGFIFSISSIGSLLGAILYQYALKDYAFRDLLFWTQLLYGLSGMFDLILVMRLNLKFGIPDYVFVVIVESIAQMTSRLKWMPMLVLSSKLCPSGIEGTFFALLMSIDNAGLLSSSWGGGFVLHVLKITRTKFDNLWLAILIRNILRLTPLCMLFLVPRVDPNSFILLPKENVDSKVIAIDDASETKDVELVSLVHSVDGNI

SEQ ID NO: 25258 - DNA, 1305 bp, Arabidopsis thaliana
  CDS (1)..(1305)
atggcaagagaagagcaaaacattgaaaacagaggatccgtacatgtggtcgaaggagaaagtaatttacgtagtgtggtgtgtggtcctgtgcggtggctaaagatgttggcgtcaaagcttcactggagctatgtgtttgctgtggtctccaattgtggaataaaccaagggtttggttactcattgggtcatgtagctacagattattacatgaaagatgttcaaaaggttcagccttctcaatatcaagctctctctgcaatcactaggatttcatggatcatatttaagcctctttttggcattctcactgatgttcttcccatctttggtttccatagacgtccttacttcattttagcaggggtgattggagtggtttctttgttgtttatatcacttcaaagtaatctacatctttacttggcactgttttggatgacaatatcaagtgctgcaatggcgatagccgatgtaacaattgatgcttgtactacttacaatagtaacaaacacccttctcttgcatcggatatgcagagtttatgtagtttaagctattccattggagaacttcttggtttctttatgagtggtatcttagttcatcttgttggctccaagggcgtgttcggcttgttaacattcacattcgcattagtatcggtagtcggggtcttgtttagtgagcctcgtgttcatggtttctctttcaaacagaactttaccaatgcaatgaaagcgatgtggaggacaatcaagtgctcagatgtgtggcagccaagtctatatatgttcattacccgtgctcttggtttagacattaaagaaggtcttttctattggttcactgattcaaaagatggtcctttgtttgctcaggaaacggttggtttcattctctcaattggttctatagggtcgattctaggagtactgttgtacaacctacgcctaaaggatcatccgttccgtaaactatttttgtggactcaacttctctttgctttatcaggaatgtttgacctcattcttgtgctacgtctcaacttaaaatttggtttacctgattatctcttcatagtagtggacgggatagtttctaagatgatcatacgtctgacatggatggtgatattcgttctcaatacaaagctttgtcctcacggaattgaagggaccttttttgcgttgttaatgtcaattgacaatgcaggcctcatgacctcatcttggcttggagggaaaatgttgcatgtcctcaaggagatcagaacacgttcaagctcccggctgagataa

SEQ ID NO: 25259 - protein, 434 aa, Arabidopsis thaliana
MAREEQNIENRGSVHVVEGESNLRSVVCGPVRWLKMLASKLHWSYVFAVVSNCGINQGFGYSLGHVATDYYMKDVQKVQPSQYQALSAITRISWIIFKPLFGILTDVLPIFGFHRRPYFILAGVIGVVSLLFISLQSNLHLYLALFWMTISSAAMAIADVTIDACTTYNSNKHPSLASDMQSLCSLSYSIGELLGFFMSGILVHLVGSKGVFGLLTFTFALVSVVGVLFSEPRVHGFSFKQNFTNAMKAMWRTIKCSDVWQPSLYMFITRALGLDIKEGLFYWFTDSKDGPLFAQETVGFILSIGSIGSILGVLLYNLRLKDHPFRKLFLWTQLLFALSGMFDLILVLRLNLKFGLPDYLFIVVDGIVSKMIIRLTWMVIFVLNTKLCPHGIEGTFFALLMSIDNAGLMTSSWLGGKMLHVLKEIRTRSSSRLR

SEQ ID NO: 25260 - DNA, 1500 bp, Arabidopsis thaliana
  CDS (1)..(1500)
atggtagtagaagagcaaagccttgaaaacggcggatccgtacatgtggtcaaaggagaaagtaatttccgtaatgtggtgtgtggtcctgtacggtggctaaagatgttgtcttcagagcttcattggagctttgtgtttggtgtagtctcactatatggaattaaccaagggcttggtggctcattaggtcgtgtagctacagagtattatatgaaagatgttcaaaaagttcagccttctgaatctcaagctctcactgcaatcactaagattccatggatcattaaaccactttggggcattctcactgatgttcttcccatctttggtttccatagacgtccttacttcattttagcaggggtgcttggagtggtttcattgttgtttatttcactgcatagtaatctacacctttacttggcactgttttggatgacaatatcaagtgctgcaatggcgattgctgatgtaaccattgatgcttgtactgcttacaatagtatcaaacatccttctcttgcatcggatatgcagagtttatgcagtttaagctcttccattggagcacttcttggtttctttatgagtggcatcttagttcatcttgttggctctaagggtgtctttggattgctgacattcccattcgcgttagtatcggtagtcgggatcgtgtttagtgagccccatgttcctggtttctcttacaaacaggtgaaccagaaatttaccgatgcagggaaagcgatgtggaggacaatgaagtgttcagatgtgtggcggccgagtttgtatatgtacatttcccttactcttggtttgaacatacatgaaggtctcttctattggttcacagattcaaaggatggtcctttgtttgctcaggaaacagttggtttcattctctccattggttcaatcggatcgattctagcagcaacgttataccaactagtcctaaaggatcatccgttccgcggactttgtttgtggactcaacttctctttgctctatcgggaatgcttgacctcattcttgtgttccgtctcaacttaaaatttggtttaccggattatctcttcatagtagtggacgagatagtttctcagatgatcggacgcttgaaatggatgccgctgcttgtcctcacttcaaagctttgtccccacggaattgaagggacgttctttgcattgctaatgtcaattgacaatgcaggcctcatgacctcatcttggcttggagggataatgttgcatgtcctcaaggtgactcggactgagtttggtaacctgtggcttgcggttttggtcaggaatgtcatgagacttttgccgctttgttttctgtttcttgtgcctgaaggagatcaaaacacgttcaagctcccggatgagataatgggcgaagattcggacgaagagaaagatgaaaaagaaggaactcggaatttggaattggcttctcttgttcactctgttgatagaagatag

SEQ ID NO: 25261 - protein, 499 aa, Arabidopsis thaliana
MVVEEQSLENGGSVHVVKGESNFRNVVCGPVRWLKMLSSELHWSFVFGVVSLYGINQGLGGSLGRVATEYYMKDVQKVQPSESQALTAITKIPWIIKPLWGILTDVLPIFGFHRRPYFILAGVLGVVSLLFISLHSNLHLYLALFWMTISSAAMAIADVTIDACTAYNSIKHPSLASDMQSLCSLSSSIGALLGFFMSGILVHLVGSKGVFGLLTFPFALVSVVGIVFSEPHVPGFSYKQVNQKFTDAGKAMWRTMKCSDVWRPSLYMYISLTLGLNIHEGLFYWFTDSKDGPLFAQETVGFILSIGSIGSILAATLYQLVLKDHPFRGLCLWTQLLFALSGMLDLILVFRLNLKFGLPDYLFIVVDEIVSQMIGRLKWMPLLVLTSKLCPHGIEGTFFALLMSIDNAGLMTSSWLGGIMLHVLKVTRTEFGNLWLAVLVRNVMRLLPLCFLFLVPEGDQNTFKLPDEIMGEDSDEEKDEKEGTRNLELASLVHSVDRR

SEQ ID NO: 25262 - DNA, 1452 bp, Arabidopsis thaliana
  CDS (1)..(1452)
atgatacattggttgaagcagctgcgatcggcgtttggcgtcgcgtttctgtggctcgtttgtctcatttacttcactcaggctgtttcgtaccagctcaaagacaggctacagttatcaccatcagcttctcagtttgtcttttcggttgccttttttccatggagcataaaaccattatatggaatcatttcagattgtataccaattggagggaaaaagaggacgccgtatttggtgatatcgactgtgctctctcttgtgccatggctcgtgcttggtctagattcaacctcgagaagttcaagtctctatctgatgattttcttgactgtacaaaatctaggatcagctatggctgatgttgtgattgatgctatgatagctgaggcagtaagacttgaaaaggcttcgtttgctggagatcttcagtctgtatcatggtttgcaatggctgtgggtggagtatgcggtagtttattaggaggctatgcgttatctaacttgaagatagaaacaatattcctccttttcacggtactaccagcgttacaattactatcatgtgctctcgtcgaagaaagtcctgctaacaatgaaccattgcctgagttgttggattcaaacgagtttgaagagaaaagcttgacgagcaatgataactatccagatacgagtaagtccaatacaagaagaaggaaggggcagaagaaaggtaaaaaaggagattccaacggaaagtctgagacacagaagaagcaatcgaagtctttagcttcacagtggttccagtcactaaaagcagccacttttggtttgggccgtgcgtttaagcaaccgatcattttgagacctatggcatggtttttcattgcacatatcactgtgccaaatctctctaccgtcatgttctattaccaaaccgaggtcttgcaattagacgctgctttcctaggaactgcccgtgttgttggttggttaggtctcatgtttggaacctttatctacaatcgctatctgcaagatatgactctacgcaagtctctcctgtttgctcacatcgggctgtctgtaacgatactcctagatatggttctagtatcaagagctaatgtgggctacggagtttcagacaagacaatggtgctcttcggatcagctctaggtgatgccatcaatcaactcaaattcatgccgttcctgatcttgtctggtcgtctatgtccacctgggattgaaggaacactgtttgcgctgtttatgtcgataaacaacctaggaaacacagttggatcgttcatgggagcaggattggcttcacttctgggaatatcgtcagggtcgtttgacaatatgtttatgggcttagccattcaagtgttttgcacttatatacccgttttgtttcttttcttgattcccaaagaagctacaggagtatcagcatcatag

SEQ ID NO: 25263 - protein, 483 aa, Arabidopsis thaliana
MIHWLKQLRSAFGVAFLWLVCLIYFTQAVSYQLKDRLQLSPSASQFVFSVAFFPWSIKPLYGIISDCIPIGGKKRTPYLVISTVLSLVPWLVLGLDSTSRSSSLYLMIFLTVQNLGSAMADVVIDAMIAEAVRLEKASFAGDLQSVSWFAMAVGGVCGSLLGGYALSNLKIETIFLLFTVLPALQLLSCALVEESPANNEPLPELLDSNEFEEKSLTSNDNYPDTSKSNTRRRKGQKKGKKGDSNGKSETQKKQSKSLASQWFQSLKAATFGLGRAFKQPIILRPMAWFFIAHITVPNLSTVMFYYQTEVLQLDAAFLGTARVVGWLGLMFGTFIYNRYLQDMTLRKSLLFAHIGLSVTILLDMVLVSRANVGYGVSDKTMVLFGSALGDAINQLKFMPFLILSGRLCPPGIEGTLFALFMSINNLGNTVGSFMGAGLASLLGISSGSFDNMFMGLAIQVFCTYIPVLFLFLIPKEATGVSAS

SEQ ID NO: 25264 - DNA, 1584 bp, Oryza sativa
  CDS (1)..(1584)
atggatcgccaagaggaggaggacgacgacgcggcgcttcgagaagccggcggcggcgcctccttccccggcggctggctccggcgtctgtcccgcgagctgcactggagcttcgtgctcgccgtcgtggccgtctacggggcctgccagggtgtcggcgacgccgtcggcggcgtcgcggcggggtactactggaaggacgtgcagcgcgtgcagccgtcggcggcgcagttctaccaggggttcgtcagcgccccctgggtcgtcaagcccatctggggtctactcaccgacgtcgtccccgtcgccggctaccgccgccgcccgtacttcctcctcgccggagtgattggggcgtcgtccatgctcacgctctctctccaccgcaagctgggcatcatgccggcgatcttggcgctgacggcgcagagcgcgggcgcggcggtggccgacgtgacggtggacgcgctggttgctcagaacagcatcacgcaccagccgctagccgcagacatgcagagcctgtgtgggttcagctcctccgttggggcattgcttggattctccatcagtggtcttcttgtccactccatggggtctcagggtgctcttggattactaagcatcccttctgcactggtgttcttggctggtgttttgctgaaggagaggcgagttacagatttcgattacaagcaggttcataggaaattctacaaagcaattcagtccatgggggcaacactgaagtgtgccgaagtttggcggccgtgtgtgtatatgtatgtttctctcagtctaagcctggatatccaagcaggaatgttctactggtacactgatccaatagtgggaccaggattctctgaggaatttattggccttgtgtattcggtcggttcaatcggttcgctgctcggagttttactataccaaatttcactgaaggactgccctttccgcggcgtgctattctggggccaagttctttcaagcctggcaggaatgctcgatctgataatggtgacccggctcaacacaagaatcggcattccggattacgtctttgcggtgattgacaacagtgtctcccagatggttgggaggctcaaatggttgccgctcctcgtgctttgctccaagctttgtcctccaggcatcgaaggaactttctatgcgctgctcatgtccatccaaaatgccgggttgctgatgtctggctggtggggtggcctgatgctgcagttgctgaatgtgactcgaacggagttcagtaacctctgggttgccgtcctgatcagaaacttgtcgaggctgctcccgctgatgctgctgtttcttgttccccagagtgaccaaaactcaatgctcctcccggcagagatgcttcaggacaatgaatctactgaagctaggaaaggaggtcaagacactgctgaattttccgtccttgtcgcagatgattctagctgtcatgctctgaatgtggctgtcgaagatgaaagaatcaaagtggtcgatgctggaacgggtactgtggagttgattcctctcatgaacgagctacaagaccgtgggagttga

SEQ ID NO: 25265 - protein, 527 aa, Oryza sativa
MDRQEEEDDDAALREAGGGASFPGGWLRRLSRELHWSFVLAVVAVYGACQGVGDAVGGVAAGYYWKDVQRVQPSAAQFYQGFVSAPWVVKPIWGLLTDVVPVAGYRRRPYFLLAGVIGASSMLTLSLHRKLGIMPAILALTAQSAGAAVADVTVDALVAQNSITHQPLAADMQSLCGFSSSVGALLGFSISGLLVHSMGSQGALGLLSIPSALVFLAGVLLKERRVTDFDYKQVHRKFYKAIQSMGATLKCAEVWRPCVYMYVSLSLSLDIQAGMFYWYTDPIVGPGFSEEFIGLVYSVGSIGSLLGVLLYQISLKDCPFRGVLFWGQVLSSLAGMLDLIMVTRLNTRIGIPDYVFAVIDNSVSQMVGRLKWLPLLVLCSKLCPPGIEGTFYALLMSIQNAGLLMSGWWGGLMLQLLNVTRTEFSNLWVAVLIRNLSRLLPLMLLFLVPQSDQNSMLLPAEMLQDNESTEARKGGQDTAEFSVLVADDSSCHALNVAVEDERIKVVDAGTGTVELIPLMNELQDRGS

SEQ ID NO: 25266 - DNA, 1620 bp, Oryza sativa
  CDS (1)..(1620)
atgtcgccggccaccgccgccgccgacgacctccgcgccgaggaggaggggaagggggggaggagcagcagcaggcaagaggaggccaatgtcctcctcgccgtcgatgcggcggagggcggcggcgcgtggtcgccggtggggtggttcaggatgctggggagggagctgcactggagcttcgtggcgggcgtggtggcgacgtacggcgccagccaggggctcggcggcggcgtcatgcgggtggcgtcggactactactggaaggacgtgcagcgggtgcagccgtcggcggcgcaggtgtaccagggggtgacctccatcccgtggatggtcaagccgctctggggcctcctcaccgacgtcctccccatcgccggctaccgccgccgcccttacttcgtcatcgcaggcttcatgggagtagtcgcgatgcttgtattatctctccacagcaagcttcatgtattgttcgcgttgttggcattgatggccggaagtgctagtgtggcaatagccgatgtaactatagatgcctgtgttgctgaaaacagtatagtgcaccctcatcttgctgctgacatgataagcttaaacggattctgtgcatctgtgggagggcttattggattctcaataagtggtttccttgtccatgcaataggctctcaaggtgcccttggcatgttggcaataccttctgccctggtaatcctagctggaatgatgataaaggacgtccatatgcccaactttccatatgagctggcccatatgaagtttgtagaagcaagtagaacaatgatggcaaccttaaaatgtcctgaagtatggcgaccatgtgtttacatgtacatgtctcttgctttgagcgtggacattcaagaaggaatgttctattggtacacagatagaaatgcagggctatctttttcagagggattaattgggtttatcttcgcagttgggtcagttggttctcttattggggtcatactttaccaaaatattctgaaggaccattcttttcgcagcgttctctgtttaagtcagttgttgctgagcttgtcaggaatgcttgacctgatcttggtacttcgtctcaatctaaaactggggatacctgactactactttgctgtgatcgacgagggtgtctccaaaatgatcaaccgcataaaatggatgcctcttttggtacttagctcaaagctttgccctcctggcattgagggcacattctatgcgttgctcatgtccatcgacaatgttggcttgctatctggatcttgggcaggtggattgatccttcatgtgttgaacatcacaagaacagagttcaaaaacctctgggccgcgatcctaatccgaaatgcaatgaggttactacctttggccctgttgtttttggtgccgagaagtgaccagaactctaatctccttccagctgacttgctacctgaggatgatgctgcccaatatcaaatggacaatgttgagttaacctctcttacagtggatgggaaatcgagcaccggtagtttgcaccaagaatgcaaaaatcaggacgttgtcgaaaacgacgatgacgaggcttcactgcttgccaacaggagttga

SEQ ID NO: 25267 - protein, 539 aa, Oryza sativa
MSPATAAADDLRAEEEGKGGRSSSRQEEANVLLAVDAAEGGGAWSPVGWFRMLGRELHWSFVAGVVATYGASQGLGGGVMRVASDYYWKDVQRVQPSAAQVYQGVTSIPWMVKPLWGLLTDVLPIAGYRRRPYFVIAGFMGVVAMLVLSLHSKLHVLFALLALMAGSASVAIADVTIDACVAENSIVHPHLAADMISLNGFCASVGGLIGFSISGFLVHAIGSQGALGMLAIPSALVILAGMMIKDVHMPNFPYELAHMKFVEASRTMMATLKCPEVWRPCVYMYMSLALSVDIQEGMFYWYTDRNAGLSFSEGLIGFIFAVGSVGSLIGVILYQNILKDHSFRSVLCLSQLLLSLSGMLDLILVLRLNLKLGIPDYYFAVIDEGVSKMINRIKWMPLLVLSSKLCPPGIEGTFYALLMSIDNVGLLSGSWAGGLILHVLNITRTEFKNLWAAILIRNAMRLLPLALLFLVPRSDQNSNLLPADLLPEDDAAQYQMDNVELTSLTVDGKSSTGSLHQECKNQDVVENDDDEASLLANRS

SEQ ID NO: 25268 - DNA, 1515 bp, Oryza sativa
  CDS (1)..(1515)
atgccggaagaacaacaagaagcggaagaggggatcgccggcggcggcggcggatgggcgagcacggcgctgcagccggtgcggtggctgcggatgctgtgccgggagctgggcgcgacgttcgtcgccggcgtggtgctggtgtacgggctgagccaggggttcgccgggtccttcttccgcgtggcgtcggactactactggaaggacgtgcagcgggtgcagccggccaccgtgcagctcctctccgccgtcttcttcatcccctgggtcctcaagcccctctgggggatcatgaccgacgtcttccccgtccgcggctaccgccgccgcccctacttcctcttcgcaggagtacttggaacggcttcagctgctattgttaccatggttaatggactaccgatgacttccgctatactttcctttgtggggatatcaacagcagttgccatagcagatgttacaatagatgcatgcattgcgaagaatggtattgataagccatcattagtcccagacatgcaaagcctttgtgcattctcatcatctctaggtgcacttattgggtatgctacaagtggaatgtttgtccaccatcttggggcacagggtgcattaggtgtgatggctttacctcctgcaacgttggtttttctaggatttttcatatatgagctgaaaatgtatcagcataatgtgaaagagaaggttttgaataaggttcatatggcagtgaaagggatggctcagacaataaagtacccagtagtgtggaagccatccctgtacatgtttctttccctggcgcttagtatcagcactcatgagggacagttctactggtatactagcaaggaaccacctaatcctggattttctcaggaatttgttggtatggtccatgccatcggcgcagttgcatccatggtgggcgtcctggtgtaccacaagtacctcaaggactaccctttccggagcatcctcttctacgcgcagctgctgtacggcgtctccggcctcctcgacctcaccttcgtgctccggtggaacctcctcctcggcgtgcccgacgccgccttcgtcaccctggaggagtgctgcgcccgcgtcgtcggccgcgtcaggctgatgccgatgatggtgctcagcaccaagctgtgcccgccgggcgccgagggcaccttcttcgcgctgctcatgtgcatcgacagcgccggcatgctggcggccaaggccggcggcgccgccgtgctgcgcgcgctccgggtgaccaggaccgacttcgcccgcctctggctcgccgtcctcgtcaggaacctgctccggctgtccacgctcgccgccatctcgctcgtccccacggccgaccagaccgacgtgctcctgccgcgcgacctcctcgccgtcgccggcgacggctctcctcccgccgccggcgacggcgacgacgaggagaggctgcagctcgcgaaattcgctgatcacgtcgacgacgacgacgacgacgactga

SEQ ID NO: 25269 - protein, 504 aa, Oryza sativa
MPEEQQEAEEGIAGGGGGWASTALQPVRWLRMLCRELGATFVAGVVLVYGLSQGFAGSFFRVASDYYWKDVQRVQPATVQLLSAVFFIPWVLKPLWGIMTDVFPVRGYRRRPYFLFAGVLGTASAAIVTMVNGLPMTSAILSFVGISTAVAIADVTIDACIAKNGIDKPSLVPDMQSLCAFSSSLGALIGYATSGMFVHHLGAQGALGVMALPPATLVFLGFFIYELKMYQHNVKEKVLNKVHMAVKGMAQTIKYPVVWKPSLYMFLSLALSISTHEGQFYWYTSKEPPNPGFSQEFVGMVHAIGAVASMVGVLVYHKYLKDYPFRSILFYAQLLYGVSGLLDLTFVLRWNLLLGVPDAAFVTLEECCARVVGRVRLMPMMVLSTKLCPPGAEGTFFALLMCIDSAGMLAAKAGGAAVLRALRVTRTDFARLWLAVLVRNLLRLSTLAAISLVPTADQTDVLLPRDLLAVAGDGSPPAAGDGDDEERLQLAKFADHVDDDDDDD

SEQ ID NO: 25270 - DNA, 1554 bp, Zea mays
  CDS (1)..(1554)
atggcctccgtggggtgggctgcacgtgacgcgtacgacgaggaggccgccgtccgccgccctctcgagctcgatggccgtggcgtcgccgcctcgtcctccgaccactggcccggtgggaatgtcatgcctaggtatcaggtgggcttgacaaagggtgattcaagtagtagacgacactctgaggagtggcggcagcctagcacagatgatgtgcgcatgagcaagctggggtcgagatatttcacggcgtttggggtggatctgtcccctgataatatggcagttgccattgtctattttgtgcaaggggttttgggtcttgcacggcttgctgtgagcttttacttgaaagatgatcttcatctagatccagctgagactgcagtggtatctggtttctcgtccttgccgtggttgatcaagcccctctatggctttatcagtgattccattccactctttggatatcgaaggaggtcgtatctttttctgtcagggttacttggagcactttcatggagtttaatggccacagtagtgagcagtaaatacagtgcagcattctctattcttcttggctcactttctgttgccttctcagatgttgtagtggattctatggttgttgagagagcccgtggagaatctcatagtacatctggatcactccagtcgctctgttggggatcttctgcctttggaggaattgtgagtgcttacttcagcggttcgcttgtggatacttatggagtaagatttgtctttggtgtaacagcgtttttacccctgatgacatctgctgttgcagttcttgtaaatgaacatcgcatatcttctggagaacgtactaccttacactctggttcaggattcgttgagagttctaagcagcacgtcaggcagctttggacttcagtaaagcagcctaacatattgttgccgaccttgtttatatttctttggcaagcaacaccacagtcagattctgctatgtttttcttcatcacaaataagcttggattcacaccagagtttctagggcgtgtgaagcttgtaacctcctttgcatccctgctcggtgttgggctctacaactattttctgaaggaagttcctctaaggaaaatatttctcgtgacaaccattataggttcagctcttgggatgacacaggtgcttcttgtaactgggctaaatcggaagtttgggattagtgacgagtggttttctattggtgattcattaatcatcacagtccttggtcaggcttcatttatgccagtcttggtgttagctgcaaaactgtgccctccaggaatggaagccactttatttgcaactttgatgtcaatttctaatgctggaagtgttactggtggtctggttggtgctggtctaactcggatatttggggtcaccagggacacctttgggaacctacctctattgattgtcgtctgcaatcttagttcgctgctgcccttacctcttctaagtctcctgccagaggaatcaggtgacacagacaatggagaaacaaagaatatctga

SEQ ID NO: 25271 - protein, 517 aa, Zea mays
MASVGWAARDAYDEEAAVRRPLELDGRGVAASSSDHWPGGNVMPRYQVGLTKGDSSSRRHSEEWRQPSTDDVRMSKLGSRYFTAFGVDLSPDNMAVAIVYFVQGVLGLARLAVSFYLKDDLHLDPAETAVVSGFSSLPWLIKPLYGFISDSIPLFGYRRRSYLFLSGLLGALSWSLMATVVSSKYSAAFSILLGSLSVAFSDVVVDSMVVERARGESHSTSGSLQSLCWGSSAFGGIVSAYFSGSLVDTYGVRFVFGVTAFLPLMTSAVAVLVNEHRISSGERTTLHSGSGFVESSKQHVRQLWTSVKQPNILLPTLFIFLWQATPQSDSAMFFFITNKLGFTPEFLGRVKLVTSFASLLGVGLYNYFLKEVPLRKIFLVTTIIGSALGMTQVLLVTGLNRKFGISDEWFSIGDSLIITVLGQASFMPVLVLAAKLCPPGMEATLFATLMSISNAGSVTGGLVGAGLTRIFGVTRDTFGNLPLLIVVCNLSSLLPLPLLSLLPEESGDTDNGETKNI

SEQ ID NO: 25272 - DNA, 1554 bp, Zea mays
  CDS (1)..(1554)
atggcctccgtggggtgggctgcacgcgacgcgtacgacgaggaggccgcagtccgccgccctctcgagctcgagggccgtggcgtcgccgcatcgtcctccgaccaccggcccggcgggaatgtcatgcctaggtatcaagtgggctcgacaaagggtgattcaagtagtagacgacactctgaggagtggcggcaacctagcacagatgatgtgcgcatgagcaagccggagtcgagatatttcacggcgtttggggtggatctgtcccctgataatatggcagttgccattgtatattttgtgcaaggggttttaggtcttgcacggcttgctgtgagcttttacttgaaagatgatcttcatctagatccagctgagactgcagtggtatctggtttctcgtccttgccgtggctgatcaagcccctctatggctttatcagtgattccattccactctttggatatcgaagaaggtcatatctttttctgtcagggttacttggagcactttcatggagcttaatggccacagtagtgagcagtaaatacagcgcagcattctctattcttcttggctcactttctgttgccttctcagatgttgtagtggattctatggttgttgagagagcccgtggagaatctcaaagtacatctggatcactccagtcactctgttggggatcttctgcctttggaggaattgtgagtgcttatttcagtggttcacttgtggatacttatggagtaagatttgtctttggtgttacagcgtttttacccctgatgacatctgctgttgcagttcttgtaaatgaacatggcattccttctggagaacacaatacctttctctctggttccggatttgttgagagctctaagcagcatgtcaggcagctttgggcttcagtaaagcaacctaacattttgttgccgaccttgtttatatttctttggcaagcaacaccgcagtcagattctgctatgtttttcttcatcacaaataagcttggattcactccggagtttctagggcgcgtgaagcttgtaacctcttttgcatccctgcttggtgttgggctctacaactattttctgaaggaagttgctctgaggaagatttttcttgtgacaaccattataggttcagctcttgggatgacacaggtgcttcttgtaactgggctaaatcggcagcttgggatcagcgatgagtggttttctattggtgattcattaatcatcacagtccttggtcaggcatcgtttatgccagtcttggtgttagctgcaaagttgtgccctccaggaatggaagccactttatttgcaactttgatgtccatttctaatgctggaagtgttactggtggtctggttggtgctggtctaactcggatatttggggtcactagggatacctttgggaacctacctctgttgattgtcgtctgcaatcttagttcattgctgcccttacctcttttaggtctccttccagagggatcaggtgacaccgataacggagaaacaaaaaataactga

SEQ ID NO: 25273 - protein, 517 aa, Zea mays
MASVGWAARDAYDEEAAVRRPLELEGRGVAASSSDHRPGGNVMPRYQVGSTKGDSSSRRHSEEWRQPSTDDVRMSKPESRYFTAFGVDLSPDNMAVAIVYFVQGVLGLARLAVSFYLKDDLHLDPAETAVVSGFSSLPWLIKPLYGFISDSIPLFGYRRRSYLFLSGLLGALSWSLMATVVSSKYSAAFSILLGSLSVAFSDVVVDSMVVERARGESQSTSGSLQSLCWGSSAFGGIVSAYFSGSLVDTYGVRFVFGVTAFLPLMTSAVAVLVNEHGIPSGEHNTFLSGSGFVESSKQHVRQLWASVKQPNILLPTLFIFLWQATPQSDSAMFFFITNKLGFTPEFLGRVKLVTSFASLLGVGLYNYFLKEVALRKIFLVTTIIGSALGMTQVLLVTGLNRQLGISDEWFSIGDSLIITVLGQASFMPVLVLAAKLCPPGMEATLFATLMSISNAGSVTGGLVGAGLTRIFGVTRDTFGNLPLLIVVCNLSSLLPLPLLGLLPEGSGDTDNGETKNN

SEQ ID NO: 25274 - DNA, 1563 bp, Zea mays
  CDS (1)..(1563)
atgctctgcctctcgctgtgcgcaccgcaccttcacctccacctcccccgcagcccgaccgcacgacccgccgccgccacgtgcaggaacgcgcgctgcatcggcgtcacgctatgcctccggatgccgacgacaccggaggaacggcggcagaagcgcgggctggcccagttcctggacttatcggccgcgccgacactcacgccacccgcgcccacgcccgtgcatctcacgcccgcggccaaacggcgcggggcgctgcgggagatgcgccgggtgtggtgggtgtgcggggtcgggtactgggtgcaggggttccgctgcttcccgtggctggcactcaacttccacctcacgcgcggcatggggctcagccccgccggcctgcaactcctgcagaacgctgggagcctcccgctcgtcgccaagccgctcttcggggtcctctccgatgccgtctacatcggccgcgcccaccgcataccctacatctcccttggagtgtggctgcagctcattgcttggggagtacttgcaaccattccagttacaggggatgcgtttccaactctaatggcatgcattctcattggaaatctaggagcatctgtcacagaagtcgtaagtgatgctgttgtcacggagttcagtaggacacagaaggctggtgtactacagtcatatgcattcgtagccctggctgcaggatccttgctggggaacttgtctggtggttacattctgcttaaaacacaggaaccaaagatcatgttcacagcattctcagtccttcttggcttccagctagcactgtccctaagtacaaaagagacattgccaagctctcgaggaaactccagaaatcgtcttgtcaaaagctctttggcagctaacttccgcaagcaattctcaaacttgatgacagcgatcagagaggaaaggatcttataccctcttgcatggatcatgacatcctttgctgttgtgcctgttctttctggaaccatgttctgctttcaaacacagtatttgaatctcgatccatcggttattggtctatcgaaagttgtgggacaggtcatggtcttatcactaactgtactctacaatcgatatcttaaaaggataccactgaggtgccttaccacaggacttcagatactatatgctctggcagttttgtcagatttgatccttgtgaaacaagtaaaccttgtgctagggataccgaacgagattcatgttctttgcttctcagctctagctgaagctctagctcagttcaaggtattgccattctcggttttgttgtcaagtctctgcccaccaggctgtgaaggttctttgttcgccttcttcacatctggactggtgctttcagcaatacttagtggagtattcggagttggattgtccaccctgatcggtgtgtcttctgtggactactccagcttgcctttgggtattttgctgcaaagtttggctgcattgctaccgttgggatggatatcctttgtgcctgagaaatggactgccgatgacacggttgtaataaaaagatga

SEQ ID NO: 25275 - protein, 520 aa, Zea mays
MLCLSLCAPHLHLHLPRSPTARPAAATCRNARCIGVTLCLRMPTTPEERRQKRGLAQFLDLSAAPTLTPPAPTPVHLTPAAKRRGALREMRRVWWVCGVGYWVQGFRCFPWLALNFHLTRGMGLSPAGLQLLQNAGSLPLVAKPLFGVLSDAVYIGRAHRIPYISLGVWLQLIAWGVLATIPVTGDAFPTLMACILIGNLGASVTEVVSDAVVTEFSRTQKAGVLQSYAFVALAAGSLLGNLSGGYILLKTQEPKIMFTAFSVLLGFQLALSLSTKETLPSSRGNSRNRLVKSSLAANFRKQFSNLMTAIREERILYPLAWIMTSFAVVPVLSGTMFCFQTQYLNLDPSVIGLSKVVGQVMVLSLTVLYNRYLKRIPLRCLTTGLQILYALAVLSDLILVKQVNLVLGIPNEIHVLCFSALAEALAQFKVLPFSVLLSSLCPPGCEGSLFAFFTSGLVLSAILSGVFGVGLSTLIGVSSVDYSSLPLGILLQSLAALLPLGWISFVPEKWTADDTVVIKR

SEQ ID NO: 25276 - DNA, 1554 bp, Zea mays
  CDS (1)..(1554)
atggcctccgtggggtgggctgcacgcgacgcgtacgacgaggaggccgcagtccgccgccctctcgagctcgagggccgtggcgtcgccgcatcgtcctccgaccaccggcccggcgggaatgtcatgcctaggtatcaagtgggctcgacaaagggtgattcaagtagtagacgacactctgaggagtggcggcaacctagcacagatgatgtgcgcatgagcaagccggggtcgagatatttcacggcgtttggggtggatctgtcccctgataatatggcagttgccattgtatattttgtgcaaggggttttaggtcttgcacggcttgctgtgagcttttacttgaaagatgatcttcatctagatccagctgagactgcagtggtatctggtttctcgtccttgccgtggctgatcaagcccctctatggctttatcagtgattccattccactctttggatatcgaagaaggtcatatctttttctgtcagggttacttggagcactttcatggagcttaatggccacagtagtgagcagtaaatacagcgcagcattctctattcttcttggctcactttctgttgccttctcagatgttgtagtggattctatggttgttgagagagcccgtggagaatctcaaagtacatctggatcactccagtcactctgttggggatcttctgcctttggaggaattgtgagtgcttatttcagtggttcacttgtggatacttatggagtaagatttgtctttggtgttacagcgtttttacccctgatgacatctgctgttgcagttcttgtaaatgaacatggcattccttctggagaacacaatacctttctctctggttccggatttattgagagctctaagcagcatgtcaggcagctttggacttcagtaaagcaacctaacattttgttgccgaccttgtttatatttctttggcaagcaacaccgcagtcagattctgctatgtttttcttcatcacaaataagcttggattcactccagagtttctagggcgtgtgaagcttgtaacctcctttgcatccctgctcggtgttgggctctacaactattttctgaaggaagttcctctaaggaaaatatttctcgtgacaaccattataggttcagctcttgggatgacacaggtgcttcttgtaactgggctaaatcggaagtttgggattagtgacgagtggttttctattggtgattcattaatcatcacagtccttggtcaggcttcatttatgccagtcttggtgttagctgcaaaactgtgccctccaggaatggaagccactttatttgcaactttgatgtcaatttctaatgctggaagtgttactggtggtctggttggtgctggtctaactcggatatttggggtcaccagggacacctttgggaacctacccctattgattgtcgtctgcaatcttagttcgctgctgcccttacctcttctaagtctcctgccagaggaatcaggtgacacagacaatggagaaacaaagaatatctga

SEQ ID NO: 25277 - protein, 517 aa, Zea mays
MASVGWAARDAYDEEAAVRRPLELEGRGVAASSSDHRPGGNVMPRYQVGSTKGDSSSRRHSEEWRQPSTDDVRMSKPGSRYFTAFGVDLSPDNMAVAIVYFVQGVLGLARLAVSFYLKDDLHLDPAETAVVSGFSSLPWLIKPLYGFISDSIPLFGYRRRSYLFLSGLLGALSWSLMATVVSSKYSAAFSILLGSLSVAFSDVVVDSMVVERARGESQSTSGSLQSLCWGSSAFGGIVSAYFSGSLVDTYGVRFVFGVTAFLPLMTSAVAVLVNEHGIPSGEHNTFLSGSGFIESSKQHVRQLWTSVKQPNILLPTLFIFLWQATPQSDSAMFFFITNKLGFTPEFLGRVKLVTSFASLLGVGLYNYFLKEVPLRKIFLVTTIIGSALGMTQVLLVTGLNRKFGISDEWFSIGDSLIITVLGQASFMPVLVLAAKLCPPGMEATLFATLMSISNAGSVTGGLVGAGLTRIFGVTRDTFGNLPLLIVVCNLSSLLPLPLLSLLPEESGDTDNGETKNI

SEQ ID NO: 25278 - DNA, 21 bp, Artificial sequence
  primer
atggaaacactagaaactgag

SEQ ID NO: 25279 - DNA, 22 bp, Artificial sequence
  primer
ttacagaagcaaaagtttaatg

SEQ ID NO: 25280 - protein, 459 aa, Artificial sequence
  consensus sequence
  Variant (2)..(6): Xaa in position 2 to 6 is any amino acid
  Variant (9)..(13): Xaa in position 9 to 13 is any amino acid
  Variant (15)..(22): Xaa in position 15 to 22 is any amino acid
  Variant (23)..(26): Xaa in position 23 to 26 is any or no amino acid
  Variant (29)..(30): Xaa in position 29 to 30 is any amino acid
  Variant (31)..(31): Xaa in position 31 is any or no amino acid
  Variant (35)..(35): Xaa in position 35 is any amino acid
  Variant (37)..(39): Xaa in position 37 to 39 is any amino acid
  Variant (41)..(42): Xaa in position 41 to 42 is any amino acid
  Variant (44)..(45): Xaa in position 44 to 45 is any amino acid
  Variant (47)..(48): Xaa in position 47 to 48 is any amino acid
  Variant (50)..(50): Xaa in position 50 is any amino acid
  Variant (53)..(56): Xaa in position 53 to 56 is any amino acid
  Variant (58)..(62): Xaa in position 58 to 62 is any amino acid
  Variant (63)..(79): Xaa in position 63 to 79 is any or no amino acid
  Variant (81)..(81): Xaa in position 81 is any amino acid
  Variant (82)..(87): Xaa in position 82 to 87 is any or no amino acid
  Variant (89)..(91): Xaa in position 89 to 91 is any amino acid
  Variant (93)..(94): Xaa in position 93 to 94 is any amino acid
  Variant (97)..(98): Xaa in position 97 to 98 is any amino acid
  Variant (100)..(114): Xaa in position 100 to 114 is any amino acid
  Variant (115)..(117): Xaa in position 115 to 117 is any or no amino acid
  Variant (121)..(127): Xaa in position 121 to 127 is any amino acid
  Variant (129)..(135): Xaa in position 129 to 135 is any amino acid
  Variant (138)..(149): Xaa in position 138 to 149 is any amino acid
  Variant (150)..(156): Xaa in position 150 to 156 is any or no amino acid
  Variant (158)..(174): Xaa in position 158 to 174 is any amino acid
  Variant (176)..(185): Xaa in position 176 to 185 is any amino acid
  Variant (186)..(258): Xaa in position 186 to 258 is any or no amino acid
  Variant (260)..(265): Xaa in position 260 to 265 is any amino acid
  Variant (267)..(283): Xaa in position 267 to 283 is any amino acid
  Variant (284)..(284): Xaa in position 284 is any or no amino acid
  Variant (286)..(288): Xaa in position 286 to 288 is any amino acid
  Variant (290)..(293): Xaa in position 290 to 293 is any amino acid
  Variant (294)..(297): Xaa in position 294 to 297 is any or no amino acid
  Variant (299)..(301): Xaa in position 299 to 301 is any amino acid
  Variant (302)..(303): Xaa in position 302 to 303 is any or no amino acid
  Variant (305)..(313): Xaa in position 305 to 313 is any amino acid
  Variant (315)..(316): Xaa in position 315 to 316 is any amino acid
  Variant (318)..(320): Xaa in position 318 to 320 is any amino acid
  Variant (322)..(324): Xaa in position 322 to 324 is any amino acid
  Variant (327)..(330): Xaa in position 327 to 330 is any amino acid
  Variant (332)..(344): Xaa in position 332 to 344 is any amino acid
  Variant (346)..(351): Xaa in position 346 to 351 is any amino acid
  Variant (353)..(355): Xaa in position 353 to 355 is any amino acid
  Variant (357)..(359): Xaa in position 357 to 359 is any amino acid
  Variant (361)..(362): Xaa in position 361 to 362 is any amino acid
  Variant (364)..(365): Xaa in position 364 to 365 is any amino acid
  Variant (367)..(383): Xaa in position 367 to 383 is any amino acid
  Variant (385)..(386): Xaa in position 385 to 386 is any amino acid
  Variant (389)..(391): Xaa in position 389 to 391 is any amino acid
  Variant (395)..(395): Xaa in position 395 is any amino acid
  Variant (397)..(397): Xaa in position 397 is any amino acid
  Variant (399)..(399): Xaa in position 399 is any amino acid
  Variant (401)..(402): Xaa in position 401 to 402 is any amino acid
  Variant (404)..(404): Xaa in position 404 is any amino acid
  Variant (409)..(411): Xaa in position 409 to 411 is any amino acid
  Variant (413)..(419): Xaa in position 413 to 419 is any amino acid
  Variant (421)..(429): Xaa in position 421 to 429 is any amino acid
  Variant (431)..(431): Xaa in position 431 is any amino acid
  Variant (432)..(433): Xaa in position 432 to 433 is any or no amino acid
  Variant (435)..(436): Xaa in position 435 to 436 is any amino acid
  Variant (438)..(443): Xaa in position 438 to 443 is any amino acid
  Variant (444)..(448): Xaa in position 444 to 448 is any or no amino acid
  Variant (450)..(458): Xaa in position 450 to 458 is any amino acid
AXXXXXKDXXXXXPXXXXXXXXXXXXPWXXXKPLXGXXXDXXPXXGXXRXPYXXXXGXXXXXXXXXXXXXXXXXXXXXXAXXXXXXXSXXXAXXDVXXDXXXXXXXXXXXXXXXXXXQSLXXXXXXXGXXXXXXXSGXXXXXXXXXXXXXXXXXXXGXXXXXXXXXXXXXXXXXEXXXXXXXXXXXXXXXXXXXXXXXXXXXXXXXXXXXXXXXXXXXXXXXXXXXXXXXXXXXXXXXXXXXXXXXXXXXXXXXXXXXKXXXXXXPXXXXXXXXXXXXXXXXXXFXXXTXXXXXXXXFXXXXXGXXXXXXXXXSXXGXXXYXXXLKXXXXRXXXXXXXXXXXXXGXXXXXXVXXXNXXXGXXDXXFXXXXXXXXXXXXXXXXXPXXVLXXXLCPXGXEXTXXAXLMSIXXXGXXXXXXXGXXXXXXXXXTXXXFXXLXXXXXXXXXXXLXXXXXXXXXP

SEQ ID NO: 25281 - protein, 31 aa, Artificial sequence
  protein pattern
  Variant (2)..(2): Xaa in position 2 is any amino acid
  Variant (3)..(5): Xaa in position 3 to 5 is any or no amino acid
  Variant (7)..(7): Xaa in position 7 is any amino acid
  Variant (8)..(8): Xaa in position 8 is any or no amino acid
  Variant (10)..(10): Xaa in position 10 is Ala, Glu or Gly
  Variant (11)..(11): Xaa in position 11 is Ile or Leu
  Variant (12)..(12): Xaa in position 12 is Ile, Leu or Val
  Variant (13)..(13): Xaa in position 13 is Gly, Ser or Thr
  Variant (14)..(16): Xaa in position 14 to 16 is any amino acid
  Variant (19)..(19): Xaa in position 19 is any amino acid
  Variant (20)..(20): Xaa in position 20 is Phe or Leu
  Variant (21)..(21): Xaa in position 21 is Leu or Val
  Variant (22)..(22): Xaa in position 22 is Asp, Glu or His
  Variant (23)..(24): Xaa in position 23 to 24 is any amino acid
  Variant (25)..(25): Xaa in position 25 is Gly, Ser or Thr
  Variant (26)..(28): Xaa in position 26 to 28 is any amino acid
  Variant (29)..(29): Xaa in position 29 is Ala, Asn or Val
  Variant (30)..(30): Xaa in position 30 is Phe or Leu
  Variant (31)..(31): Xaa in position 31 is Gly, Leu or Val
CXXXXSXXGXXXXXXXSGXXXXXXXXXXXXX

SEQ ID NO: 25282 - protein, 29 aa, Artificial sequence
  protein pattern
  Variant (2)..(2): Xaa in position 2 is any amino acid
  Variant (3)..(4): Xaa in position 3 to 4 is any or no amino acid
  Variant (6)..(6): Xaa in position 6 is any amino acid
  Variant (7)..(7): Xaa in position 7 is any or no amino acid
  Variant (10)..(12): Xaa in position 10 to 12 is any amino acid
  Variant (13)..(13): Xaa in position 13 is Ile, Leu or Val
  Variant (14)..(14): Xaa in position 14 is Asp, Gln or Ser
  Variant (16)..(16): Xaa in position 16 is Ala or Ser
  Variant (17)..(18): Xaa in position 17 to 18 is any amino acid
  Variant (19)..(19): Xaa in position 19 is Ala or Gln
  Variant (20)..(22): Xaa in position 20 to 22 is any amino acid
  Variant (23)..(23): Xaa in position 23 is Ala, Gly or Ser
  Variant (24)..(24): Xaa in position 24 is Phe, Ile, Leu, Met or Val
  Variant (25)..(27): Xaa in position 25 to 27 is any amino acid
  Variant (28)..(28): Xaa in position 28 is Pro or Ser
VXXXYXXKDXXXXXPXXXXXXXXXXXXXW

SEQ ID NO: 25283 - DNA, 387 bp, Arabidopsis thaliana
  CDS (1)..(387)
atggaagacaatgataagtctccccctaaggattactataagattctagaagttgattacgacgcaactgaggaattgatcagactcaattatcggaagcttgcattgaagtggcatcctgataagcacaaaggcgatagtgcagctacagaaaaatttcaagagattaatgaagcttataatgtgctgatggaccctgctaaacgttttgagtatgatttcactggtatatatgagatccacaaatacactttacgggaatatctcgccagatttaagggaatgatactcacttgcaatgggctcggtatcagccaatcctcatcaccatggacacatcaattggctgagaccaccaaacaacagacgagcaaggatactgtataa

SEQ ID NO: 25284 - protein, 128 aa, Arabidopsis thaliana
MEDNDKSPPKDYYKILEVDYDATEELIRLNYRKLALKWHPDKHKGDSAATEKFQEINEAYNVLMDPAKRFEYDFTGIYEIHKYTLREYLARFKGMILTCNGLGISQSSSPWTHQLAETTKQQTSKDTV

SEQ ID NO: 25285 - DNA, 408 bp, Glycine max
  CDS (1)..(408)
atgtattatgtaaaagaagctgcgcatgtcgaccccatgttcgtagctgataacaccaaccccaaggattattacaaagtgctggaggttgaatatgatgcaaccgatgaaaatatcaaattaaattaccgaagactcgcgctgaaatggcatcctgacaagcacggaggagatagtgctgttactgcaaaatttcaagagataaatgaagcttacaatgtattaagtgatcctaccaagcgtttggactatgatttaactgggatatgcgagattgaaaaatatagcttgcaggagtatcttgccagatttaaaagcatgattcttacctgcaatggacttggtatcaatcagacagacagatggtctcagcaattgattgaaaattttgagtccctagataaataa

SEQ ID NO: 25286 - protein, 135 aa, Glycine max
MYYVKEAAHVDPMFVADNTNPKDYYKVLEVEYDATDENIKLNYRRLALKWHPDKHGGDSAVTAKFQEINEAYNVLSDPTKRLDYDLTGICEIEKYSLQEYLARFKSMILTCNGLGINQTDRWSQQLIENFESLDK

SEQ ID NO: 25287 - DNA, 660 bp, Sorghum bicolor
  CDS (152)..(520)
caagaactcctccgatcccacctgtccatcgatcgatcgacttccgttcccctcggaatcgaggcggccccgagaatcccaacgcacgagaagaggaacaagggaaccaggcggagcgaagagagcccggggtgatgaattgttacggtttatggacggagcaagcaaggagcctctccgcaaggactactacaaagttctggaggttgattatgacgcttctgatgacaccatcaagttgagttatagaagattagctttgatgtggcatccagacaagcataagggtgataatgatgtcacagctaaatttcaggagattaatgaagcatacaaggttttaagtgacccagctaagcgactagaatacgatgtttctggttgttatgagattgatcaatatactttgcgtgagtaccttgcaaaatttaagggtatgatacttacctgtaatggccttggcatagatcatccttctagtaaatgggcccgacatttgagggaactgaagccccattgatcgacggcaaattattgtaatattgttgactctcgttggatttactcagcacagtaagacacaattgtgttgtatcacaaacaatgattcccttgtcacttctgggcaataatgcatgtatagtaagggtctattttgtt

SEQ ID NO: 25288 - protein, 122 aa, Sorghum bicolor
MDGASKEPLRKDYYKVLEVDYDASDDTIKLSYRRLALMWHPDKHKGDNDVTAKFQEINEAYKVLSDPAKRLEYDVSGCYEIDQYTLREYLAKFKGMILTCNGLGIDHPSSKWARHLRELKPH

SEQ ID NO: 25289 - DNA, 686 bp, Zea mays
  CDS (209)..(574)
cctcgaggccggccgggccgggaaaacaaaggaaaacagaaaagctgcggaagttgtcaagaactccgacgatcccacatatccgtcaatcgatcgactcccgttcccctcggaatcgaaatggccccgagaattccaacgcacaagaaggggaacaagggaaccaggcatcgcgaagagagcccggggtgatgaattgttacggttcatggacggagcaagcaaggagcctctccgcaaggactactacaaagttctggaggttgactatgacgcatctgatgacaccatcaaattgagttatagaagattagctttgatgtggcatccggacaagcacaagggcaatagcaatgccacaactaaacttcaggagattaatgacgcatacaaagttttgagtgacccaactaagcgactagaatacgatgtttccggttgctacgagatcgaccaatatactttgcgtgagtaccttacaaaatttaagggtatgatacttacctgtaatggccttggcatagaccattcttctaagtgggcccgacatttgagggaactgaaacctcattgatcaacggggtatggatttactgctctatgtaagacacaatgtgctgtatcacaattcacaaacaatggccccctactccccgaaaaaaaaaaaaaaaaaggcccctagggcc

SEQ ID NO: 25290 - protein, 121 aa, Zea mays
MDGASKEPLRKDYYKVLEVDYDASDDTIKLSYRRLALMWHPDKHKGNSNATTKLQEINDAYKVLSDPTKRLEYDVSGCYEIDQYTLREYLTKFKGMILTCNGLGIDHSSKWARHLRELKPH

SEQ ID NO: 25291 - DNA, 372 bp, Zea mays subsp. mays
  CDS (1)..(372)
atggctgccgctgataacaccaacccaaaggattattacaaagtgctggaggttgaatatgatgcaaccgatgaaaatatcaaattaaattaccgaagactcgcgttgaaatggcatcctgacaagcacggaggtgatagtgctgttactgcaaaatttcaagagattattgaagcttacaatgtattaagtgatcctgccaagcgtttggactatgatttaactgggatatgtgagattgaaaaatatagcttgcaggaatatcttgccagatttaaaagcatgattcttacctgcaatggacttggtatcaatcagacagacagatggtcacaacaattgattgaaaattttgagtccctagataaataa

SEQ ID NO: 25292 - protein, 123 aa, Zea mays subsp. mays
MAAADNTNPKDYYKVLEVEYDATDENIKLNYRRLALKWHPDKHGGDSAVTAKFQEIIEAYNVLSDPAKRLDYDLTGICEIEKYSLQEYLARFKSMILTCNGLGINQTDRWSQQLIENFESLDK

SEQ ID NO: 25293 - DNA, 366 bp, Oryza sativa (japonica cultivar-group)
  CDS (1)..(366)
atggacggagcaagcgagaagcctccccacaaggactattacaaagttctggaggttgattacgatgcatccgatgacaccatcaaattgagttatagaagattagctttgatgtggcatccagacaagcataagggggataatgatgtcacagctaaatttcaggagatcaatgaagcctacacagttctaagtgatccagctaagcgccttgaatacgacctttccggatgttatgagttaaatcgatatactttgcgtgagtaccttacaaggtttaagggtatgatacttacctgcaatggtcttggcatagaccattcttcaaaatgggcccggcatttgagggaattggagccccattga

SEQ ID NO: 25294 - protein, 121 aa, Oryza sativa (japonica cultivar-group)
MDGASEKPPHKDYYKVLEVDYDASDDTIKLSYRRLALMWHPDKHKGDNDVTAKFQEINEAYTVLSDPAKRLEYDLSGCYELNRYTLREYLTRFKGMILTCNGLGIDHSSKWARHLRELEPH

SEQ ID NO: 25295 - DNA, 492 bp, Oryza sativa (japonica cultivar-group)
  CDS (1)..(492)
atgtggtgggagtgggaggaggacggcgaggaggcggcgcggccgggggaggaggtccccgtcgacttcgacttcatctccctcctctgcaagcccaaggattactacaagattctggaagtgggatatgatgcgtcggaagaggcgatcaggtcgagctatatacgtcttgcactgaagtggcaccctgacaagaagcagggcgaagaaaatgcaacctccagatttcaggagattaatgaagcataccaagtgctcagtaatccagccaaaaggcgagagtatgacaagaaaggcattctttatgttcaagatcataatgtagtgcacggtcatgcggacctgccacttttgggaggaaatgatgacgctgagttcatcctgtgttttgacaaatggaaagtggtcggaagggaattagggaaaatatcagctgatctgttggtgacactgcttctcccactcaattttcaatgtgtcaaaactcaatag

SEQ ID NO: 25296 - protein, 163 aa, Oryza sativa (japonica cultivar-group)
MWWEWEEDGEEAARPGEEVPVDFDFISLLCKPKDYYKILEVGYDASEEAIRSSYIRLALKWHPDKKQGEENATSRFQEINEAYQVLSNPAKRREYDKKGILYVQDHNVVHGHADLPLLGGNDDAEFILCFDKWKVVGRELGKISADLLVTLLLPLNFQCVKTQ

SEQ ID NO: 25297 - DNA, 441 bp, Arabidopsis thaliana
  CDS (1)..(441)
atggaaggtggcattaggcaaacgtattacgagattctcggtgttgccgttgattcttcggcggagcagatacgacgagcatatcacaagcttgctaagatatggcatcctgaccggtggacgaaagatccttttagatctggagaagctaaacgaagattccagcagattcaagaagcttattcagttttgtcggatgagaggaaacgaagctcgtacgacgttggactctatgattctggagaagatgaggaaaagcaatacagcttggaagagctacagacaatggtcgatgacatggtctatgagttccaatcagaaccattgttccagaaccaatcaatgcaaatgaatttcgacttgaaccaaacgcctgattggcattcacagatgtctctaccgctttcaagctttgagttctattctcaaagcagctactga

SEQ ID NO: 25298 - protein, 146 aa, Arabidopsis thaliana
MEGGIRQTYYEILGVAVDSSAEQIRRAYHKLAKIWHPDRWTKDPFRSGEAKRRFQQIQEAYSVLSDERKRSSYDVGLYDSGEDEEKQYSLEELQTMVDDMVYEFQSEPLFQNQSMQMNFDLNQTPDWHSQMSLPLSSFEFYSQSSY

SEQ ID NO: 25299 - DNA, 360 bp, Arabidopsis thaliana
  CDS (1)..(360)
atgtggtgttccgattggggagacagccatggcttcgattttttcgatttcgaggattacaaggatcactataaagttctggaattgaactgtgacgcttctgatgatgagattcgttccagctttatccgtcttgctctgaaatggcatccggacaaatttaaagaagaggattctgctacgtctaggtttcaagaaatcaacgaggcttatcaagtgttgagcgacccaattgcaaggcaggagtacgataagaaaaggatgcgtcgtatctatgagcacaacacggaactattgaatgagtacaaggagctcatattgacttgcaatggccttggggtgaagcattatctttggtaa

SEQ ID NO: 25300 - protein, 119 aa, Arabidopsis thaliana
MWCSDWGDSHGFDFFDFEDYKDHYKVLELNCDASDDEIRSSFIRLALKWHPDKFKEEDSATSRFQEINEAYQVLSDPIARQEYDKKRMRRIYEHNTELLNEYKELILTCNGLGVKHYLW

SEQ ID NO: 25301 - DNA, 885 bp, Geobacter sulfurreducens PCA
  CDS (1)..(885): transl_table=11
atggcgcagcacgactattacgaaaccctcggcctgaaaaagggggcaaccgaagaggagatcaagaaggcctaccgcaaactggccatcacgtatcacccggacaaaaatcccggcgacgccgcggctgaggaaaaattcaaggagatcaacgaggcctatgctgtcctctccgatccccagaagcgggcccagtacgatcagttcggttccaacggattccaccagcgcttctcccaggaagacattttccgggggttcgacgtgggggacatgttcaaggatatgggggtcggcaccgacgacatcttttcccgcatattcggaggaggattccgtcagggaggcttcagcttcacagggacacggcagcggggtggggattttaccatggagcttcccgtcaccttccgggaggcctacgcgggctgcgaaaagcgggttgcgtaccggcgggacggcatgcgggaggagatctccgtcaaggtcccggccggcgttgaaaccggggcgcgcctgcgggttgcgggcaagggaggggtcggcagcggcggcacgggggacctctacctggttgtgaaggtgggaggcgatccacagttccaccgcgaaggagatgacatcgtggtggaacgggagatcaaattcaccgacgcggcactcggcgcgagccttgatgtgccgaccctggaagggaccaagcgcgtcaaggttcccgccggtatccagtccggcaccaagattcgcctgaagggccttggtttcccccatatggggaaaacagccaagggagatctctacgttcacatcaatgtatcggttccccggtcgctttccgccgaccaaaaggctattctggaaaagctgcgtgaggcggggctgtaa

SEQ ID NO: 25302 - protein, 294 aa, Geobacter sulfurreducens PCA
MAQHDYYETLGLKKGATEEEIKKAYRKLAITYHPDKNPGDAAAEEKFKEINEAYAVLSDPQKRAQYDQFGSNGFHQRFSQEDIFRGFDVGDMFKDMGVGTDDIFSRIFGGGFRQGGFSFTGTRQRGGDFTMELPVTFREAYAGCEKRVAYRRDGMREEISVKVPAGVETGARLRVAGKGGVGSGGTGDLYLVVKVGGDPQFHREGDDIVVEREIKFTDAALGASLDVPTLEGTKRVKVPAGIQSGTKIRLKGLGFPHMGKTAKGDLYVHINVSVPRSLSADQKAILEKLREAGL

SEQ ID NO: 25303 - DNA, 849 bp, Gibberella zeae PH-1
  CDS (1)..(849)
atgacggactcgaaatcagccgacctgctgcaatatgcgcaggaatacgcctccaaaaatgaagacctctacgaacttctcggcgtcgatgccctcacacccaaagaagagatccaccgcgcctggcgaaagcgctccttaaagtaccaccccgataaagcaggcgataaattcgacgcagaagtatgggaaaagttcgaacgcgcccgcgacatcctttccgatcctggggcgcgcggcgcctacgatggcgctatcaaggcagccctcttgcgaaaacaagagtacgaggctagggataaaaagaacaaggctctagttgacgatcttgaagcccgagaaaacgcttggaaggtccagcgtgaggaaaaggagcaacgggagaaggatgaaatagagaaggaaaggtcacgactggtcgagcaaaggcgcttgcgtgaggaggaggaaaagcgtcaagctgctgctgcgcaagaagttgaggatcttgccgaagcaaagagacgcctaaaggaaaagaaggagaagaaaaagcaggatgaggcgagagaaaagttcctgcgcaagtcgcggatggctgccgaggctacagatggcaagccagcgtctggcccagtcaacggtgctatgaacgtgccaggagactactcggtggatttcggcacagaacagaaactttactgggaattggtctgcgacaagttgcgtgctgttcaggccgtcaagaatctacaaaagaatcaagcaacaccggaagagtaccaacaagcagagcaaggcctcctcgaagcaaagacaaggattcaccaggccgaggttcgatttgccgagcaggcatctgcatcatga

SEQ ID NO: 25304 - protein, 282 aa, Gibberella zeae PH-1
MTDSKSADLLQYAQEYASKNEDLYELLGVDALTPKEEIHRAWRKRSLKYHPDKAGDKFDAEVWEKFERARDILSDPGARGAYDGAIKAALLRKQEYEARDKKNKALVDDLEARENAWKVQREEKEQREKDEIEKERSRLVEQRRLREEEEKRQAAAAQEVEDLAEAKRRLKEKKEKKKQDEAREKFLRKSRMAAEATDGKPASGPVNGAMNVPGDYSVDFGTEQKLYWELVCDKLRAVQAVKNLQKNQATPEEYQQAEQGLLEAKTRIHQAEVRFAEQASAS

SEQ ID NO: 25305 - DNA, 969 bp, marine gamma proteobacterium HTCC2207
  CDS (1)..(969): transl_table=11
atggatttccaggactactacaaaatacttttggttgcccctggcgccgacagtgaaaccatcaaaactgcctaccgcaagctagctagaaaataccacccagatgtcagtggacaccatgaggccgaagaaaaattcaaacagatcgccgaagcctacgaggttttaaaagatccgaacaagcgtgctcaatacgaccagttgcgggagtctgctgcgcaggggtacggacagcggcaggcacaggggggaacagcacagcagaattcccaatcaccctttggtcagggtcgtttctcagcattcttctcgtcactttttggtggagccgatcagccagcacagggcgttggcactcatggctcttcgcagcaggatttttcgacttcaaattctgttagaaaaggccaagacattgaaaccgaactacagatatctcttgaagacagattgaccaccactacgaaacggatctcctatagcttttctcaccgcgatggttgggggcgggctagtcaggtcagcaaaatcctcaatgtaaaaattcccgcaggggtagtcgatggcgagcgcattcgccttaaagggcagggcgctcaaggccttggcgatgctcccccgggagacctctacctgcgtattcatctggtgccacactcgctgttcgaggtcgaagcccaggacctgattgtcattgttccccttgcgccctgggaagtcgccctggggaccagtcttgagttaccgactctgtcagggaaagtaaaacttaggattccaagcaacagccaaactggccagcgcctgcgaatcaaaggcaaagggctggttcacaaggacggtcagggtgacctctatgcggtactcaaagtggttatgcccgattcaggctcagaagagatcaagcagtactggcaacaacaggccggggcaacggcctctggttcacgaatggagtggaggggataa

SEQ ID NO: 25306 - protein, 322 aa, marine gamma proteobacterium HTCC2207
MDFQDYYKILLVAPGADSETIKTAYRKLARKYHPDVSGHHEAEEKFKQIAEAYEVLKDPNKRAQYDQLRESAAQGYGQRQAQGGTAQQNSQSPFGQGRFSAFFSSLFGGADQPAQGVGTHGSSQQDFSTSNSVRKGQDIETELQISLEDRLTTTTKRISYSFSHRDGWGRASQVSKILNVKIPAGVVDGERIRLKGQGAQGLGDAPPGDLYLRIHLVPHSLFEVEAQDLIVIVPLAPWEVALGTSLELPTLSGKVKLRIPSNSQTGQRLRIKGKGLVHKDGQGDLYAVLKVVMPDSGSEEIKQYWQQQAGATASGSRMEWRG

SEQ ID NO: 25307 - DNA, 930 bp, Candidatus Desulfococcus oleovorans Hxd3
  CDS (1)..(930): transl_table=11
atggcggaaaccgattactacaagattctgggtgtggagaaaaacgccactgacgaggagattaaaaaggcctatcgaaagctggcgatgaaatatcacccggaccatagcaagggcgataagaaagcggcggaagaaaaatttaaaaagatcagtgaagcctacgccgtgctcaaggataaggaaaagaggaaacagtacgatacatacggcgccaatggttttcatgagcggtactcccaggaggatattttccgggggtttgatttttccgatattctaaaggaattcggttttggcgggggcggtggctttttctccggcggcggccggggaggtggtgcccgcttttctttcgacggtggttctccctttggcggcggcggcccccggcagacggccgcagtaaagggggaggacgtagtgtacgagcttcccgttacgattcaggaggtcgtctccggcaccaccaaggcggtttcccttcgtcatggcggcggcaccgaaactgtcaacgtgaaaattccaaagggtatggtgtccggcaagaagatacggcttgccggaaagggccaacccagccggtttggcggtccttcaggggatatgtatattcaggcaaagctggtcaaggacccggtgttcgaagtggacggctacgacctctatatgaccacaggcgtcaaactcactgacgccttgaagggaacccggatcacggtggccggggtggacggcaaagacctgaacctgcgggtgccgccgggcacccggcacaaaagcaagctgcggcttgccgggcaggggattccccacatgaggggcgcgggccggggcgacctgtacgttgaaattcaggtggagatgccgtccaaattgaccgatcagcagaaacagctggtcgaagcccttgccgaaaccggtctgtaa

SEQ ID NO: 25308 - protein, 309 aa, Candidatus Desulfococcus oleovorans Hxd3
MAETDYYKILGVEKNATDEEIKKAYRKLAMKYHPDHSKGDKKAAEEKFKKISEAYAVLKDKEKRKQYDTYGANGFHERYSQEDIFRGFDFSDILKEFGFGGGGGFFSGGGRGGGARFSFDGGSPFGGGGPRQTAAVKGEDVVYELPVTIQEVVSGTTKAVSLRHGGGTETVNVKIPKGMVSGKKIRLAGKGQPSRFGGPSGDMYIQAKLVKDPVFEVDGYDLYMTTGVKLTDALKGTRITVAGVDGKDLNLRVPPGTRHKSKLRLAGQGIPHMRGAGRGDLYVEIQVEMPSKLTDQQKQLVEALAETGL

SEQ ID NO: 25309 - DNA, 492 bp, Oryza sativa subsp
  CDS (1)..(492)
atgtggtgggagttggaggaggacggcaaggaggcggcgtggccgggggaggaggtccccgtcgacttcgacttcatctccctcctctgcaagcccaaggattactacaagattctggaagtgggatatgatgcgtcggaagaggcgatcaggtcgagctatatacgtcttgcactgaagtggcaccctgacaagaagcagggcgaagaaaatgcaacctccagatttcaggagattaatgaagcataccaagtgctcagtaatccagccaaaaggcgagagtatgacaagaaaggcattctttatgttcaagatcataatgtagtgcacggtcatgcggacctgccacttttgggaggaaatgatgacgctgagttcatcctgtgttttgacaaatggaaagtggtcggaagggaattagggaaaatatcagctgatctgttggtgacactgcttctcccactcaattttcaatgtgtcaaaactcaatag

SEQ ID NO: 25310 - protein, 163 aa, Oryza sativa subsp
MWWELEEDGKEAAWPGEEVPVDFDFISLLCKPKDYYKILEVGYDASEEAIRSSYIRLALKWHPDKKQGEENATSRFQEINEAYQVLSNPAKRREYDKKGILYVQDHNVVHGHADLPLLGGNDDAEFILCFDKWKVVGRELGKISADLLVTLLLPLNFQCVKTQ

SEQ ID NO: 25311 - DNA, 399 bp, Oryza sativa subsp
  CDS (1)..(399)
atgtggtgggagtgggaggaggacggcgaggaggcggcgcggccgggggaggaggtccccgtcgacttcgacttcatctccctcctctgcaagcccaaggattactacaagattctggaagtgggatatgatgcgtcggaagaggcgatcaggtcgagctatatacgtcttgcactgaagtggcaccctgacaagaagcagggcgaagaaaatgcaacctccagatttcaggagattaatgaagcataccaagtgctcagtaatccagccaaaaggcgagagtatgacaagaaaggcattctttatgttcaagatcataatgtagtggactatctgaaccggcacaaaggtttaatccttacttgcaatggccttggcataaggcattcagtatggtga

SEQ ID NO: 25312 - protein, 132 aa, Oryza sativa subsp
MWWEWEEDGEEAARPGEEVPVDFDFISLLCKPKDYYKILEVGYDASEEAIRSSYIRLALKWHPDKKQGEENATSRFQEINEAYQVLSNPAKRREYDKKGILYVQDHNVVDYLNRHKGLILTCNGLGIRHSVW

SEQ ID NO: 25313 - DNA, 360 bp, Arabidopsis thaliana
  CDS (1)..(360)
atgtggtgttccgattggggagacagccatggcttcgattttttcgatttcgacgattacaaggatcactataaagttctggaattgaactgtgacgcttctgatgatgagattcgttccagctttatccgtcttgctctgaaatggcatccggacaaatttaaagaagaggattctgctacgtctaggtttcaagaaatcaacgaggcttatcaagtgttgagcgacccaattgcaaggcaggagtacgataagaaaaggatgcgtcgtatctatgagcacaacacggaactattgaatgagtacaaggagctcatattgacttgcaatggccttggggtgaagcattatctttggtaa

SEQ ID NO: 25314 - protein, 119 aa, Arabidopsis thaliana
MWCSDWGDSHGFDFFDFDDYKDHYKVLELNCDASDDEIRSSFIRLALKWHPDKFKEEDSATSRFQEINEAYQVLSDPIARQEYDKKRMRRIYEHNTELLNEYKELILTCNGLGVKHYLW

SEQ ID NO: 25315 - DNA, 369 bp, Brassica napus
  CDS (1)..(369)
atgtggtgttccggttggggagacggccatggctcttttctcgatttcaatttcgatttcgacaactacaaggatcactataaagtccttgagctgaacagcgacgcctccgatgatgagattcgctctaacttcatccgccttgcactgaaatggcatccggataaacttaaagaagaggattccgctacgtctaggtttcaagaaatcaacgaggcttaccaagtattgagcgacccatttacaagggaggagtacgataagaaaaggatgcgtcgtatctatgagcacaacatggagctattcgaccggtacaaggagctgatatttacttgcaatggccttgggatgaataattttctctggtga

SEQ ID NO: 25316 - protein, 122 aa, Brassica napus
MWCSGWGDGHGSFLDFNFDFDNYKDHYKVLELNSDASDDEIRSNFIRLALKWHPDKLKEEDSATSRFQEINEAYQVLSDPFTREEYDKKRMRRIYEHNMELFDRYKELIFTCNGLGMNNFLW

SEQ ID NO: 25317 - DNA, 408 bp, Glycine max
  CDS (1)..(408)
atgatgtgggaatgggacgattaccaagacaccatccccaaacacgacctaccccaacccgattcccacctcaaattcgatttcttctccgccctctccaggcccaaggattattacaagatactggaagtggattacgacgccacggatgacgctattcgctccaattacattcgcctcgcgctgaagtggcacccggacaagcacaaagaccagaactctgctacctcgcgattccaagacataaacgaagcttatcaggttttgagtgatccagtcaaaaggagggaatatgacataaatgggatgcgttacgaatatgattacaatataattgattatctcaaccgttacaagggccttatattgacgtgcaatggccttggcataaagcattcgatatggtaa

SEQ ID NO: 25318 - protein, 135 aa, Glycine max
MMWEWDDYQDTIPKHDLPQPDSHLKFDFFSALSRPKDYYKILEVDYDATDDAIRSNYIRLALKWHPDKHKDQNSATSRFQDINEAYQVLSDPVKRREYDINGMRYEYDYNIIDYLNRYKGLILTCNGLGIKHSIW

SEQ ID NO: 25319 - DNA, 342 bp, Glycine max
  CDS (1)..(342)
atggctgccgctgataacaccaacccaaaggattattacaaagtgctggaggttgaatatgatgcaaccgatgaaaatatcaaattaaattaccgaagactcgcgttgaaatggcatcctgacaagcacggaggtgatagtgctgttactgcaaaatttcaagagattattgaagcttacaatgtattaagtgatcctgccaagcgtttggactatgatttaactgggatatgtgagattgaaaaatatagcttgcaggaatatcttgccagatttaaaagcatgattcttacctgcaatggacttggtatcaatcagacagacagatggtatttattttga

SEQ ID NO: 25320 - protein, 113 aa, Glycine max
MAAADNTNPKDYYKVLEVEYDATDENIKLNYRRLALKWHPDKHGGDSAVTAKFQEIIEAYNVLSDPAKRLDYDLTGICEIEKYSLQEYLARFKSMILTCNGLGINQTDRWYLF

SEQ ID NO: 25321 - DNA, 366 bp, Zea mays
  CDS (1)..(366)
atggacggagcaagcaaggagcctctccgcaaggactactacaaagttctggaggttgactatgacgcatctgatgacaccatcaaattgagttatagaagattagctttgatgtggcatccggacaagcataagggcaatagcaatgccacaactaaatttcaggagattaatgaagcatacaaagttttgagtgacccagctaagcgactagaatacgatgtttccggttgctacgagatcgaccaatatactttgcgtgagtaccttacaaaatttaagggtatgatacttacctgtaatggccttggcatagaccattcttctaagtgggcccgacatttgagggaactgaaaccccattga

SEQ ID NO: 25322 - protein, 121 aa, Zea mays
MDGASKEPLRKDYYKVLEVDYDASDDTIKLSYRRLALMWHPDKHKGNSNATTKFQEINEAYKVLSDPAKRLEYDVSGCYEIDQYTLREYLTKFKGMILTCNGLGIDHSSKWARHLRELKPH

SEQ ID NO: 25323 - DNA, 513 bp, Linum usitatissimum
  CDS (1)..(513)
atggatcgggaaggaggttcaaacggcgtcgtcggacaatcgtcatactacgctgtcctcgggattcgcaaggacgcctcctcctccgatatccgatccgcttaccgccgcctcgccatgaggtggcatccggacaaatgggcgagaaatccaggggccgtggctgcagacgcgaaacggcggttccagcaaatccaagaggcttattccgttctgtccgacccgggaaagaggtcaatgtacgacgccggcctctacgatcctacggaggaggacgacgaggagttctgcgatttcatgcaagagatgatctcgatgatgaacaatgtgaaagacgagggagacagcttcgaagatctgcagaggatgttcgtggaaatggtgggcgacggaggcggcggcggcggcggcggtggaagctttgaactgaaccagaaaccgacggatgggaagagggcacgtgtgaacacatcgaaaggtaatgctgcgaagcgtagctccactcgatgctga

SEQ ID NO: 25324 - protein, 170 aa, Linum usitatissimum
MDREGGSNGVVGQSSYYAVLGIRKDASSSDIRSAYRRLAMRWHPDKWARNPGAVAADAKRRFQQIQEAYSVLSDPGKRSMYDAGLYDPTEEDDEEFCDFMQEMISMMNNVKDEGDSFEDLQRMFVEMVGDGGGGGGGGGSFELNQKPTDGKRARVNTSKGNAAKRSSTRC

SEQ ID NO: 25325 - DNA, 366 bp, Hordeum vulgare
  CDS (1)..(366)
atggacggagcaagcgaggagccgctccacaaggactattacaaagttctggaggtcgattatgatgcatctgacgacaacatcaaattgagttacagaagactagcgttgaagtggcaccccgacaagcataagggcgaggatgatgttacagctaaatttcaggagatcaacgaggcttacaaaattttaagtgatccagttacacggcttgagtacgacttttctggctgttacgaggtcaatcaatatactgcacgtgagtacctttcaagattcaagggaatgattcttacctgcaatggccttggcatagagcattcttcaaaatgggcgcgacatttgagggaatgggagccccattga

SEQ ID NO: 25326 - protein, 121 aa, Hordeum vulgare
MDGASEEPLHKDYYKVLEVDYDASDDNIKLSYRRLALKWHPDKHKGEDDVTAKFQEINEAYKILSDPVTRLEYDFSGCYEVNQYTAREYLSRFKGMILTCNGLGIEHSSKWARHLREWEPH

SEQ ID NO: 25327 - DNA, 396 bp, Hordeum vulgare
  CDS (1)..(396)
atgttgtgggagtgggatgacggcgacgaggcggcgcggacgggcgacgaggtccccgtcgatttcgacttcttctccttcttcgccaagcccaaggattactacaagatactggaagttgattatgacgcgtcggaggagacaatcaggtcgagctacatccgtctcgcgctgaaatggcaccctgacaagaaacaagatgaagaaaaggcaacctccagatttcaggacattaatgaggcgtaccaagttctcagcaatccagcaaaacggcaggagtatgataagaaaggtgttctgtacgttcaggatcagaatgcagcggattatctgaaccggcacaagggtttaatacttacttgcaatggccttggtgtaaggtactcggtgtggtga

SEQ ID NO: 25328 - protein, 131 aa, Hordeum vulgare
MLWEWDDGDEAARTGDEVPVDFDFFSFFAKPKDYYKILEVDYDASEETIRSSYIRLALKWHPDKKQDEEKATSRFQDINEAYQVLSNPAKRQEYDKKGVLYVQDQNAADYLNRHKGLILTCNGLGVRYSVW

SEQ ID NO: 25329 - DNA, 426 bp, Brassica napus
  CDS (1)..(426)
atggaagataacaattctcccaaggattactataagattctagaagttgattatgatgcaactgaggagatgctcaagctgaattatcggaagcttgcattgaagtggcatcctgataagcacaatggtgatactatggctacttcaaagtttcaggagatcaatgaagcttataacgtgctaatggatcctgatttacgttttgagtatgatttaaccggaatatacgagattcacaagtatactttgcgggagtatctggctaggtttaagggaatgatactcacttgcaatggactaggcatcagtcactcctcatcgccatggacacaacaattggcggaaggcaatatcactacagatgagcaaggtttcgatctggcttctgtatcaactgaaactgaaacagaaacagagcttaagtaa

SEQ ID NO: 25330 - protein, 141 aa, Brassica napus
MEDNNSPKDYYKILEVDYDATEEMLKLNYRKLALKWHPDKHNGDTMATSKFQEINEAYNVLMDPDLRFEYDLTGIYEIHKYTLREYLARFKGMILTCNGLGISHSSSPWTQQLAEGNITTDEQGFDLASVSTETETETELK

SEQ ID NO: 25331 - DNA, 369 bp, Brassica napus
  CDS (1)..(369)
atgtggtgttccggttggggagacggccatggctcttttctcgatttcaatttcgatttcgacaactacaaggatcactacaaagtccttgagctgaacagcgacgcctccgatgatgagattcgctctaacttcatccgccttgcactgaaatggcatccggataaactcaaagaagaggattccgctacgtctaggtttcaagaaatcaacgaggcttaccaagtattgagcgacccatttacaaggcaggagtacgataagaaaaggatgcgtcgtatctatgagcacaacatggagctattcgaccggtacaaggagctgatatttacttgcaatggccttgggatgaagaattttctttggtga

SEQ ID NO: 25332 - protein, 122 aa, Brassica napus
MWCSGWGDGHGSFLDFNFDFDNYKDHYKVLELNSDASDDEIRSNFIRLALKWHPDKLKEEDSATSRFQEINEAYQVLSDPFTRQEYDKKRMRRIYEHNMELFDRYKELIFTCNGLGMKNFLW

SEQ ID NO: 25333 - DNA, 381 bp, Brassica napus
  CDS (1)..(381)
atggaagacaatgataagtctcctccccctaaggattactataagattctagaagttgattacgacgcaactgaggaactgatcagactcaattatcggaagcttgctttgaagtggcatcctgataagcacaaaggagatactgcagctacagaaaaatttatagagataaatgatgcttataacgtgctgatggaccctgatgcacgttttgagtatgacttaaccggtatctatgagatccacaagtatactttgcgggagtaccttgccagatttaagggaatgatactcacttgcaacggactcggcatcagccaatcctcatcactatggacacatcaattgtctgagaccaccaacaaaacaacaacagactag

SEQ ID NO: 25334 - protein, 126 aa, Brassica napus
MEDNDKSPPPKDYYKILEVDYDATEELIRLNYRKLALKWHPDKHKGDTAATEKFIEINDAYNVLMDPDARFEYDLTGIYEIHKYTLREYLARFKGMILTCNGLGISQSSSLWTHQLSETTNKTTTD

SEQ ID NO: 25335 - DNA, 378 bp, Brassica napus
  CDS (1)..(378)
atggaagaccatgataagtctcctcctcccaaggattactataagattctagaagtagattacgacgcaactgaggatttgatcagactcaattatcgcaagcttgctttgaagtggcatcctgataaacacaaaggcgatactgcagctaaagagaaattcatagagataaatgaagcttataacgtgctgattgatcccgcagcacgttttgagtacgatttaaccggcatttacgagatccacaagtatactttacgggaatatctcgccagatttaagggaatgatactcacttgcaatggccttggcatcagccaatcctttgcaccatggacacatcaattgtctgagaccaccaacaaaccaacagactag

SEQ ID NO: 25336 - protein, 125 aa, Brassica napus
MEDHDKSPPPKDYYKILEVDYDATEDLIRLNYRKLALKWHPDKHKGDTAAKEKFIEINEAYNVLIDPAARFEYDLTGIYEIHKYTLREYLARFKGMILTCNGLGISQSFAPWTHQLSETTNKPTD

SEQ ID NO: 25337 - DNA, 399 bp, Zea mays
  CDS (1)..(399)
atgaggtgggagtgggagggcgacggtggtgaggcgccgcgggaggagactcctgtcgacttcgatttcatcgccctcctcgccaagcccaaggattactacaagatactggaagtagattactatgcgtctgaggagacgatcaggtccagctatatccgccttgcactgaaatggcaccctgacaagaagcaggggcagggcgaagagaattcaacctccaaatttcaggaaattaacgaggcataccaagttctgagtaatccagcaaaaaggcaagagtatgacaaaaaaggcattctatatgttcaagatcagaatgtagtggattacctgaaccggcacaaggggctaatacttacgtgcaatggtcttggtataaggtactcagtatggtga

SEQ ID NO: 25338 - protein, 132 aa, Zea mays
MRWEWEGDGGEAPREETPVDFDFIALLAKPKDYYKILEVDYYASEETIRSSYIRLALKWHPDKKQGQGEENSTSKFQEINEAYQVLSNPAKRQEYDKKGILYVQDQNVVDYLNRHKGLILTCNGLGIRYSVW

SEQ ID NO: 25339 - DNA, 20 bp, Artificial sequence
  primer
atggaagacaatgataagtc

SEQ ID NO: 25340 - DNA, 20 bp, Artificial sequence
  primer
ttatacagtatccttgctcg

SEQ ID NO: 25341 - protein, 113 aa, Artificial sequence
  consensus sequence
  Variant (5)..(5): Xaa in position 5 is any amino acid
  Variant (7)..(10): Xaa in position 7 to 10 is any amino acid
  Variant (13)..(16): Xaa in position 13 to 16 is any amino acid
  Variant (18)..(20): Xaa in position 18 to 20 is any amino acid
  Variant (22)..(23): Xaa in position 22 to 23 is any amino acid
  Variant (27)..(27): Xaa in position 27 is any amino acid
  Variant (33)..(41): Xaa in position 33 to 41 is any amino acid
  Variant (42)..(47): Xaa in position 42 to 47 is any or no amino acid
  Variant (49)..(50): Xaa in position 49 to 50 is any amino acid
  Variant (52)..(52): Xaa in position 52 is any amino acid
  Variant (56)..(56): Xaa in position 56 is any amino acid
  Variant (59)..(59): Xaa in position 59 is any amino acid
  Variant (62)..(63): Xaa in position 62 to 63 is any amino acid
  Variant (65)..(66): Xaa in position 65 to 66 is any amino acid
  Variant (69)..(94): Xaa in position 69 to 94 is any amino acid
  Variant (95)..(108): Xaa in position 95 to 108 is any or no amino acid
  Variant (110)..(110): Xaa in position 110 is any amino acid
  Variant (111)..(112): Xaa in position 111 to 112 is any or no amino acid
DYYKXLXXXXDAXXXXIXXXYXXLALXWHPDKXXXXXXXXXXXXXXXFXXIXEAYXVLXDPXXRXXYDXXXXXXXXXXXXXXXXXXXXXXXXXXXXXXXXXXXXXXXXGXXXG

SEQ ID NO: 25342 - protein, 36 aa, Artificial sequence
  protein pattern
  Variant (3)..(3): Xaa in position 3 is Ile or Val
  Variant (5)..(6): Xaa in position 5 to 6 is any or no amino acid
  Variant (8)..(9): Xaa in position 8 to 9 is any amino acid
  Variant (10)..(11): Xaa in position 10 to 11 is any or no amino acid
  Variant (13)..(13): Xaa in position 13 is Ser or Thr
  Variant (14)..(15): Xaa in position 14 to 15 is Asp or Glu
  Variant (16)..(16): Xaa in position 16 is any amino acid
  Variant (17)..(17): Xaa in position 17 is Ile or Leu
  Variant (18)..(18): Xaa in position 18 is Lys or Arg
  Variant (19)..(19): Xaa in position 19 is any amino acid
  Variant (20)..(20): Xaa in position 20 is Ala, Asn or Ser
  Variant (21)..(21): Xaa in position 21 is Phe or Tyr
  Variant (22)..(22): Xaa in position 22 is any amino acid
  Variant (23)..(23): Xaa in position 23 is Lys or Arg
  Variant (26)..(26): Xaa in position 26 is Leu or Met
  Variant (27)..(27): Xaa in position 27 is any amino acid
  Variant (28)..(28): Xaa in position 28 is Trp or Tyr
  Variant (32)..(32): Xaa in position 32 is His or Lys
  Variant (33)..(34): Xaa in position 33 to 34 is any amino acid
  Variant (35)..(35): Xaa in position 35 is Asp, Glu or Gly
  Variant (36)..(36): Xaa in position 36 is Asp, Glu, Asn or Gln
YKXLXXEXXXXAXXXXXXXXXXXLAXXXHPDXXXXX

SEQ ID NO: 25343 - protein, 21 aa, Artificial sequence
  protein pattern
  Variant (2)..(2): Xaa in position 2 is any amino acid
  Variant (3)..(3): Xaa in position 3 is Asp, Glu or Gln
  Variant (5)..(5): Xaa in position 5 is any amino acid
  Variant (6)..(6): Xaa in position 6 is Asp or Glu
  Variant (9)..(9): Xaa in position 9 is any amino acid
  Variant (12)..(12): Xaa in position 12 is any amino acid
  Variant (13)..(13): Xaa in position 13 is Asp or Asn
  Variant (15)..(16): Xaa in position 15 to 16 is any amino acid
  Variant (18)..(19): Xaa in position 18 to 19 is any amino acid
FXXIXXAYXVLXXPXXRXXYD

SEQ ID NO: 25344 - DNA, 2139 bp, Arabidopsis thaliana
  CDS (1)..(2139)
atggaggtcgttgatattgatgcccgagctgctaagttagggattgattggtctcaggttaattttgattccatccaacttcctcctggagaagactttgggatcgagagtgatgatgaagctgtttaccaggatgaccagtctgaattcgacactggattcggtaacattatcgtggtcgatcacctccctgttgttcccaaggagaagtttgagaaacttgaaggtgttgtcaagaaaatttacaaccagttaggtgtgattaaggaaaatggactgtggatgcctgttgatcccgataccaagatgacattgggctactgttttattgagttcaacactcctcaggaagcacaaaacgctaaggaaaagtctcatggctacaagttggacaagtctcacatctttgctgtaaacatgttcgatgattttgacaggttgatgaatgtgaaggaggagtgggagcctcctcaggccaggccctacgtccctggggaaaatttgcaaaaatggcttactgatgaaaaagcccgagaccagctagtcattcgttctggccctgatactgaagttttctggaatgatactaggcagaaggcgcctgaacctgttcataagcgtccttattggacagagagttatgtgcagtggtctcctttaggtacataccttgtgacactccacaagcagggggcagctgtttggggtggtgctgatacattcacgcgtctcatgcgttatcagcattctatggtaaaactagttgatttctcgccaggtgagaaatatcttgtaacttaccatagccaagaaccaagcaacccgcgagatgcaagtaaagttgagattaaggtttttgatgtgagaaccgggaggatgatgagagatttcaagggtagtgctgatgagttttcaattggaggacctggtggtgttgctggtgcctcttggcctgttttcagatgggctggtggaaaagatgataaatactttgccaagcttagcaaaaacactatctctgtctatgagactgagactttcagcctaatagacaagaaatccatgaaggtagataatgttgtggatatctgctggtctcctactgattccatcctttcattgtttgttcctgaacaaggtggtggaaaccaacctgcgaaggttgccctagtccaaatcccgagcaaggtggagctgaggcagaagaatctcttcagtgtgagcgactgcaagatgtactggcagagtagtggagagtatcttgctgtcaaggttgatcgatacacaaaaactaagaagagcacatactctggatttgaacttttccgtatcaaagaaagggatattcccatcgaggttcttgagctggacaacaagaacgacaagatcattgcttttgcatgggagcccaagggtcacaggtttgctgtgattcatggtgaccaaccaagaccagatgtcagtttctactcaatgaagaccgcacaaaacactggaagggtttcaaagctcgcaactttgaaggccaaacaagctaatgccctcttctggtcgcccacaggcaagtacataattcttgctgggttaaaaggtttcaatggccagcttgaatttttcaacgtggatgagctcgagacaatggccacagctgaacacttcatggccacggatatcgaatgggacccgactggaaggtacgttgcaaccgcagtgacatcagtccatgagatggagaatgggttcaccatatggtctttcaacgggattatgctttaccggatattgaaggatcatttcttccagttggcttggcgtccaagacctccatcattcttgactgcagagaaggaagaagagatagcaaagaccctgaagaagtacagcaagaagtatgaggcagaggatcaggacgtgtcgttgctgttgagtgaacaagacagagagaagagaaaggcattgaaggaagaatgggagaaatgggtaatgcagtggaagtctctgcatgaagaggagaaactcgtgaggcaaaaccttcgggatggtgaagtaagtgatgtggaagaagatgaatatgaagccaaagaagttgagtttgaggatcttatcgatgtcactgaggaaatcgttcaagagtcgtaa

SEQ ID NO: 25345 - protein, 712 aa, Arabidopsis thaliana
MEVVDIDARAAKLGIDWSQVNFDSIQLPPGEDFGIESDDEAVYQDDQSEFDTGFGNIIVVDHLPVVPKEKFEKLEGVVKKIYNQLGVIKENGLWMPVDPDTKMTLGYCFIEFNTPQEAQNAKEKSHGYKLDKSHIFAVNMFDDFDRLMNVKEEWEPPQARPYVPGENLQKWLTDEKARDQLVIRSGPDTEVFWNDTRQKAPEPVHKRPYWTESYVQWSPLGTYLVTLHKQGAAVWGGADTFTRLMRYQHSMVKLVDFSPGEKYLVTYHSQEPSNPRDASKVEIKVFDVRTGRMMRDFKGSADEFSIGGPGGVAGASWPVFRWAGGKDDKYFAKLSKNTISVYETETFSLIDKKSMKVDNVVDICWSPTDSILSLFVPEQGGGNQPAKVALVQIPSKVELRQKNLFSVSDCKMYWQSSGEYLAVKVDRYTKTKKSTYSGFELFRIKERDIPIEVLELDNKNDKIIAFAWEPKGHRFAVIHGDQPRPDVSFYSMKTAQNTGRVSKLATLKAKQANALFWSPTGKYIILAGLKGFNGQLEFFNVDELETMATAEHFMATDIEWDPTGRYVATAVTSVHEMENGFTIWSFNGIMLYRILKDHFFQLAWRPRPPSFLTAEKEEEIAKTLKKYSKKYEAEDQDVSLLLSEQDREKRKALKEEWEKWVMQWKSLHEEEKLVRQNLRDGEVSDVEEDEYEAKEVEFEDLIDVTEEIVQES

SEQ ID NO: 25346 - DNA, 2729 bp, Zea mays
  CDS (307)..(2469)
ctccgctccgcgcatggagaatggctttcaaatatggtccttcagtggcaagcatctttacaaggtgtcaaaggatcatttctatcagtttatatggcgcccgagaccgccctcactactgacggccgagaaggaagaagagatctcaaggaacctgaagaagtatagcaagaagtacgaaaccctccatccattctacacgcgccgccgcactcctgtacacgccccgccgccaccgcctccaccaccacagcgcgcaggaatccctcgttctctgagggtttcaggcgtcgtatgtaagagaagatggcgctctcagtatccatggagggcatcgaggcgcgggcgcgggatctcggggtggacctctccgctgtcgatctggactccatcaccctcccggccggcgaggacttcggcatcgtcagtgatgacgaggaggtacttcgtggtgaggatcttccagaacttgaaatgggtttgtccaacattattgtcgtggacaatctgccagttgttcctccagaaaagtttgagaagcttgagaatgtcatacgcaagatctacagccaaattggagcgataaaagaaaatggtctatggatgcctgtaaacccagagacaaagaagacatacggttactgtttcattgagtatagtacccctcaggaagctgagctggctagggaaaaaaccaatgggtacaaactcgacaagtctcacatctttgcagtcaatttgctcgatgatttcgagaagtacatgaaagttcctgacacatggacccctgctgaaattaagccatacactgctggagaaaatcttctgaagtggctaactgatgaaaaggcccgagatcaatttgtcattcgtgctggcacactaactgaagtttattggaatgatgcaagaaagctagcacctgagcttgtttttcaaaagcagtactggacagatagtttcattcagtggtcccctctgggaacctacatggcaacggttcataggcagggatcacaggtgtggggcggtgaaaatggcttcgagcgtttgatgcgttttgctcattccatggtgaaactgattgacttctctcctggtgagaggtatttggtcacatacagcagccatgagcccagcaaccctagagacacacatagagttgtcctgaatatatttgatgtaaggactgggaaagtgatgcgagactttaagggaagcgctgatgattttactactggcgggaatattggggtttctggtgtttcatggcctattttcaggtggggtggtggaaaggatgacaaatattttgcgaggcttgggaagaatataatatctgtatacgaaacagatacattctcccttcttgataagaagtctctgaaggtagaaaatgtagtggacttcagctggtctcccactgatcctatcatatctctgttcgtgcctgaaatgggtggtggaaatcagcctgcgagggtgagtctagtgcaaatccctggcaaagaggagctgcgacagaaaaaccttttcagtgtcagtgattgtaagatgtattggcaaaacagtggagaatatcttgctgttcaagttgatagatacacaaaaacaaaaaagagcacctacactgggtttgagctgtttagaattaaggagagggatatcccaattgaggtccttgaactcgagaacaagaacgacaagatcattgcatttgcatgggaacctaaaggacatcgctttgctatcatccatggtgatggccctaagcctgatgttagcttctacaccatgcgaacttccaataacactagccgtgtatccaagctcacaaccctcaaggccaagcaagctaatactctgtactggtctcctgctgggcgcttcatagttcttgctggactgaagggtttcaacgggcagctggaattctacaatgttgatgaactagagacaatggcaacaggagagcattttatggcaacagatatcatgtgggatccaactgggagatatctcgcgactgcagttacctcagttcatgaaatggagaatggctttcaaatatggtccttcagtggcaagcatctttacaaggtgtcaaaggatcatttctatcagtttatatggcgcccgagaccgccctcactactgacggccgagaaggaagaagagatctcaaggaacctgaagaagtatagcaagaagtacgaacaagaagaccaggatgcattcaatcagttgagcgagcaggaccgcaagaggcggacacagcttcaggaagaatgggactcatgggttgccaagtggaagcagatgcatgaggaggagcgtgcttacaggagggagctcagggatggggaggccagcgacgacgaggaagagtatgaggccaaggaagttgaggtggaggaagtcgttgatgtccgtcaagaagttcttgcattcgacctagatcaggagtgaaaacacttattatagaatctgttgatttctttcctgttggtgttaaagttcattggggtcgcattgcataataggccctagtgatcaagtgcgcaatttactgatcgttgtactgcttatttgtacacttgctgcttgaattgttggatcatgtgtttagatatcaaattttgctgctggattactaatctgtctggttctgcaaaaaaaaaaaaaaaaaaaaaaaaaaaaaaaaaaaaaaaaaaaaaaaaacccccccc

SEQ ID NO: 25347 - protein, 720 aa, Zea mays
MALSVSMEGIEARARDLGVDLSAVDLDSITLPAGEDFGIVSDDEEVLRGEDLPELEMGLSNIIVVDNLPVVPPEKFEKLENVIRKIYSQIGAIKENGLWMPVNPETKKTYGYCFIEYSTPQEAELAREKTNGYKLDKSHIFAVNLLDDFEKYMKVPDTWTPAEIKPYTAGENLLKWLTDEKARDQFVIRAGTLTEVYWNDARKLAPELVFQKQYWTDSFIQWSPLGTYMATVHRQGSQVWGGENGFERLMRFAHSMVKLIDFSPGERYLVTYSSHEPSNPRDTHRVVLNIFDVRTGKVMRDFKGSADDFTTGGNIGVSGVSWPIFRWGGGKDDKYFARLGKNIISVYETDTFSLLDKKSLKVENVVDFSWSPTDPIISLFVPEMGGGNQPARVSLVQIPGKEELRQKNLFSVSDCKMYWQNSGEYLAVQVDRYTKTKKSTYTGFELFRIKERDIPIEVLELENKNDKIIAFAWEPKGHRFAIIHGDGPKPDVSFYTMRTSNNTSRVSKLTTLKAKQANTLYWSPAGRFIVLAGLKGFNGQLEFYNVDELETMATGEHFMATDIMWDPTGRYLATAVTSVHEMENGFQIWSFSGKHLYKVSKDHFYQFIWRPRPPSLLTAEKEEEISRNLKKYSKKYEQEDQDAFNQLSEQDRKRRTQLQEEWDSWVAKWKQMHEEERAYRRELRDGEASDDEEEYEAKEVEVEEVVDVRQEVLAFDLDQE

SEQ ID NO: 25348 - DNA, 2217 bp, Arabidopsis thaliana
  CDS (1)..(2217)
atggaggtcgttgatattgatgcccgagctgctaagttagggattgattggtctcaggttaattttgattccatccaacttcctcctggagaagactttgggatcgagagtgatgatgaagctgtttaccaggatgaccagtctgaattcgacactggattcggtaacattatcgtggtcgatcacctccctgttgttcccaaggagaagtttgagaaacttgaaggtgttgtcaagaaaatttacaaccagttaggtgtgattaaggaaaatggactgtggatgcctgttgatcccgataccaagatgacattgggctactgttttattgagttcaacactcctcagaaaggagcccaaactaggttgttcttaatggttgagtatttcctaagagtttctctcaatgtctggggctctttgcaggaagcacaaaacgctaaggaaaagtctcatggctacaagttggacaagtctcacatctttgctgtaaacatgttcgatgattttgacaggttgatgaatgtgaaggaggagtgggagcctcctcaggccaggccctacgtccctggggaaaatttgcaaaaatggcttactgatgaaaaagcccgagaccagctagtcattcgttctggccctgatactgaagttttctggaatgatactaggcagaaggcgcctgaacctgttcataagcgtccttattggacagagagttatgtgcagtggtctcctttaggtacataccttgtgacactccacaagcagggggcagctgtttggggtggtgctgatacattcacgcgtctcatgcgttatcagcattctatggtaaaactagttgatttctcgccaggtgagaaatatcttgtaacttaccatagccaagaaccaagcaacccgcgagatgcaagtaaagttgagattaaggtttttgatgtgagaaccgggaggatgatgagagatttcaagggtagtgctgatgagttttcaattggaggacctggtggtgttgctggtgcctcttggcctgttttcagatgggctggtggaaaagatgataaatactttgccaagcttagcaaaaacactatctctgtctatgagactgagactttcagcctaatagacaagaaatccatgaaggtagataatgttgtggatatctgctggtctcctactgattccatcctttcattgtttgttcctgaacaaggtggtggaaaccaacctgcgaaggttgccctagtccaaatcccgagcaaggtggagctgaggcagaagaatctcttcagtgtgagcgactgcaagatgtactggcagagtagtggagagtatcttgctgtcaaggttgatcgatacacaaaaactaagaagagcacatactctggatttgaacttttccgtatcaaagaaagggatattcccatcgaggttcttgagctggacaacaagaacgacaagatcattgcttttgcatgggagcccaagggtcacaggtttgctgtgattcatggtgaccaaccaagaccagatgtcagtttctactcaatgaagaccgcacaaaacactggaagggtttcaaagctcgcaactttgaaggccaaacaagctaatgccctcttctggtcgcccacaggcaagtacataattcttgctgggttaaaaggtttcaatggccagcttgaatttttcaacgtggatgagctcgagacaatggccacagctgaacacttcatggccacggatatcgaatgggacccgactggaaggtacgttgcaaccgcagtgacatcagtccatgagatggagaatgggttcaccatatggtctttcaacgggattatgctttaccggatattgaaggatcatttcttccagttggcttggcgtccaagacctccatcattcttgactgcagagaaggaagaagagatagcaaagaccctgaagaagtacagcaagaagtatgaggcagaggatcaggacgtgtcgttgctgttgagtgaacaagacagagagaagagaaaggcattgaaggaagaatgggagaaatgggtaatgcagtggaagtctctgcatgaagaggagaaactcgtgaggcaaaaccttcgggatggtgaagtaagtgatgtggaagaagatgaatatgaagccaaagaagttgagtttgaggatcttatcgatgtcactgaggaaatcgttcaagagtcgtaa

SEQ ID NO: 25349 - protein, 738 aa, Arabidopsis thaliana
MEVVDIDARAAKLGIDWSQVNFDSIQLPPGEDFGIESDDEAVYQDDQSEFDTGFGNIIVVDHLPVVPKEKFEKLEGVVKKIYNQLGVIKENGLWMPVDPDTKMTLGYCFIEFNTPQKGAQTRLFLMVEYFLRVSLNVWGSLQEAQNAKEKSHGYKLDKSHIFAVNMFDDFDRLMNVKEEWEPPQARPYVPGENLQKWLTDEKARDQLVIRSGPDTEVFWNDTRQKAPEPVHKRPYWTESYVQWSPLGTYLVTLHKQGAAVWGGADTFTRLMRYQHSMVKLVDFSPGEKYLVTYHSQEPSNPRDASKVEIKVFDVRTGRMMRDFKGSADEFSIGGPGGVAGASWPVFRWAGGKDDKYFAKLSKNTISVYETETFSLIDKKSMKVDNVVDICWSPTDSILSLFVPEQGGGNQPAKVALVQIPSKVELRQKNLFSVSDCKMYWQSSGEYLAVKVDRYTKTKKSTYSGFELFRIKERDIPIEVLELDNKNDKIIAFAWEPKGHRFAVIHGDQPRPDVSFYSMKTAQNTGRVSKLATLKAKQANALFWSPTGKYIILAGLKGFNGQLEFFNVDELETMATAEHFMATDIEWDPTGRYVATAVTSVHEMENGFTIWSFNGIMLYRILKDHFFQLAWRPRPPSFLTAEKEEEIAKTLKKYSKKYEAEDQDVSLLLSEQDREKRKALKEEWEKWVMQWKSLHEEEKLVRQNLRDGEVSDVEEDEYEAKEVEFEDLIDVTEEIVQES

SEQ ID NO: 25350 - DNA, 2088 bp, Bombyx mori
  CDS (1)..(2088)
atggctaagaaaaaaggcgatgaaaaagcgaatccagctcctcaaagtgacaatgaggaacagaactttgaagaagaacctgattttgacgacccagaggatttcgtagagattcctgaagaagaattattggcggatatcttagaacagaagcctaaggaatctgacggttatgaaaacgttgtagtcgtagacgggtgtccgcaggtcggccccgagcgtcttgagaaactacagagcgttataaacaaaatatttagtaaattcggtaaaatagtcaacgaatactaccccacgaccgagaatggactcacgactgggtacattttcctggaatacagtaacccccagaatgccgccgaagccgtgaaagcgacgaacaactgtaaattagataaacaacacacatttttagtgaatcttttcacggactttcaaaagtattcagatattcctaaagaatgggagccaccggcacctcaaccattcaaggtgcagtcagatctgcaatggtatttaatggatcctgatgcatatgaccagttccttgttggcattgggactggtgtggctctccaggtgtggcagaatgcattacctgaacctctactgttacaggagagaccaaactggaccgaaacctatgccgtctggtcacctttaggaacatacttagcaactttccactggcgaggtgtagcactatgggctggtccaaagttctcacaattccagaagtttttccaccctgaagctaggtttatatcattttccccatgtgagaactacatggtgacgttttcacctagcggtgacagaggagatgacaagaaatggattattggggatattagaactggtcaagagaaacgtagtttcccacctcctgatgagtatgttacctggcctattttccgttggagtaaagatgacaggttcttcgccagaattggagctgatgttctctctgtatatgagactccaggttttgggctacttgataagaaatcaattaaaatacctggaattagagacttcagttggtctccatcagataatactctagcctactgggtagctgaagacaaggatgttcctgccagagtaacactcttggaaatccccaatcgtactgaagttcgttccaagaacttgttttcggtggctgactgtaaaattcattggcagaagagcggagactacttgtgcgtaaaagtagatcgttactctaaagtgaagaaagataagattgatattaaatactctggaatgtattataatttcgagatcttccacatgagggaaaaggaaattcctgtagattccgtcgagatcaaggaacctattcaggcttttgcttgggagccagttggttcaaagttctctattattcacggtgacccagcaaacatcagtatcagcttctatcaagtaaatactggccaagcacctacattgctcaagaagttcgagaggaagccattcaaccatcttttctggtcaccatctgggcagttcattgtcctggccaaccttggactgactggtggtgcattggagttcttggacacaaatgactttaccattatgaatgtggctgatcattatcagatgtctggtatcgaatgggatccaacaggacgctatgtagtgacaggtgtgtcttcgctcaaatgtaaaatggattgcggctattacatctggtcattccagggcaagatactcaggagagtgatgaaggaagggttcgcgcagttccactggagaccccgtccaccgacgctgctctctgagaagcaacagaaagagatcaagaagaatcttaagaaatactactcgcaattcgagtctaaagatcgtatgcgcagtagcaaagccagcaaggaactggtggctaagcgtactgagcagatgaagaagttcacggagtaccgtgagtctaagatccaggaatggaacgagcagaagccgcgccggctcgaacttagagattacgtagacacagacggtcttgacacggatgcggtgaatacagtcgaagaggttattgaatttttcgtgaaagaggaacaaaccgtcatcgagtag

SEQ ID NO: 25351 - protein, 695 aa, Bombyx mori
MAKKKGDEKANPAPQSDNEEQNFEEEPDFDDPEDFVEIPEEELLADILEQKPKESDGYENVVVVDGCPQVGPERLEKLQSVINKIFSKFGKIVNEYYPTTENGLTTGYIFLEYSNPQNAAEAVKATNNCKLDKQHTFLVNLFTDFQKYSDIPKEWEPPAPQPFKVQSDLQWYLMDPDAYDQFLVGIGTGVALQVWQNALPEPLLLQERPNWTETYAVWSPLGTYLATFHWRGVALWAGPKFSQFQKFFHPEARFISFSPCENYMVTFSPSGDRGDDKKWIIGDIRTGQEKRSFPPPDEYVTWPIFRWSKDDRFFARIGADVLSVYETPGFGLLDKKSIKIPGIRDFSWSPSDNTLAYWVAEDKDVPARVTLLEIPNRTEVRSKNLFSVADCKIHWQKSGDYLCVKVDRYSKVKKDKIDIKYSGMYYNFEIFHMREKEIPVDSVEIKEPIQAFAWEPVGSKFSIIHGDPANISISFYQVNTGQAPTLLKKFERKPFNHLFWSPSGQFIVLANLGLTGGALEFLDTNDFTIMNVADHYQMSGIEWDPTGRYVVTGVSSLKCKMDCGYYIWSFQGKILRRVMKEGFAQFHWRPRPPTLLSEKQQKEIKKNLKKYYSQFESKDRMRSSKASKELVAKRTEQMKKFTEYRESKIQEWNEQKPRRLELRDYVDTDGLDTDAVNTVEEVIEFFVKEEQTVIE

SEQ ID NO: 25352 - DNA, 2160 bp, Oryza sativa (japonica cultivar-group)
  CDS (1)..(2160)
atggcgctagaaatctccatggaaggcatcgaagcgcgggcgcgggagcttggggtcgacctctccaccgtcgatctcgactccgtcaccctccccgccggcgaggacttcggcatcctcagtgacgatgaggatttacttcggattgatgaccctatggagcttgaaatggggtttgctaacgttgttgtcgtggacaacctgcccgttgttccaccagagaagtttgagaagttggagaacgtcatacgcaagatctacagtcaaattggtgcgatcaaagaaggtggtctttggatgcctgtaaacccagagacaaagaagacatacggttactgcttcatcgagtataataccccacaggaagctgagcttgctagggaaaagacaaatgggtacaagctcgacaagtctcacatctttgcagttaacatgtttgatgactttgacaagtacatgaaagttccagacgaatggatgcctgctgaaattaagccatacactcctggagagaacttgcaaaaatggctggctgatgagaaggcccgggaccaatttgttatccgtgctggtactttcactgaagtttactggaatgatgcaaggcagaagatgcctgaacttgtgttccaaaagcagtactggacagacagttttattcagtggtcccctcttggaacatacttggcaacagtgcataggcagggctcccaggtgtggggtggcgacgataagtttgagcgtctaatgcgatttgctcatgcacaggtgaaactgattgacttctcccctggtgagaaatatttggtcacatatagtagccacgagcccagcaaccctagagacactcatagggttgttcttaatatctttgatgtgaggactggcaaagtgatgcgcgactttaaaggaagtgctgatgaattcagtgccagtggaaatatcagtgtttctggtgtttcatggcctattttcagatggggtggtggaaaagacgataaatattttgcaaggcttgggaagaatgttatatctgtctatgagactgaaacattctcccttcttgataagaaatctctgaaggttgagaatgttgtcgacttctgctggtctccaactgatccaatcatagccctttttgtccctgagttgggtggaggaaaccagcctgcaagggtgagccttgtgcaaattcctggcaaagaggagctgcggcagaaaaaccttttcagtgtcagtgattgcaagatgtactggcagaacagtggagaatatcttgctgtccaggttgatagatacacaaaaaccaagaagagtacttacactggatttgagctttttagaattaaggaaagggacatacccattgaggttcttgaattggacaacaagaacgataagatcattgcctttgcatgggagcccaaaggtcaccgctttgctgttattcatggtgatggccctaagcctgatataagcttctactccatgaaaacatccaacaacatcagtcgtgtgtccaagctcaccactctcaagggcaagcaggctaatgcattgttctggtctcctggtggaagattcattgttttcgctggtctgaagggctttaatgggcagctggagttttacaatgttgatgagcttgagacgatggcaacgggtgaacatttcatggctactgacattatgtgggatcctactggaagatatcttgcatctgcagttacctcagtccatgaaatggagaatggtttccaaatatggtctttcagtggcaagcaactttacaaggtgtcaaaggaccacttctttcagttcctgtggcgtccgagaccaccgtcgctgctgacccctgaaaaggaagacgagattgcgaagaacctgaggaagtacagcaagaagtacgagcaagaggatcaggatgccttcaaccagctgagcgagcaggaacgcaagaggcggaagcagcttcaggaggaatgggaaggatgggttgccaagtggaagcagctgcacgaggaagagagaccatacaggatggagctcagagacggggaggccagtgacgatgaggaagagtacgacaccaaggaagttgagattgaagaggaggtagacgtccaagaagaagttccattcgagctggatcaggagtga

SEQ ID NO: 25353 - protein, 719 aa, Oryza sativa (japonica cultivar-group)
MALEISMEGIEARARELGVDLSTVDLDSVTLPAGEDFGILSDDEDLLRIDDPMELEMGFANVVVVDNLPVVPPEKFEKLENVIRKIYSQIGAIKEGGLWMPVNPETKKTYGYCFIEYNTPQEAELAREKTNGYKLDKSHIFAVNMFDDFDKYMKVPDEWMPAEIKPYTPGENLQKWLADEKARDQFVIRAGTFTEVYWNDARQKMPELVFQKQYWTDSFIQWSPLGTYLATVHRQGSQVWGGDDKFERLMRFAHAQVKLIDFSPGEKYLVTYSSHEPSNPRDTHRVVLNIFDVRTGKVMRDFKGSADEFSASGNISVSGVSWPIFRWGGGKDDKYFARLGKNVISVYETETFSLLDKKSLKVENVVDFCWSPTDPIIALFVPELGGGNQPARVSLVQIPGKEELRQKNLFSVSDCKMYWQNSGEYLAVQVDRYTKTKKSTYTGFELFRIKERDIPIEVLELDNKNDKIIAFAWEPKGHRFAVIHGDGPKPDISFYSMKTSNNISRVSKLTTLKGKQANALFWSPGGRFIVFAGLKGFNGQLEFYNVDELETMATGEHFMATDIMWDPTGRYLASAVTSVHEMENGFQIWSFSGKQLYKVSKDHFFQFLWRPRPPSLLTPEKEDEIAKNLRKYSKKYEQEDQDAFNQLSEQERKRRKQLQEEWEGWVAKWKQLHEEERPYRMELRDGEASDDEEEYDTKEVEIEEEVDVQEEVPFELDQE

SEQ ID NO: 25354 - DNA, 2145 bp, Arabidopsis thaliana
  CDS (1)..(2145)
atggcggcggttgttgatattgatgtcctaacagctcagttagggattaattggtcagatgttaatctcgattcaatccaacttcctcctggaaacgactttgggatcgaaagtgatgatgaaagtgtttaccaagatgaccagtcagaattcgacactggattcggtaacattatcgttgtcgatcacctccctgttgttcccaaggagaagtttgagaaactagaaggtgttgttaagaaaatttacaaccagttaggtgtgattaaggaaaatggactgttgatgcccgttgatcccgatactaagatgacattgggctactgttttattgagttcaacactcctcaggaagcacaaaacgctaaggaaaagtctcatggctacaagttggacaagtctcacatatttgctgttaatatgttcgatgatttcgataggttgatgaatgtgaaggaggagtgggagcctcctcaagaaaggccctatgtccctggggaaaatttgcagaagtggcttactgatgacaaagcccgggaccagctagtcattcgttttggccatgatactgaagtttactggaatgatgctaggcagaagaagcctgaacctgttcataagcgttcttattggacagagagttatgtgcagtggtctccaataggtacataccttgtgacacttcacaagcagggggcagctgtttggggtggtgctgatacatttacgcgtctcatgcgttatcagcattcaatggtcaaactagttgatttctcgcctggtgagaaatatcttgtaacttaccatagccaagaaccaagcaatccgagagatgcaagtaaagtagagattaaggtctttgatgtgagaaccgggaggatgatgagagatttcaagggtagtgctgatgagttttcaattggaggacctggtggtgttgctggtgcctcttggcctgttttcagatgggctggcggaaaagatgataaatactttgccaagctgagcaaaaacactatctctgtctatgagactgagactttcagcctaatagacaagaaatccatgaaggttgataatgttgtggatatttgctggtctcccactgattcaatcctttcattgtttgttcctgaacaaggtggtggaaaccaaccagccaaggttgctctagtccaaatcccgagtaaggtagagctgaggcagaagaatctcttcagtgtgagcgactgcaagatgtactggcagagtagtggagagtatcttgctgttaaggttgatcgatacacaaaaactaagaagagtacatactctggatttgagcttttccgtatcaaagaaagggatattccaatcgaggttcttgagctggataacaagaacgataagatcattgctttcgcgtgggagcccaagggtcacaggtttgctgtgattcatggtgaccagccaagaccggatgttagtttctactcgatgaagactgcacaaaacactggaagagtttcaaagctcgcaactttgaaggccaaacaagccaatgccctcttctggtcgcccacaggcaagtacatcattcttgctgggttaaaaggtttcaatggccagcttgaatttttcaacgtggatgagctcgagacaatggccacagctgaacacttcatggccacagatatcgaatgggacccaactggaaggtacgttgcaacctcagtgacaacagtccacgagatggagaatgggttcaccatatggtctttcaatgggaatatggtttaccggatactgaaggatcatttcttccagttggcttggcgtccaagaccggcatcattcttgactgcggagaaggaagaagagatagcaaagaacctgaggaattacagcaagaggtatgaggcagaggatcaggacgtgtcgttgctattgagtgaacaagacagagagaagaggagggcattgaatgaagagtggcagaaatgggtgatgcagtggaagtctctgcatgaagaggagaaactcgtgaggcaaaatcttcgggatggtgaagttagtgatgtggaagaagatgagtatgaagccaaagaagttgagtttgaggatcttattgatgttactgaggaaattgttcaagagttgatgtaa

SEQ ID NO: 25355 - protein, 714 aa, Arabidopsis thaliana
MAAVVDIDVLTAQLGINWSDVNLDSIQLPPGNDFGIESDDESVYQDDQSEFDTGFGNIIVVDHLPVVPKEKFEKLEGVVKKIYNQLGVIKENGLLMPVDPDTKMTLGYCFIEFNTPQEAQNAKEKSHGYKLDKSHIFAVNMFDDFDRLMNVKEEWEPPQERPYVPGENLQKWLTDDKARDQLVIRFGHDTEVYWNDARQKKPEPVHKRSYWTESYVQWSPIGTYLVTLHKQGAAVWGGADTFTRLMRYQHSMVKLVDFSPGEKYLVTYHSQEPSNPRDASKVEIKVFDVRTGRMMRDFKGSADEFSIGGPGGVAGASWPVFRWAGGKDDKYFAKLSKNTISVYETETFSLIDKKSMKVDNVVDICWSPTDSILSLFVPEQGGGNQPAKVALVQIPSKVELRQKNLFSVSDCKMYWQSSGEYLAVKVDRYTKTKKSTYSGFELFRIKERDIPIEVLELDNKNDKIIAFAWEPKGHRFAVIHGDQPRPDVSFYSMKTAQNTGRVSKLATLKAKQANALFWSPTGKYIILAGLKGFNGQLEFFNVDELETMATAEHFMATDIEWDPTGRYVATSVTTVHEMENGFTIWSFNGNMVYRILKDHFFQLAWRPRPASFLTAEKEEEIAKNLRNYSKRYEAEDQDVSLLLSEQDREKRRALNEEWQKWVMQWKSLHEEEKLVRQNLRDGEVSDVEEDEYEAKEVEFEDLIDVTEEIVQELM

SEQ ID NO: 25356 - DNA, 2073 bp, Drosophila melanogaster
  CDS (1)..(2073)
atggccaagaagaaaagcgaggagcactccggtacggatgcgaacgacagtgattaccaggaggagccgaactttgacgatccgcccgggttcgtggacaacattagtgatgaagatctgctgggcgacatgttggcccagcgcccctcggaggccgatggcgtcgagagtgtggtggtagtggacaatatcccaaaggtggagccggtgcgcctggagaagctgaagttggtcatcaacaagctgttttcgaactacggagaaatcgtcaatgtggtctatcccgtcgacgaggagggcaagaccaagggctacgccttcatggagtacaagcaggccagacaggcggaggaagccgtcaagaagctcaacaatcatcgcctagacaaaaaccacacctttgccgtcaatctcttcaccgatttccaaaagtacgaaaacatccccgagaagtgggagccgccaaccgtgcagaccttcaaagtgcagagcgatctatacaacttcatcaatgacccggacacttatgaccagtactgcgtggcagcggagaccgctcccaactgcgtgcaggttggtttctggcaaaacgtattgcccgaaccctttgagctggagactcgcgaacgcttcaccgacaccttcgtcaagtggtcgcccctgggtacttatgtagtcaccttccacaaacccggtgtggccatctggggtggcagtagcttccagaagattcagaagtttccccatcctggtacccaattcgttgagttttcgccctgcgagaattacctagtgacttacggaccgacacccacgggccaaaagatcatcatctgggacattcgcactggagccgagaaacgttcgtttgttgccgatggcatgtcggttctttctatgttccgctggtcgcacgacgacaagtttgtggcccgcatgggcgagaattcgatccacatctacgagacaccctctttctatcttctggacctgaagtccattaagattcccggcattcgtggcttctcttggtcccccacagacaacgtgattgcctactgggtggaggagcagaaccaaatacccgcccgcgttaccctgatggagatccccaagaagcgtgagatccgtaacaagaaccttttccatgtggccgattgcaagttacattggcaaaagtccggcgactatctgtgcgttaaggtagatcgttactcaaagttgaagaaggataagaaggacctggacgtcaagtttctgggcatgttctacaactttgagatcttccacatgcgcgagaaggagattcccgtcgactctgtggagattcgtgagcttattttggcctttgcctgggagcccgtcggcaacaagttctccatcattcacggcgagaccaactcgtcgaatgtgagcttctacgaggtgaacaagggcgttaagcccagcttggtgaagcgtctagaaaagaagtcatgcacacatctgttctggtcgccacgcggtcagtttatcgtaatggccaacctcaccatgggtaccttcgagtttgtggactccaccaacgattacatcatcacggcatcgcccgatcatttccgcgcttccgaggtcgagtgggatcccactggacgctacgttgtgactggtgtctcgtcatggaaggtgaaagaggataccggcttcaacatgtacacgttccagggccgcatcatcaagcgtaccattcttaagaactttgtgcagttcttgtggcgcccgcgtcctcccaccctgcttagcgaggagaagcagaaggagatcaagaagaacttgaagaagtactacgctgccttcgaacaaaaggatcgcctgcgccttacccgtgcctccaaggagctgctcgagaagcgctcgcagctgcgcgagacctttatggagtaccgcaacaagcgtattgccgagtgggcggagcagaagagtcgtcgcatcatgctgcgagggcatgtggacacagacaacctggaaactgacgaagtggatgaagaaattgttgaatttttagtcaaggaagaagtcactctgctggagtag

SEQ ID NO: 25357 - protein, 690 aa, Drosophila melanogaster
MAKKKSEEHSGTDANDSDYQEEPNFDDPPGFVDNISDEDLLGDMLAQRPSEADGVESVVVVDNIPKVEPVRLEKLKLVINKLFSNYGEIVNVVYPVDEEGKTKGYAFMEYKQARQAEEAVKKLNNHRLDKNHTFAVNLFTDFQKYENIPEKWEPPTVQTFKVQSDLYNFINDPDTYDQYCVAAETAPNCVQVGFWQNVLPEPFELETRERFTDTFVKWSPLGTYVVTFHKPGVAIWGGSSFQKIQKFPHPGTQFVEFSPCENYLVTYGPTPTGQKIIIWDIRTGAEKRSFVADGMSVLSMFRWSHDDKFVARMGENSIHIYETPSFYLLDLKSIKIPGIRGFSWSPTDNVIAYWVEEQNQIPARVTLMEIPKKREIRNKNLFHVADCKLHWQKSGDYLCVKVDRYSKLKKDKKDLDVKFLGMFYNFEIFHMREKEIPVDSVEIRELILAFAWEPVGNKFSIIHGETNSSNVSFYEVNKGVKPSLVKRLEKKSCTHLFWSPRGQFIVMANLTMGTFEFVDSTNDYIITASPDHFRASEVEWDPTGRYVVTGVSSWKVKEDTGFNMYTFQGRIIKRTILKNFVQFLWRPRPPTLLSEEKQKEIKKNLKKYYAAFEQKDRLRLTRASKELLEKRSQLRETFMEYRNKRIAEWAEQKSRRIMLRGHVDTDNLETDEVDEEIVEFLVKEEVTLLE

SEQ ID NO: 25358 - DNA, 2112 bp, Strongylocentrotus purpuratus
  CDS (1)..(2112)
atggcggaaggcagtgaaagggaaagaacatcaggtagaaataaaatggaccggtctcacgaaaatgacttaaatgatgaggaggaaaacggctacgaggaagagccggacttcagtgatccagagagctacgttgacaatattacagatgaagagctactaggcgacatacttcgaaccaaaccaaaggaagcattgggcattgattctgtgattgtcatcgacaacataccccaggttggaacagagaggttgcctaagctgaagaatgtgatcaggaaagtctgtagcaagtatggagagatcagcacagagcattacccagaatcagaggatggcaagactaaagggtatgtgtttgtcgaatacaaatcacctgagaatgccattgaggctgccaagcagctgagtggatacaagcttgataaacaacacacgttcgctgtcaacttgatcactgattttgacaaattcatgaatctaccagatgaatggacttcacctgagaagcagccatacaaagatcatggtaacatgagaaattggttgcttgataaggaatgtaacgatcaatacagtgtgatctctgacggtggtgagacgactgctatcctactcaacagcaagacggaggctaacgtcgtagaggagaggaagcgctggacagagacgtacatacgctggtctccgttagggacctaccttgtcaccttccatcagaaaggtattgcattgtggggaggagaaaattttcagcagattcgaaggtttgcccatcctggtgtgcagctcattgatgtatcaccgtgtgaaaggtatatagtgaccttcagccccctgaatgacccaagagatgagacacaagcaatcattatctgggacatcaagacaggcatcaagaagagaggtttctcctgtgataatgcttctaattggccagtcttcaagtggagtcatgatggaaagttctttgctaggatggcagaagacacactcggtatatacgagaccccatcattcgggctgctagataaaaagagtctcaaaataccaggaattagggagttctgttggtcacctgcaagtaatatcatgagttattggacacctgaagagaaagagaatcctgctcgagtgacgctgatggccatcccatctaggaaagaattgagagtcaagaatctcttcagtgtagctgactgtaaactccattggcagaaacaaggtcattacatgtgctgcaaggtggataggctctccaagagcaaaaagaaccaattcaccaactttgagatcttccgaatgcaagagaagcagattccagtggattcgattgaagtgaaagaaaccatcatggcgtttgcttgggagcctacaggaaacaagtttgctatcttacttggggaatcccctcgtatctcagcaagcttctacaacatcaagccaaagggaaaagtcgagcttatcaaaactattgaaaggaaaacagccaatagtctcttctgggccccaactggtcagtttgttgtgttagccggtctaaggagcatgaatggtgtatttgagttcattgatactggtaatgataccatcacagtgatgaattctacagaacacttcatggcaaccgatgtagaatgggatcctactggtcgctatgtcatcacaggggtcagctggtggagtcacaaggttgacaatgcatactggatctggagcttccagggtaagctgctgcagaaatgtgaccgagagagattctgtcaagctctctggcgccctcgaccacaaacaccgctcacagaagagaagatcaaggagatcaagaagaacatgaagtcttacagcaagatatttgagatccaggatgccaagaagaaatccaaggcctccaaggagctcattgagcgacgtcagcagcagatgaacgacttcaaggagatcgtagagaggatgaagaagagatatgatgctgagaaggagacaagattgggactacgtgatggtgtggataccgatgagcttgaacacgatgacgataacgaggaggaggtggtcgaattctttattggagaagagtgcactgaagtcgatgaattcgaacacgagtag

SEQ ID NO: 25359 - protein, 703 aa, Strongylocentrotus purpuratus
MAEGSERERTSGRNKMDRSHENDLNDEEENGYEEEPDFSDPESYVDNITDEELLGDILRTKPKEALGIDSVIVIDNIPQVGTERLPKLKNVIRKVCSKYGEISTEHYPESEDGKTKGYVFVEYKSPENAIEAAKQLSGYKLDKQHTFAVNLITDFDKFMNLPDEWTSPEKQPYKDHGNMRNWLLDKECNDQYSVISDGGETTAILLNSKTEANVVEERKRWTETYIRWSPLGTYLVTFHQKGIALWGGENFQQIRRFAHPGVQLIDVSPCERYIVTFSPLNDPRDETQAIIIWDIKTGIKKRGFSCDNASNWPVFKWSHDGKFFARMAEDTLGIYETPSFGLLDKKSLKIPGIREFCWSPASNIMSYWTPEEKENPARVTLMAIPSRKELRVKNLFSVADCKLHWQKQGHYMCCKVDRLSKSKKNQFTNFEIFRMQEKQIPVDSIEVKETIMAFAWEPTGNKFAILLGESPRISASFYNIKPKGKVELIKTIERKTANSLFWAPTGQFVVLAGLRSMNGVFEFIDTGNDTITVMNSTEHFMATDVEWDPTGRYVITGVSWWSHKVDNAYWIWSFQGKLLQKCDRERFCQALWRPRPQTPLTEEKIKEIKKNMKSYSKIFEIQDAKKKSKASKELIERRQQQMNDFKEIVERMKKRYDAEKETRLGLRDGVDTDELEHDDDNEEEVVEFFIGEECTEVDEFEHE

SEQ ID NO: 25360 - DNA, 2079 bp, Nasonia vitripennis
  CDS (1)..(2079)
atggcaaagaaaagagtgcctctttggccgccgggcgacgagtccagcaaaaatccggacgacgagcccaacttcagcgatcccgatgactttgacgacgacatacccgacgaagaacttctggaagacctcctgccgcagaagccatctgagacagaaggtgttgattcgatcattgtcatcgatggagttcccaaggttgagccgaagcggctggaaaagctccagtctgtcattgagaagatctacggcaagtttggcaccattgtcagtaagtcctatcctcaggattcaaatgggatgaccataggatatgtgttcttcgagtacagcgaccccaccagtgccttgaatgcagtgaagcaggccaataactacaagattgataaggtgcataccttcaaggtaaatctcttctctgacttcaagaagtacgagaacattcctgaggactggaagccacctgagccacaacgtttccagcccttcacggatcttcacaactatctgctggatccagatgcgtacgatcaattctgtattgctgttggtagcaatgggggagctcctaacgtccagatctggcagaactgtcagccagagcctgtttgcgttgaggaccgtgctcgctggacggacacgtacgtcaagtggtcgccactgggtacctacttagccaccttccacaagcttggtgttgctctgtggggaggttccaactttacgcagcagatgaggttcttacagcgtggtgtcgaatgcatcgacttctcgccgaacgagcgttaccttgtgacctattcgccacgcgcggaggccgacgaaaagcgactcgttatgtgggacatccttactggacaagagaaacgatccttcttaccagagggtcccaatgtctggcccatcttccgttggtcccacaatgataagtacgtcgcctatatgggcgaagatgttctcagtgtgtacgagacgccgtcatttggtctattggacaagaagagtataaagatcccgggtatccgggacttcagctggtcgccgaccgacaacatcattgccttctgggttcccgaagacaaggatgtacccgccagggtgacacttatggaaattcccagtcgtaacgaaatccgtaagaacaatatcttcaatgttgctgactgcaagattttctggcagaagtccggtgattatttgtgcgtgaaagtcgaccgtttcgccaagaagaaggagaagaccgagcagaaatacacgggaatgtcttacaactttgaaatcttccacatgcgcgagaaacttacccccgttgacagcctagaaattaaagaaccaattcacgctttcgcatgggagcctgttggcaacaaatttgccattattcacggagaaacatcgtcggtgaacgttagtttttacgaagtgcgctgtggacatcgtcccacgctacttaaaaaactggaaaagaaagcgtgcaatcacttgttctggtcgccttcgggtcaattcatcgtgctggccggtcttacaaccatgtccggtgccctggaattcatcgacaccaatgacttcacgatcatgaacctgacggatcactaccagacttccgacgtggagtgggatcctactggacgttacgtagtgacgtcggtagcgagctggaaaacgagcgtagacaacggttactggctctggacgttccagggcagaattctgaagagggttaaccttcaccagttccatcagtttatgtggcgcccaaggccgccaactctgcttacccccgagcagatcaaggacatcaagaagaacctcaagaaatattcggcgcaattcgagagcaaggatcgcctccgtctcacgcgcgcttcaaaggaactaatcgagaaacgttgcgcgttgatgaaagagttcgagagctaccgcgcggattgcattgaacgatggaacaagcagaagaaacgtcgtatggaattgcgtcaaaatatcgacacagatgaattggattcagataccaagaatatggatgaggaggttgtggaatttttcgtcaaggaagaaacttttgaagaaaaataa

SEQ ID NO: 25361 - protein, 692 aa, Nasonia vitripennis
MAKKRVPLWPPGDESSKNPDDEPNFSDPDDFDDDIPDEELLEDLLPQKPSETEGVDSIIVIDGVPKVEPKRLEKLQSVIEKIYGKFGTIVSKSYPQDSNGMTIGYVFFEYSDPTSALNAVKQANNYKIDKVHTFKVNLFSDFKKYENIPEDWKPPEPQRFQPFTDLHNYLLDPDAYDQFCIAVGSNGGAPNVQIWQNCQPEPVCVEDRARWTDTYVKWSPLGTYLATFHKLGVALWGGSNFTQQMRFLQRGVECIDFSPNERYLVTYSPRAEADEKRLVMWDILTGQEKRSFLPEGPNVWPIFRWSHNDKYVAYMGEDVLSVYETPSFGLLDKKSIKIPGIRDFSWSPTDNIIAFWVPEDKDVPARVTLMEIPSRNEIRKNNIFNVADCKIFWQKSGDYLCVKVDRFAKKKEKTEQKYTGMSYNFEIFHMREKLTPVDSLEIKEPIHAFAWEPVGNKFAIIHGETSSVNVSFYEVRCGHRPTLLKKLEKKACNHLFWSPSGQFIVLAGLTTMSGALEFIDTNDFTIMNLTDHYQTSDVEWDPTGRYVVTSVASWKTSVDNGYWLWTFQGRILKRVNLHQFHQFMWRPRPPTLLTPEQIKDIKKNLKKYSAQFESKDRLRLTRASKELIEKRCALMKEFESYRADCIERWNKQKKRRMELRQNIDTDELDSDTKNMDEEVVEFFVKEETFEEK

SEQ ID NO: 25362 - DNA, 2241 bp, Magnaporthe grisea 70-15
  CDS (1)..(2241)
atggctccgtcatacgagcacctccgcgaggcggacctggacgaggatgaatttgacgaggatgaggtcgacgtttctgacctccgcgagaagttcgaggtgcagttggagcaaggcttcgacacatttgtggttatcgatggcctgccagaggtcacggaggaacagaagcccaagcttgtcaagttcctgttgaagaagctgacctcggtcggcaagacaaaagaggacatgattgatatgcccatgggtcctgatggcaagtcacttcggtttgctttcgtcgagtactcttcgcccggcgaggccgctgctgcggttaggcagctggaccgcgttcccctcgacaagaaacacacacttcgcgtcaacaaacttatggatgtcgaccgtttcggacgcgagggcaggatagatgacgagtaccagccaccccacattgacgaattccacccaagggatcacctgcgctcgttcatggccgacccttcgggccgtggccgcgaccagttcgtcatgttccgcggcgaccacgtcggtgttttctggaacaacgagaaggataccccagagaacattgtggacaggccaaactggaccgagagcttcgttcagtggtctcctcttggcacatacttgttgtcaatgcacatgcaaggtgtgcagctctggggaggcccaaaatgggacaggttaggccggtttcctcacccgttcgtgaacatggccgccttctctccccaagaaaactaccttgtcacctggtcaaaccgccccatatctatcccggacgaaggccaccctgctctttccatggacgacgatggcaagaactacgtgatctgggatatcgcaacaggcaagccgcttaggtctttcgccaatctcgacctgccccctgacgaccccaacaagcccccacggaagcacccctggcctgctttcaagtggtcatccgatgacaagtacgtcgcgaggttgacccagggccagtccatctcggtgtatgagctgccgcgcatgaacctgctcgacaagactacgatcaaggttgagggtgtccaagacttcgagtgggcaccgtcacgcccgcagcgagatggagtcaaaacctatgagcagatgttctgctactggacaccggaaattggcagcaaccctgccaaggtcggtctgatgtccattccctcgaaggaggtagtccgctcgcttaaccttttcagtgtgtccgatgtgaagctacattggcaatctgagggtgcttatctctgtgtcaaggttgacaggcactcgaagtctaagaagtctcaggcaacaacgctggagatcttccgtgtcaaggagaagggagttccggttgaagttgtcgacaccatcaaggatactgttatcaactttgcatgggagcccaagggtgaccgcttcctcattatcacaacagtcacgccaactggtgaagtggccgttcaacctaaaaccgccatatccttcttctgccccgagaagtcaaagggatccacagtcggcaacttcaagcacctacgaactctggacaaaaggaacagcaacgctatttactggtcgcctaagggtcgattcgtcgtggtcgccactgttcacaaccagaacagctctgatctggacttcttcgacctggactttgagggcgagaagcccgagggcgagaaggacttgaccgcaaacctgcagctcatgaacacggctgaccactatggcataacagacgtcgagtgggatccttctggacgtttcgtggccacctgggcttctgcatggaagcatactatggagaacggctaccacatgtacgacttcaagggcgagcagctccgtgaagaggctgttgaaaagttcaagcagcttcagtggaggccgcgaccccctacactgctcgccaaggaggagcagaagcagattcgtaagaacctccgcgagtactcacgcgtctttgagcaagaggatgccgagcgcattgctggcgcagaccaagaggttgtcgacaacagacgtcgtattctcgaggactggtacgagtggcgcgagtctgtcgatgtggaggttgatgaggagagcgccgcaatgggtgtctcctccaacccggccgaggagttactcaaggccaagacggctgagatccttgcaagcggccaggaggaggagcaagtcattgaggagattgttgaggaggtgcttgaggagagcgaggagattgtgagctaa

SEQ ID NO: 25363 - protein, 746 aa, Magnaporthe grisea 70-15
MAPSYEHLREADLDEDEFDEDEVDVSDLREKFEVQLEQGFDTFVVIDGLPEVTEEQKPKLVKFLLKKLTSVGKTKEDMIDMPMGPDGKSLRFAFVEYSSPGEAAAAVRQLDRVPLDKKHTLRVNKLMDVDRFGREGRIDDEYQPPHIDEFHPRDHLRSFMADPSGRGRDQFVMFRGDHVGVFWNNEKDTPENIVDRPNWTESFVQWSPLGTYLLSMHMQGVQLWGGPKWDRLGRFPHPFVNMAAFSPQENYLVTWSNRPISIPDEGHPALSMDDDGKNYVIWDIATGKPLRSFANLDLPPDDPNKPPRKHPWPAFKWSSDDKYVARLTQGQSISVYELPRMNLLDKTTIKVEGVQDFEWAPSRPQRDGVKTYEQMFCYWTPEIGSNPAKVGLMSIPSKEVVRSLNLFSVSDVKLHWQSEGAYLCVKVDRHSKSKKSQATTLEIFRVKEKGVPVEVVDTIKDTVINFAWEPKGDRFLIITTVTPTGEVAVQPKTAISFFCPEKSKGSTVGNFKHLRTLDKRNSNAIYWSPKGRFVVVATVHNQNSSDLDFFDLDFEGEKPEGEKDLTANLQLMNTADHYGITDVEWDPSGRFVATWASAWKHTMENGYHMYDFKGEQLREEAVEKFKQLQWRPRPPTLLAKEEQKQIRKNLREYSRVFEQEDAERIAGADQEVVDNRRRILEDWYEWRESVDVEVDEESAAMGVSSNPAEELLKAKTAEILASGQEEEQVIEEIVEEVLEESEEIVS

SEQ ID NO: 25364 - DNA, 2241 bp, Gibberella zeae PH-1
  CDS (1)..(2241)
atggcaccctctttcgaccaccttcgcgaggccgatcttgacgatgacgagttcaacgatgacgatattgatatctccgacctgcgagaacgattcgaggtttccctagaccaaggctatgacaactttgtcgttatcgatggccttccccaggtcactgaggaccagaagcccaagcttgtcaagttcttgttgaagaagctcaacacagtcggcaagacacgcgaggactctgtacacatgcccatgggcgacgatggaaagtctcttcgattcgcctttgtcgagtactcctcgcccgccgaggctgccgccgctactcgccagctcgacctcacccccctcgacaagaagcacactctccgcgttaacaagttcaccgatatcgagcgctacggccgagaaggtcgcatcgacgagacctaccaaccgccccagatcgaggacttcaccgagaaggagcacttgcgatggttcctcaaggacccctcaggtcgtggccgcgatcagttcgtcatgtaccgtggcgacagtgtcggaatctactggaacaacgagaaggatcagcccgagaacattgttgagcgaccattttggacggaggcatttattcagtggtctcctctgggtacataccttacctctgtccacgctcagggtgtccagctttggggtggcgcttcatggtcgcgacaagctcgatttgctcacccttttgtgaacatgatttctttctcccccggtgagaagtacatcgtcacctggtccaaccgacccatctctatccctgatgagggccaccccgctctctccatcgacgaccacggcaagaactacgttatctgggacatcgctaccgctaccccccttcgatctttcgccaacctcgagccccccaaggtggaggatggcaagcccccgcctaagatgcaatggcctgccttcaagtggtctgccgacgacaagtacgttgcccgtctcaaccccggccagtccatctccgtctacgagcttccccgcatgaaccttctcgacaagacctccatcaagatcgatggtgttgtggactttgactgggctcccgctacccccaaacgtgacggcgtcaaggaatacgagcagcttttctgttactggactcctgaaattggcagcaaccccgccaaggttggattgatgagcgttccctcaaaagaggttgttcgatctctcaacctcttcagtgtcagcgatgccaagcttcactggcaatccgacgctgcctacatttgtgtcaaggttgaccgacactcaaagtccaagaagtctcaagccacaactcttgagatcttccgagtcaaggagaagggtgtccctgttgaggtcgttgacaccatcaaggataccgtcatcaactttgcttgggaacccaagggtgaccgattcgccatcatctccacaaccgagcctgtaggcgtcactgccgtcgctcccaagactgccgtctctttcttctgccccgagaaggccaagaagggccagcaagtgggtaactttaagcacctccgaacactcgacaagaagaacagcaacgccatttactggtcacctcgtggtcgttttgttgttatcgccaccattgccaacacacagagctccgacctcgacttcttcgacctcgactttgagggcgagaagcccgagtccgacaaggaccttaccgccaacctccaggctatgaacactgccgatcactacggcgtcacagatgtcgagtgggacccctcaggtcgtttcgtcgcctcctgggcatctgcctggaagcactctatggaaaacggataccatatctacgacttcaagggtgaggctctgcgagaagagccccttgaaaagttcaagcagttcgcgtggcgccctcgccctgctactctccttactaaggaggagcagaaggcggtccgcaagaacctccgagaatacagccgtgtctttgagcaagaagatgccgaccgtggtgcttctgctgatttggccgttgtcgaggctcgtcgccgtatgcttgaggagtggcacagctggcgcgagtctatggaggccgacgtgctggaagagcgcgaggttctcggcctaccaaaggatcctcacgctcctctgctagaggcctacacaaagtccctggatacagcatcagatgaggatcgggtgattgaggagattgttgaggaggtgattgaggagagtgaggaggtgctcgcttag

SEQ ID NO: 25365 - protein, 746 aa, Gibberella zeae PH-1
MAPSFDHLREADLDDDEFNDDDIDISDLRERFEVSLDQGYDNFVVIDGLPQVTEDQKPKLVKFLLKKLNTVGKTREDSVHMPMGDDGKSLRFAFVEYSSPAEAAAATRQLDLTPLDKKHTLRVNKFTDIERYGREGRIDETYQPPQIEDFTEKEHLRWFLKDPSGRGRDQFVMYRGDSVGIYWNNEKDQPENIVERPFWTEAFIQWSPLGTYLTSVHAQGVQLWGGASWSRQARFAHPFVNMISFSPGEKYIVTWSNRPISIPDEGHPALSIDDHGKNYVIWDIATATPLRSFANLEPPKVEDGKPPPKMQWPAFKWSADDKYVARLNPGQSISVYELPRMNLLDKTSIKIDGVVDFDWAPATPKRDGVKEYEQLFCYWTPEIGSNPAKVGLMSVPSKEVVRSLNLFSVSDAKLHWQSDAAYICVKVDRHSKSKKSQATTLEIFRVKEKGVPVEVVDTIKDTVINFAWEPKGDRFAIISTTEPVGVTAVAPKTAVSFFCPEKAKKGQQVGNFKHLRTLDKKNSNAIYWSPRGRFVVIATIANTQSSDLDFFDLDFEGEKPESDKDLTANLQAMNTADHYGVTDVEWDPSGRFVASWASAWKHSMENGYHIYDFKGEALREEPLEKFKQFAWRPRPATLLTKEEQKAVRKNLREYSRVFEQEDADRGASADLAVVEARRRMLEEWHSWRESMEADVLEEREVLGLPKDPHAPLLEAYTKSLDTASDEDRVIEEIVEEVIEESEEVLA

SEQ ID NO: 25366 - DNA, 2109 bp, Apis mellifera
  CDS (1)..(2109)
atggcgaagaaaatgttagcagataaaactcctcaaaatgaggataatattaaaaataatgatgatacatttaacgaagatgaagaaccaaattttagtgatcctgaaggatttattgacgatattactgacgaagaattacttggcgatattttgaaacaaaaaccctcagagacagatggagtagaatcagtaattgtcattgatggagtcccccaagttgaaccagaaagattggaaaaacttcaatctgttattagcaaagtattgggaaagtttggaacaatagtaaatcaatattaccccaaaaatgaaaatggatatacgaaaggatacatatttctagaatataacaatcctcttaatgccttagcagctgcgcaatctgtaaataattataaaattgacaagcaacatacattcaaagtaaatttattcactgatttcaagaaatttgaagaaattccagatgaatgggaacctccaaaaccacaagaatttaaagcagcagctgatcttcattattatcttttagaaccagatgcttatgatcaattttgtgtgctttgtggtaatggtccttctgttactgttcaagtttggcaaaattctgcccctgaaccaacgttacttgaagaacgttctcgttggacagagacatatgttaaatggtctccattaggaacatatttagcaacattccataaattgggtgttgcattatggggtggccctcaatttttgcaacaagctagattcagccaaaaaggtgttgaatgtatagatttctctcctggcgagcgttatttagtaacatatactccaagaactgatcttggttctgaacaaaaacgtcttgtaatttgggacatccttactggtcaagaaaaacgtgcgtttttcgcagatggttcttcagtatggcctattttccgttggtcacatgatgataaatatcttgctcgtatgggagaagatattttgagtgtttatgaaacaccttcatttggattattggataagaaaagtataaaaattcctggtatcagagattttagttggtctcctacagataatgttcttgcttattgggtaccagaagataaagatgttccagcaagagttactcttctcgaaattccaaatcgtaatgaaattcgcaacaaaaatttgtttaatgtggctgattgtaaaatttattggcaaaaatcaggggattatctttgtgtaaaagttgatcgtttcgctaaacgtaaagaaaagacagaacaaaaatacacgggtatgtcatataattttgaaatttttcatatgagagaaaaacaaatacctgtcgatagtgttgaaataaaagaaccaattcatgcatttgcttgggaacctgtgggaagcaaatttgctattattcatggagaaattccaagtgttaatgttagtttttacgaagtacgatatggtcatcaaccagctcttctcaaaaaattggaaaaaaaggcttgcaatcatctattttggtcgccatctggtcaatttattgttcttgctggattaacaaccatggcaggagctttagaattcattgatactaatgattttactatcatgaattcaactgatcattatcaaacttcagatgtagaatgggatcctactggacgatacgtggtaacagctgtttccagttggaaaaccagtgtggataatggatattggatatggacgttccaaggacgtatattaaaaagagttaatctcaatcaatttaatcaactcttatggagaccaagaccaccaacattattgacaccggaacaaattaaagaaattaagaaaaatttaaagaaatattctgcgcaattcgaaagtaaagatcgtatgcgattaactcgtgcttcaaaggaattaattgagaaacgttgtgcagcgatgaaagcattcgaagaatatcgttcaaaacgcatacaagaatggaataatcaaaagaagagacgtttagaattacgtaatggtattgatacagacgaattagattctgattccaaaaatgtagaagaagaagtaatagaatttttcgtcaaagaagaaacatttatcatcgacgagaaataa

SEQ ID NO: 25367 - protein, 702 aa, Apis mellifera
MAKKMLADKTPQNEDNIKNNDDTFNEDEEPNFSDPEGFIDDITDEELLGDILKQKPSETDGVESVIVIDGVPQVEPERLEKLQSVISKVLGKFGTIVNQYYPKNENGYTKGYIFLEYNNPLNALAAAQSVNNYKIDKQHTFKVNLFTDFKKFEEIPDEWEPPKPQEFKAAADLHYYLLEPDAYDQFCVLCGNGPSVTVQVWQNSAPEPTLLEERSRWTETYVKWSPLGTYLATFHKLGVALWGGPQFLQQARFSQKGVECIDFSPGERYLVTYTPRTDLGSEQKRLVIWDILTGQEKRAFFADGSSVWPIFRWSHDDKYLARMGEDILSVYETPSFGLLDKKSIKIPGIRDFSWSPTDNVLAYWVPEDKDVPARVTLLEIPNRNEIRNKNLFNVADCKIYWQKSGDYLCVKVDRFAKRKEKTEQKYTGMSYNFEIFHMREKQIPVDSVEIKEPIHAFAWEPVGSKFAIIHGEIPSVNVSFYEVRYGHQPALLKKLEKKACNHLFWSPSGQFIVLAGLTTMAGALEFIDTNDFTIMNSTDHYQTSDVEWDPTGRYVVTAVSSWKTSVDNGYWIWTFQGRILKRVNLNQFNQLLWRPRPPTLLTPEQIKEIKKNLKKYSAQFESKDRMRLTRASKELIEKRCAAMKAFEEYRSKRIQEWNNQKKRRLELRNGIDTDELDSDSKNVEEEVIEFFVKEETFIIDEK

SEQ ID NO: 25368 - DNA, 2160 bp, Candida glabrata CBS 138
  CDS (1)..(2160)
atggctgccgctgagatcaagctggaagacattcctgttgatgacattgacttcactgatttggagaaggagtactctgttgatgatgagttcaagtttgacaattacgttgtagttactggtgcgccagttattccagagtccaaggtccctgttttgaagaaggctttgggtggtcttttctcgaaggccggtaaggttgtcgacatggagttcccattggatgacgacaagaagagcaaaggtttcctgtttgtggagtgtggttcagatgttgatgccaagaagatcatcaaggctttccatggtaagcgtttggatttgaagcaccgtctgttcctttacagcatgcgcgatgttgagaagttgagcgagcaaggtgctggtgagtttgtcgaaccagagttgcctggttttgtaccaacttctacattgaagtcctggttggctgacgaggacggaagagaccaattcgtcatccagaaggataacttgaccggtatcttctggaactctatgcatgaaagcgaggacgatgttgttgaatctcgtaccaactggtccaccaactacgttaggttctctccaagaggtacttacttattctcataccatcctcaaggtgttacctcatggggtggtcctcagtttgaccgtttgagaagattctatcatccaaacgtcagaacttcctctgtttccccagatgaacattatctagttactttctccccagagccaattgaactggacgactctgtcccagaatctcctttcacaaagcgtaacgaaggtcaccatatctgtgtgtgggaaatcgacaccggtctattgtgtgcttctttcccattgaccaagaaccctaacttgcaatggccattcgttaagttctcttacaacgacaaatactgtgctagatttgttggtgacagattggcagtttacgactgtactaacaagttctccttgctagaagccccagcactaaaggtctctggtatcagagacttctccttcgcaccaactggtgttgagttgcaacctttcaacaagaacgacgaaccatctgttctgttatcttactggactcctgaaacaaacaacagtgcttgtacagcctctgttgttcaagttcctagaggccgtgtcctaaagacagtcaaccttgtgcaagtttctaacgttaccacttactggccggaaggtggtgaataccttgttttcaacgttgagcgtcacactaaatccaagaagactttattcagtaacttgcaaatctgtaaattgactgaaaaggacatacctgtcgagaagatcgaggtcaaggacaggatcatggaagttggctgggaacctcatggacacagattcatcactatctctaccacagaaggtccagacgataacattgccattccaaagaacgtcgttaggttctacgcaccagagaagaaagaaggtgttaagaacaagatcgtcgttaagagatgggttgtcatcaaggaaatcgaaaagaagttctacaacaccgtttcctggtcgccagctggtagatttgttacagtctgtgccttggttaagccaaacatgcgtaagtctgaattccagttcttcgacttggattacccaggtgagaagaacttgaacgaacgtaaggatgttcttgccactctgaaggacgttggtgaatccaactacggtgctgccactgatctatgttgggacccatctggtagattcttgaccgcttggtccagttccctaaaacacaagatggagaacggttacaagatgttcaatatcgccggtgttatcatcaaggaagacattcttccaaacatgaagaattttgcttggagaccaagaccagaaagcttgttgtccaacgccgaaaagaagaaggtcagaaagacattgaaggagtggtccgccgaattcgacgagcaagacgctatggccaacgacagtgccgtcagagacttgatcttgaagcaacgtgctatgttgaaggaatggcgtgaatacagagccgctaaggcccaaacaaccaccatctttgacattgctccttggttagacaccactaaggaccatgaagacttcgtcaagattgaagaaattaaggaagaaatcgtagaagaaatcaaggaaaagttgtaa

SEQ ID NO: 25369 - protein, 719 aa, Candida glabrata CBS 138
MAAAEIKLEDIPVDDIDFTDLEKEYSVDDEFKFDNYVVVTGAPVIPESKVPVLKKALGGLFSKAGKVVDMEFPLDDDKKSKGFLFVECGSDVDAKKIIKAFHGKRLDLKHRLFLYSMRDVEKLSEQGAGEFVEPELPGFVPTSTLKSWLADEDGRDQFVIQKDNLTGIFWNSMHESEDDVVESRTNWSTNYVRFSPRGTYLFSYHPQGVTSWGGPQFDRLRRFYHPNVRTSSVSPDEHYLVTFSPEPIELDDSVPESPFTKRNEGHHICVWEIDTGLLCASFPLTKNPNLQWPFVKFSYNDKYCARFVGDRLAVYDCTNKFSLLEAPALKVSGIRDFSFAPTGVELQPFNKNDEPSVLLSYWTPETNNSACTASVVQVPRGRVLKTVNLVQVSNVTTYWPEGGEYLVFNVERHTKSKKTLFSNLQICKLTEKDIPVEKIEVKDRIMEVGWEPHGHRFITISTTEGPDDNIAIPKNVVRFYAPEKKEGVKNKIVVKRWVVIKEIEKKFYNTVSWSPAGRFVTVCALVKPNMRKSEFQFFDLDYPGEKNLNERKDVLATLKDVGESNYGAATDLCWDPSGRFLTAWSSSLKHKMENGYKMFNIAGVIIKEDILPNMKNFAWRPRPESLLSNAEKKKVRKTLKEWSAEFDEQDAMANDSAVRDLILKQRAMLKEWREYRAAKAQTTTIFDIAPWLDTTKDHEDFVKIEEIKEEIVEEIKEKL

SEQ ID NO: 25370 - DNA, 2199 bp, Kluyveromyces lactis NRRL Y-1140
  CDS (1)..(2199)
atgaccactttagagtccttaaagatagaagatattccggttgatgacatcgacttttccgatttggaaagagaattccaaatccaggatggtggtgtgaactttgacaactttttggttgtcgatggcgctccagttgcaccagaagctaaagttccggtcttagagaaggttttgaccaagttgttcagtcaagccggtaaagttctggatatgcaaattccagttgaagatggtaaaaccaagggtcatttgtttattgaaatggaatctgtttcagctgctaaagaagctatccagttattcaacggtaaaaagttagatgccaagcatagattgcttgtcaacagtttaaatgatatggaaaagtatggttctgacgatttcgaatcacaatctcacgaacctgttgttccagactttgcgccaacagatttcttgagatcttggttgcaaaaccaagacggtagagaccagtttgttctacaaaagggtgacatgacccgcgtattctggaacagattggctcatcaacctgatggtgtcggtgaagccagaaagaactggtcaaacgatgtcgtgaagttctcaccaaagggtacttatctattatctttccatgaccaaggtgttacttcttggggtggtccaaacttcgacagattgaagagatttttccatccagacgtttcccgtctagatgtttctccaactgagaagtttttgatcactttctcaatgaatccaattaaaccaggtgaagacactccatttggtcctgaatctgaaggtcatcaaatttgtgtttgggatcttgctactggtttcctaatgaaaacgttcggtattccaccaaatgccaagttgcaatggccattaattagattctcttacgatgacaaatactgtggtcgtctaggtccaaacgctttggctatttacgatattgaaaacaacttccaattgttggatggcaaacttcacaaggtcgaaggtattcaagatttctctttcgctccaaagggtgtacaattgacatacaacagaagaaagagtgacccaactacattattggcatactggactccagaaactaataaccagtcatgtaaggctttcctaatgactttaccaaacaagagaatagtcaaaactgtcaatttggttcaagtttctaacgtttctattcactggcatgaacaagcagactttgtctgcttccaagttgatcgtcataccaagtccaagaagactttcttcaccaatttggaaatttgtaagttaaatgaatccgaaattcctgtcgagaaaatcgaaatgaaggaccgtgtgttggagttagcatgggaaccaaagggtactagatttgtcactatttccaagatggataatggtggtgaagaaaacccaatgtatccaaagaactttgtcaaattctttgctccagaaaagaaggataataaagataaggatctagccgtcttacctgatcaattgaaatggaaactagtaaagactgttgatcaacaatttgccaattgcatctcttggtccccagctggccgttttgtcgcagtgtgtactatcgttaatggtaaggaaatcaagaaagcatctcttgacttctacgactttgatttcactggtgaaaagactttgaatgaagtccaggatgtcaaagcatctttgcaagcagttgctcatatcgataatcaattcttcactgatttagaatgggattcttccggtagattcttaacagcttggtctagttacagcaagcacaagctagaaaatggttacactatctacaactgctgcggtgaagctgttcgtaaggagatcgtagatcaattcagaaacttcgtctggagaccaagaccagaatcactcttgtctaacgctgaaaagaagaaggcaagaaagaatctgaaacaatggtctgtcaagttcgaagaacaggatgccatggaaagtgacagtgctttgagagatttgatcttgaagcgtcgtgcggaattgagcgcatgggtctcttacagagagcaatccaaggaaagattggaatccgaagacagttacactattttcgacaacttcgaaagcgacaaagctgacgaaactcaatatgtcactgtggaagaagttaaggaggaaatcttagaggaaactcaagaagaggtcgaatcgtttgaataa

SEQ ID NO: 25371 - protein, 732 aa, Kluyveromyces lactis NRRL Y-1140
MTTLESLKIEDIPVDDIDFSDLEREFQIQDGGVNFDNFLVVDGAPVAPEAKVPVLEKVLTKLFSQAGKVLDMQIPVEDGKTKGHLFIEMESVSAAKEAIQLFNGKKLDAKHRLLVNSLNDMEKYGSDDFESQSHEPVVPDFAPTDFLRSWLQNQDGRDQFVLQKGDMTRVFWNRLAHQPDGVGEARKNWSNDVVKFSPKGTYLLSFHDQGVTSWGGPNFDRLKRFFHPDVSRLDVSPTEKFLITFSMNPIKPGEDTPFGPESEGHQICVWDLATGFLMKTFGIPPNAKLQWPLIRFSYDDKYCGRLGPNALAIYDIENNFQLLDGKLHKVEGIQDFSFAPKGVQLTYNRRKSDPTTLLAYWTPETNNQSCKAFLMTLPNKRIVKTVNLVQVSNVSIHWHEQADFVCFQVDRHTKSKKTFFTNLEICKLNESEIPVEKIEMKDRVLELAWEPKGTRFVTISKMDNGGEENPMYPKNFVKFFAPEKKDNKDKDLAVLPDQLKWKLVKTVDQQFANCISWSPAGRFVAVCTIVNGKEIKKASLDFYDFDFTGEKTLNEVQDVKASLQAVAHIDNQFFTDLEWDSSGRFLTAWSSYSKHKLENGYTIYNCCGEAVRKEIVDQFRNFVWRPRPESLLSNAEKKKARKNLKQWSVKFEEQDAMESDSALRDLILKRRAELSAWVSYREQSKERLESEDSYTIFDNFESDKADETQYVTVEEVKEEILEETQEEVESFE

SEQ ID NO: 25372 - DNA, 2160 bp, Debaryomyces hansenii CBS767
  CDS (1)..(2160)
atgaacgataatatgtctgaacaagagtataggagtctcgagaaagaggtccaattagatgaccttgacttctctgacttggaagccaagtacgcagttaattctgattttggtatggataattatgttgttgtcgatggtgctccaattgctccagaggctaaagttcctattttaatcaaggttttaaagaaattattcaacactgttggtgaagttgtcgaaggtgacgaaggaatccacatgccattacaagatggtaagtccaagggttatttgtttgttcaatttaagactcctcaaatggcagaagctgctatccaacaattgcacggcaagaaattagatcaaaagcacagattgttagtcaacaaattaagtgatattgaaaagtttggtgcagaagggaatgttgaaattgatttccatgaacctgaaattccaccattcaagagtcatggttatttgagatcgtggttacaagatgagcaaggtcgtgatcaaatggctttacacttttctgaaactgttggtgtttattataacaagaagaagaatgacccagaacctgttattgaaccaagaaagggatttacttccaaatatgctaaattctctccattaggtacatatttgttttccgttcacccacaaggtgtccaatcatggggtggtgatggttttcaaagtattactaagtttatccataatcaagttcgtttaattgacttttctccaaacgaaaagtacatggttactttatccccacttccaattgccttaccagatgatccagcagagagatctattttcccgttcggcccagaaagtaatggtcataaattagtcatttgggatatggcaactggtgaacctgctagaacttttgcattaccaccacatttagaaggtcagaaggatatgccatggccattagtcaaatggtcgcatgacgacaaatactgtgcccgtcaaggacctggcgctttagccatttatgaaactccatcattccaattattagacaagaaattagtcaaggttgatgatgttgttgactttgaatgggctccagccgccgttcatctttctgactctaaggtaaaagaaggtgagtacattttgtcgtactggactcctgaaagttctaatcaaacagcaagagttgccttgatgcaaattccatctagaaaagttattagaaccatcaatttattccaagtcagtgattgtaagatgcactggcatggtgaaggtaagttcttgtgtgttaaggttgatcgtcataccaaatcccgtaagacatttttctctaatttagaattctttaaagttaccgaaaaggatattccagttgaaaaattagagttgaaggatgttgttttcaactttgcatgggaaccaagatcagaaagattcatcactatttccaggttagatgatggtaatcagaatccatctattgccaaaaatactatttccttctacgcaccacaagtcctgtcgaagggtagagttacaagctcgaaatacacatgtttcaaggaaatccatgataagcattctaacacagtttgctggtctccaaagggtagatttgttgttgttgctacaatttctaagtctagtggtgaattggaattttatgattgctcatatgaagaagataaaccagctaacagtaaagtcaacggtaatgttaaattattaaaagcagaaaaatactctggtatgacaaacttagcatgggatccatcaggaagatttgtcgctgcttggtcttcatcttgggctcattctatagaaaatggttatagattatttgaattcactggtaatatgttgaaggataacagtattgaccatttcaaggaattcatctggagaccaagaccagcttctttattgaatgctgctgacagaaaaaaggtcagaaagaacttacgtgaatatagtgctcaatttgatgaagctgatgccatggaggctgatgccgctagtagagaagctatcttattacgtcgtaagttgttagaacaatggagatcttacagagcaaagcatgctgctaatggttcaaagaagaatgaagtccaggctgaaatcattgaggaaatcaaagaagaaatcattgaagaaaaagaagaagttgttgagtag

SEQ ID NO: 25373 - protein, 719 aa, Debaryomyces hansenii CBS767
MNDNMSEQEYRSLEKEVQLDDLDFSDLEAKYAVNSDFGMDNYVVVDGAPIAPEAKVPILIKVLKKLFNTVGEVVEGDEGIHMPLQDGKSKGYLFVQFKTPQMAEAAIQQLHGKKLDQKHRLLVNKLSDIEKFGAEGNVEIDFHEPEIPPFKSHGYLRSWLQDEQGRDQMALHFSETVGVYYNKKKNDPEPVIEPRKGFTSKYAKFSPLGTYLFSVHPQGVQSWGGDGFQSITKFIHNQVRLIDFSPNEKYMVTLSPLPIALPDDPAERSIFPFGPESNGHKLVIWDMATGEPARTFALPPHLEGQKDMPWPLVKWSHDDKYCARQGPGALAIYETPSFQLLDKKLVKVDDVVDFEWAPAAVHLSDSKVKEGEYILSYWTPESSNQTARVALMQIPSRKVIRTINLFQVSDCKMHWHGEGKFLCVKVDRHTKSRKTFFSNLEFFKVTEKDIPVEKLELKDVVFNFAWEPRSERFITISRLDDGNQNPSIAKNTISFYAPQVLSKGRVTSSKYTCFKEIHDKHSNTVCWSPKGRFVVVATISKSSGELEFYDCSYEEDKPANSKVNGNVKLLKAEKYSGMTNLAWDPSGRFVAAWSSSWAHSIENGYRLFEFTGNMLKDNSIDHFKEFIWRPRPASLLNAADRKKVRKNLREYSAQFDEADAMEADAASREAILLRRKLLEQWRSYRAKHAANGSKKNEVQAEIIEEIKEEIIEEKEEVVE

SEQ ID NO: 25374 - DNA, 2154 bp, Yarrowia lipolytica CLIB122
  CDS (1)..(2154)
atgactgtggaggataacctcgatattgacttttccgatctggaggagaagtacgctgtcaacgcggacgagggctttgagtctttcatcgttgtcgatggagctcctgtgattccccaggccaagcaggcagccctggccaacgtcatgaagaagttctttggcgctgttggcaagatcaaggaagacggcatctttattcccttcgacgaggccaccggtaagtccaccggatttgtcttcattgagtacgagacgggcgagatggctgctgctgccgtcaagtctttccacaacaagcagtttgacaagaaccataagctgcttgtcaacaagctgtccgaggtggagaagtacggcatgcagtacgacactctgaaaaccgaggagtttgtcgagcccgagaccgagccttttgtggaacagggacatctgcgaagctggctcatggacccccagggccgagaccagtttgtgctccatcgaggagacacagtcggagtcttctggaacaaaaagggtgatactctggaggctgacgttgaccgagagcgatggaccgagacccaggtctactggtctcccaccggtacttaccttgtgtctactcatactcaaggtgttcagctgtggggtggccccgactgggctcctcctatctgcaaattccagcatcccaacgtcaagatggtgcagttttctccctgcgagaagttccttgtcacctggtctaacgttcctctcgttctccctgatgacgaggagaagcgaaagagcattccttttggccccgctgacgagggcaaacagatcattgtatggaacctcgagactcgacttcccgtccgaacctttgctatgcccccggagaagaagggcgcctctatgtcctggcccattctcaagttctctcctgacgacaagtacgctgcccgtatgatccccggagagcagctgtctatctacgagaccgagaccatgtctctgctggataagaagtccgtcaaggctcccggtatcgtcgactttgagtgggctcctgctcttgttaacctggagggacgacaaaagtccgccactgagtctgttctctgctactggactcctgaaattggcaaccagaccgctcgagtggtcctcatgaaggcttccaacaaggaggtgctgcgaacccgaaacctgttcaacgtggccgattgtaagatccactggcaggaccagggacgcttcctgtgcgtcaaggtcgaccgacacacaaagtccaagaagtctacctttaccaacctcgagttcttccgactgtgcgagcgaggagtgcccgtcgaggttatggagctcaaggacaccgtcaccaacatggcctgggagccccacggagaccgattcgtcaccatttccaactcggactccaccaccaactacgacggtcctctgcccgccaaccgacacactctgtccttctacgctcttgagcgacacaagggaacccagggcacatggaagctgatcaaggcatttgacaagaagaactgtaactctctgttctggtcccctaacggtcgattcctcatcactgtcatgattgagggctctaactctatcgatctcgacttctgggacatggactacgagggtgaccgaaagcacggtgacaaggatcttcctgccaacctgcacttcctcggctcgtccgagcactacggtatctctgctctcgagtgggatccctctggacggtttgtcgccacctggtcttcctactggagacaccacaccgaaaacggatacaagatctgggacttccgaggccagctgcagcgagaggagtccattgaccgattcaagcacttttcctggagaccccgaccccctactctgctctccaagcagcagaagaaggatatccgaaacaacctggaggagtactctcgaaagtttgaggagatcgacgccatggaggcttccgaggcttctcgagagcttatcatgctgcggaagcgactgctcgaggagtggaccgcctggagagcccagactgacaagaagctcgaggagctgggtcttgtcgagcccgagcctgccgagtccgagtacaccaccatcgaggagatcaaggaggttgttgtcgaagataaggaggaggtttgcgagtaa

SEQ ID NO: 25375 - protein, 717 aa, Yarrowia lipolytica CLIB122
MTVEDNLDIDFSDLEEKYAVNADEGFESFIVVDGAPVIPQAKQAALANVMKKFFGAVGKIKEDGIFIPFDEATGKSTGFVFIEYETGEMAAAAVKSFHNKQFDKNHKLLVNKLSEVEKYGMQYDTLKTEEFVEPETEPFVEQGHLRSWLMDPQGRDQFVLHRGDTVGVFWNKKGDTLEADVDRERWTETQVYWSPTGTYLVSTHTQGVQLWGGPDWAPPICKFQHPNVKMVQFSPCEKFLVTWSNVPLVLPDDEEKRKSIPFGPADEGKQIIVWNLETRLPVRTFAMPPEKKGASMSWPILKFSPDDKYAARMIPGEQLSIYETETMSLLDKKSVKAPGIVDFEWAPALVNLEGRQKSATESVLCYWTPEIGNQTARVVLMKASNKEVLRTRNLFNVADCKIHWQDQGRFLCVKVDRHTKSKKSTFTNLEFFRLCERGVPVEVMELKDTVTNMAWEPHGDRFVTISNSDSTTNYDGPLPANRHTLSFYALERHKGTQGTWKLIKAFDKKNCNSLFWSPNGRFLITVMIEGSNSIDLDFWDMDYEGDRKHGDKDLPANLHFLGSSEHYGISALEWDPSGRFVATWSSYWRHHTENGYKIWDFRGQLQREESIDRFKHFSWRPRPPTLLSKQQKKDIRNNLEEYSRKFEEIDAMEASEASRELIMLRKRLLEEWTAWRAQTDKKLEELGLVEPEPAESEYTTIEEIKEVVVEDKEEVCE

SEQ ID NO: 25376 - DNA, 2217 bp, Aspergillus nidulans FGSC A4
  CDS (1)..(2217)
atggcacctagcttcgagaacctgtcggagcaagatctccacgaagaagaggaggaggagattgacttctccgacctcaaggcgcagtacgaagtgaaacttgaggagggcttggacacattcgtcgtcatcgatggactcccagtcgtaccagaagagaacagacagaaactcatcaaattcttgctgaggaaactcaacacagtcggccacacctccgaagatgccgtcttcatgcccctcaacgagaagaatatgtccgaaggatttgcctttgtcgagtacgaaaccgcagagcaagccgttgccgccgtaaagcagctgcacggaacgccccttgataagaagcatactctcctcgttaacaaattgatggatatcgaacgttatggccgggaaggacgtatcgacgaggaatataagcctccgaatatcgaaccattcacagagaaggagcacctgcgctcgtggctcggggaccccaatgcccgtgaccagttcgccctttaccgcggcgacaaggttggggttttctggaacaacaagagcaacccgccggagaatgttgtcgaccgtgcccattggacacagcttttcgtccagtggtcccccaagggtacatatctcgcctctgttcacccacagggggtgcaactgtggggtggtccgactttctccaagcaaaagcaattccctcatccctttgtttctctcatcgagttctcgcctggcgagagctacttgactacctggtctgcccggcctatccaggtggaggagggccaccccgtactgacatacgaagaggatggaaagaatatcattgtctgggacatcgtaacaggcaagcctctccgatcatttgtttcccacgatctcgccggtcccgaaagcgaagcgcagcccaagaagaaagttcagtggccggcttttaagtggtccgctgatgaaaagtacgtggcgagaatgcttcagggccagtcgatctccatctacgaacttccccggatgaacttgctcggtaagacgtcggttaagattgacggagtgatggacttcgaatggtcgccggctacagtcaaccgtgacggtgtcaagcagtacgagcagctcctatgcttctggactcccgaaatcggcagcaaccctgcccgagtcgcccttatgagcgtgccttccaaggagattgttcgaactcgtaaccttttcaacgtttccgatgtgaaactgcactggcaatcccagggtaacttcgtttgcgttaaggtggatcgtcactcaaagtctaagaagtctatggccaccaacctcgaaattttccgcgtacgggagaagggtgtcccggttgaagtggtagacagtctcaaggacaccgtgatcaacttctcgtgggaacccaacggtgctcgcttcgttctcatcacgactggtgacgcatctggggctggtgcgcctcccaagacggccgtctcgttcttcgctccggaaaagaaaggtgtacaagccggcaactttaaacttgttcgcactattgagaagaagaccagcaatgctatttactggtctcctaagggccgtttcgtcgtggtggcgactgttcactcgcaatcaaactttgaccttgatttctgggatatggatttcgagggtgagaagaacgataacgagaaggatctagcggccaacctgcagctgatgaagaccgtcgaccactatggtgtcacagatattgaatgggatcccacaggtcgttacgttgtcagtggtgctagcgcgtggacgcaccagatggaaaacggattcaaccttcacaccttctccggagagactcttgcggagaaccctacggacaagttcaagcagttcctctggcgtcctcgccctcctactcttctcagcaaagaagagcaaaagcaagtacggaagaacctccgcgagtactcgaaggaattcgaggaggaagacaagtatgctgtcgacattgccaacaccgccgttgtcgagaagcgcaagcgtgtcctcaacgagtgggttgcttggctcaagcgcgagaaggagctactcaccgaggagaaggaagcctacggcctacccgaagaagccgaccaacccaaggctgccaaggatgcgcccaccaacacagaggacaagggcgagacggtggtcgaagagattgtggaagagattgtggaggaaagcgaggagattattggttga

SEQ ID NO: 25377 - protein, 738 aa, Aspergillus nidulans FGSC A4
MAPSFENLSEQDLHEEEEEEIDFSDLKAQYEVKLEEGLDTFVVIDGLPVVPEENRQKLIKFLLRKLNTVGHTSEDAVFMPLNEKNMSEGFAFVEYETAEQAVAAVKQLHGTPLDKKHTLLVNKLMDIERYGREGRIDEEYKPPNIEPFTEKEHLRSWLGDPNARDQFALYRGDKVGVFWNNKSNPPENVVDRAHWTQLFVQWSPKGTYLASVHPQGVQLWGGPTFSKQKQFPHPFVSLIEFSPGESYLTTWSARPIQVEEGHPVLTYEEDGKNIIVWDIVTGKPLRSFVSHDLAGPESEAQPKKKVQWPAFKWSADEKYVARMLQGQSISIYELPRMNLLGKTSVKIDGVMDFEWSPATVNRDGVKQYEQLLCFWTPEIGSNPARVALMSVPSKEIVRTRNLFNVSDVKLHWQSQGNFVCVKVDRHSKSKKSMATNLEIFRVREKGVPVEVVDSLKDTVINFSWEPNGARFVLITTGDASGAGAPPKTAVSFFAPEKKGVQAGNFKLVRTIEKKTSNAIYWSPKGRFVVVATVHSQSNFDLDFWDMDFEGEKNDNEKDLAANLQLMKTVDHYGVTDIEWDPTGRYVVSGASAWTHQMENGFNLHTFSGETLAENPTDKFKQFLWRPRPPTLLSKEEQKQVRKNLREYSKEFEEEDKYAVDIANTAVVEKRKRVLNEWVAWLKREKELLTEEKEAYGLPEEADQPKAAKDAPTNTEDKGETVVEEIVEEIVEESEEIIG

SEQ ID NO: 25378 - DNA, 2238 bp, Ustilago maydis 521
  CDS (1)..(2238)
atgcccagcgtagacgaaatcaccaacggtgtcgacgagctcgactttgttgacgatgccgacatcgacttttccgacattgaacaaaagtactcggtcaagttcgacgaaggcctcgacgatgtcatcgttattgagggcgtccccgtcatcaccgagtcgcgtcaacagaagctgttcgagacgattcagaaacgtttcaagacgcatgccaacattgacattgccgttgagggcatgcacatcccttatgccgataacggagagtccaagggctacatctttgtcgagatggcttctgccgaagatgccgctcaagccatccgtcagatggacggctacgcctttgacaagaagcaccgcttctctgtccatcgattcaccgacgtcgagaaattcgccagcctttccgagacctacgaagagcctcaggaggaagagttcaagcctcgtgaacaccttcgctcctggctagctgaccctgctggtcgtgatcagttggttatctgccgtggtgacgacgtagagatcgcttggcacaatcgctcatcggatcctcaggtcgagcacagccgtcctcgctggacagaaagctacgtccagtggtcgcccctcggtactttcctcaccaccttccaccgtcaaggtattcagatctggggtggaccctcatgcgagcgcttcatgcgtttccctcatcccggagcgcgtctggtcgacttttctcccagtgaaaagtacatggtcacctggtcgcacgagcctatccaggttcccgacaatgctcccatcggtcctcagttctttggtcccgaagacgagggcaaccgcatcgccgtctgggaggtccgaaccggtcacctcttgcgtagcttccccgtgcctcaggacgagagcggccagccaggtcagctcaagggcttctcctggcccttcctcaaatggagccccgatgacaagtactgcgctcgtctcaacccgggtcaggccatcagtgtatacgagaccccctccatgggtctgctcgagaaaaagtcgatcaagatcgagggtgttgtcgactttgagtggtgtcccatgggcgacaaggatcgcgagcttgccgaggctgctaagcctaacaagaaggccagggacaacatgattgtatactggcagcccgaggtggccaaccagcctgcacgtgtcactgtcatggctgtaccatcaagaaccatcctgcgttccaagaacctctttaatgtctcggattgcaagctgcactggcatccgcagggcgactacctctgtgtcaaggtcgaccgacacacaaagaccaaaaagtccatgttctgcaacctcgaaattttccgcgtgcgagaaaaagagttccccgtcgaggttgttgagctcaaggacgctgtcactgcttttgcgtgggagccgttcggaacccactttgcccttatctcgagcaatgacccccagctcggtacaccggcatctggtatcacgatcaagacgcagctcaacttttatcacctccaccccaagggcgacttccgtccgctcaaggtgtttgacaacaagacagccaatacgctcttctggtcgcctcgtggtcgtcacatcgtcgtcgcaacgctcggcagctcgcaaaagtttgatcttgagtggtacgacgtcgacttcatgcatgaagtccgacagggcaacccctcggctgatccagctgacgatgtcaagcttatcggcacgggtgagcactacgggatcactgacctcgaatgggacccctcaggtcgctatgtagccacttcggcttcggtctggcgacactcgctcgaaaacggcttcgccatctgggacttcaagggccaggagctgcaaaagcatatccaggaccgcttcaagcagatcctttggcgcccgcgaccccgtacgcttcttggtaaagacgagcagaagagagtgcgcaaaaacctgcgagaatactccaagcagttcgaggaggaggacgccgccgaggagtccaaccttgcttcggccgagcgcgaactgtaccaacgcatcctggaggagtggaaggcatggcgtgcacgatcccgtcgcgacctcgagcagctgcgcgcagatcttggtcgcgaggaggtcggccagagcgtcgaccacgccaagaagcttgccgaggaggccaccgaggaggtgcaagaatggatggaggagatcattgaagagacggaggaagtgctcgcctag

SEQ ID NO: 25379 - protein, 745 aa, Ustilago maydis 521
MPSVDEITNGVDELDFVDDADIDFSDIEQKYSVKFDEGLDDVIVIEGVPVITESRQQKLFETIQKRFKTHANIDIAVEGMHIPYADNGESKGYIFVEMASAEDAAQAIRQMDGYAFDKKHRFSVHRFTDVEKFASLSETYEEPQEEEFKPREHLRSWLADPAGRDQLVICRGDDVEIAWHNRSSDPQVEHSRPRWTESYVQWSPLGTFLTTFHRQGIQIWGGPSCERFMRFPHPGARLVDFSPSEKYMVTWSHEPIQVPDNAPIGPQFFGPEDEGNRIAVWEVRTGHLLRSFPVPQDESGQPGQLKGFSWPFLKWSPDDKYCARLNPGQAISVYETPSMGLLEKKSIKIEGVVDFEWCPMGDKDRELAEAAKPNKKARDNMIVYWQPEVANQPARVTVMAVPSRTILRSKNLFNVSDCKLHWHPQGDYLCVKVDRHTKTKKSMFCNLEIFRVREKEFPVEVVELKDAVTAFAWEPFGTHFALISSNDPQLGTPASGITIKTQLNFYHLHPKGDFRPLKVFDNKTANTLFWSPRGRHIVVATLGSSQKFDLEWYDVDFMHEVRQGNPSADPADDVKLIGTGEHYGITDLEWDPSGRYVATSASVWRHSLENGFAIWDFKGQELQKHIQDRFKQILWRPRPRTLLGKDEQKRVRKNLREYSKQFEEEDAAEESNLASAERELYQRILEEWKAWRARSRRDLEQLRADLGREEVGQSVDHAKKLAEEATEEVQEWMEEIIEETEEVLA

SEQ ID NO: 25380 - DNA, 2262 bp, Cryptococcus neoformans var. neoformans B-3501A
  CDS (1)..(2262)
atgtccgccgccgacctagactatttttcagaagatgagcagcgtgagattgaagctgagctcgacactggcttcaaggacattgaggaaaagtatgctgtgaccgcccagaagggctttgagacgatgttggtcgtcgacaacattcctatcgtagacggtagtaagaagcagagactgttggagcgattgagacagacattcgccaaagtgggcgcgcccatcgaggaggaaagtatagacatgccttggaacgcagcagctggtactaacaaaggtttcgttttcctgacataccccgatgtgaaggaagcggaaaatgccgtccacactctcgacggtgtatcctttggtaaaaacgtgctgcacgtaaatcgatttggagacattcaacgcttcgccagtatgcctgttggagagggcgatctgccatcgggctggaaagaaaaggagtatattgagaaggattacttgcgaaattggcttggggatattgctgggagagaccagtatgtaaccttctgggaaacagaggttactgtctggtggaacggacgcaatggaaccgccgaggcattaaaggggcccgacggtaaacctgtgaagaacagtaaatggggtgagttgtacctacagtggtccaccatgggaacctacttggcttcgcttcatcgtgttggcgttgccctatggtccggtcccaaactcgatggacccattggcgtcaatgtgctcagattcactcaccccaatgttcggcttatccaattttccccctgcgagaattatctcgttacctggtcagaagatcctcttccaaattatgagaatcatcccaatgcagctctgcgagacactttcggtcctgaagacgaaggaaaccagtatgtcatttgggacatcaagacgacacgtgttcttcggacattccctggtgataaatctgcaattggggtagatgatactcaatcccgcatgtcgtggccaaccttcaagtggtctgcggatgactcgtatatcgctaagtgcaatgtcggcgcggggatttcagtgtatgaactgcccactatgggattgttggatagaaagagtatcaaaatcgagggggtacaagactttgaatggtgtcctatgagccagaaggatttgatagcgagacaagaaggaaagggaaaggagtgtgttctagccttctggacccctgaagctcagaatcagcccgctagagtgaacataatggctgtaccaagccggacgatcttgagatcaaagaacctgtttaatgtctctgaatgtaaattctattggcagagtcaaggtgatttcctttgtgtaaaggttgatcgccatgctcgaaaggccaaatccaaaaaggcaacttcgtgcaatttagaaattttccgcatgcgcgagaaagattaccctgtggaggttcttgaatttaaagattacgttccgcaatttgcatgggagccttcgggcactcgctttgccatcgttctccaagcagaaacaaatcttccatcggtctcaggggcgtcgaccaagtacagcatcgatttctatcagcttgattccaagaagggagatttcatcgcaattaaacatcttgacagcaaaatggccaatactctcgtctggtcacccaagggtcgtcatatcgcattggccaccataggatcgtccagcaagtatgatatcgaattctgggaccttgacttcactatcgacgaaaggcgagaggctgctgagcttggggctaacgtaactatgttgggcactggggaacattacggcatcacagagattgcttgggatcctagtggacggtacattgcgacttctgcatctacatggcgacagtcccctgagcctggcttttctatttgggatttcaaaggtcaacaacttctgcacgaatcacgggatcgtttcaagcagttcctttggcggcctcgtcctcctacgctgcttagtaaggatcagattaagaaggtcagaaaggaacttcgagaatattcgcgacagtttgatgaagaagatgctgcggaggagaaccgagggagtgccgagaagctcgcccagcgtcgcagagagatcggcgagtggaatgcttggaggactaggaacaacgacaggctggcttttgaacgcgagaacagaggcaagtcaaaggcaaagatcgatgttaaagggcaggaggcacgggttgaggagtgggtcgaagaacttatcgatgagactgaggaattgtcgatgtaa

SEQ ID NO: 25381 - protein, 753 aa, Cryptococcus neoformans var. neoformans B-3501A
MSAADLDYFSEDEQREIEAELDTGFKDIEEKYAVTAQKGFETMLVVDNIPIVDGSKKQRLLERLRQTFAKVGAPIEEESIDMPWNAAAGTNKGFVFLTYPDVKEAENAVHTLDGVSFGKNVLHVNRFGDIQRFASMPVGEGDLPSGWKEKEYIEKDYLRNWLGDIAGRDQYVTFWETEVTVWWNGRNGTAEALKGPDGKPVKNSKWGELYLQWSTMGTYLASLHRVGVALWSGPKLDGPIGVNVLRFTHPNVRLIQFSPCENYLVTWSEDPLPNYENHPNAALRDTFGPEDEGNQYVIWDIKTTRVLRTFPGDKSAIGVDDTQSRMSWPTFKWSADDSYIAKCNVGAGISVYELPTMGLLDRKSIKIEGVQDFEWCPMSQKDLIARQEGKGKECVLAFWTPEAQNQPARVNIMAVPSRTILRSKNLFNVSECKFYWQSQGDFLCVKVDRHARKAKSKKATSCNLEIFRMREKDYPVEVLEFKDYVPQFAWEPSGTRFAIVLQAETNLPSVSGASTKYSIDFYQLDSKKGDFIAIKHLDSKMANTLVWSPKGRHIALATIGSSSKYDIEFWDLDFTIDERREAAELGANVTMLGTGEHYGITEIAWDPSGRYIATSASTWRQSPEPGFSIWDFKGQQLLHESRDRFKQFLWRPRPPTLLSKDQIKKVRKELREYSRQFDEEDAAEENRGSAEKLAQRRREIGEWNAWRTRNNDRLAFERENRGKSKAKIDVKGQEARVEEWVEELIDETEELSM

SEQ ID NO: 25382 - DNA, 2220 bp, Candida albicans SC5314
  CDS (1)..(2220): transl_table=12
atgtcaattaacgaggaagattatcttcaacttgaaaaggaaatcaaattagatgacattgatttttctgatttagaagaaaaatatgaagttaatattggattagataattatattattgttgatggagctccaattgcaccagaagctaaagttccagttttaattaaagttttacggaaattattttctcaagttggggaaattgttgaaggagatgaaggaatttatatgccattagaaaatggtaaatctaaaggatatcttttcattcaatttaaatcaacagaactggccgatttagccattaaaaaattacatgggaaaaaattggatcaaaatcatcgattattagttaataaattatctgatatggaaaaatatggtgttgatggagctgttaatgaagaattcattgaaccagaaattgaaccatttcaaagtcatggatatttgaaatcttggttacaagatgaacaaggtagagatcaaatggttttacattttagtgaaacggtaggagtttattggaataaaaaatctgctgatccagaaccagtcattgaaccaagaaaagggtttacttctaaatatgctaaattttcaccaaaagggacatatttattttcaattcatcctcaaggtattcaatcatggggtggagctaatttcaatagtattaaaagatttttccatcaacaagttagattagttgatttttctccaaatgaaaagtttatggttactttatcacctattccaattagtttacccgattcaacggttgatcgtgctcaattcccatttggtcctgaaagtgaaggtcataaattggtcatttggaatatgattactggtgaaccagtcagaacatttgctttaccacctcatttagaaggacaaaaggaaatgccgtggccattagttaaatggtcttatgatgataaatattgtgctcgtcaaggaccagatgctttagccatttatgaaactgaatccaatttccaattattagataaaaaattggttaaagttgatggtattcaagatttcgaatgggctccagctggggttaaacttcataatagtaaagctgttgatggtaaacatgttttgagttattggactccagaaagtactaatcaaaccgctagagttgccttgatgcaaattccttcgagagaaattttacgtactgtcaatttattccaagttagtgattgtaaaatgcattggcaatctaatgggaaattattatgtgttaaagttgatcgtcatacaaaatcaggtaaaactattttctccaatttggaatttttcaaaactaatgaaagagatatcccagttgaaaaattagaattaaaagatgtggtggttaattttgcttgggaaccaaatactgaaagatttattactattagtagattagatgatggtaatccgaatcctgctattccaaaaaataccatttcattctatgcaccagaagttaccaaaggtggagttaatcacaatctgaaaaagaaaggtggtgccgccattgctgctgctgttgctgctgctgctattaataatcaactgtcaactaaatataaggcatacaccaaaatcgaaaacaaacactcaaacactattttctggtcaccaaagggaagatatgttgttgttgctactatttcaagaacttctggtgaattggaatttttcgatgtttcatttgatgatgaaactaataaaaaatcattacctgctaatgtcaaattattaaagaccgataaattttctggaatgaccaatatttcttgggatccatcaggtagatttgttgctgcttggtcaacttcttggttacatgccattgaaaatggttatagactttatgaattcactggtaatttattaagagatgattcaattgatcaattcaaagattttgtttggagaccaagaccaccatctttattgaccaatagtgataaaaagaaggtcagatccaatttacgtgaatatagtgcacaatttgaagaagctgatgctatggaagctgatgctgctgttaaagaaatcattttggctcgtagaaaggctttggaagaatggagaaagtaccgtgccaaacatattagtaaacaaggtaattccaagaacgaagttcaagcagaaattattgaagaaattaaagaagagattattgaagaaaaagaagaaattgttgaataa

SEQ ID NO: 25383 - protein, 739 aa, Candida albicans SC5314
MSINEEDYLQLEKEIKLDDIDFSDLEEKYEVNIGLDNYIIVDGAPIAPEAKVPVLIKVLRKLFSQVGEIVEGDEGIYMPLENGKSKGYLFIQFKSTESADLAIKKLHGKKLDQNHRLLVNKLSDMEKYGVDGAVNEEFIEPEIEPFQSHGYLKSWLQDEQGRDQMVLHFSETVGVYWNKKSADPEPVIEPRKGFTSKYAKFSPKGTYLFSIHPQGIQSWGGANFNSIKRFFHQQVRLVDFSPNEKFMVTLSPIPISLPDSTVDRAQFPFGPESEGHKLVIWNMITGEPVRTFALPPHLEGQKEMPWPLVKWSYDDKYCARQGPDALAIYETESNFQLLDKKLVKVDGIQDFEWAPAGVKLHNSKAVDGKHVLSYWTPESTNQTARVALMQIPSREILRTVNLFQVSDCKMHWQSNGKLLCVKVDRHTKSGKTIFSNLEFFKTNERDIPVEKLELKDVVVNFAWEPNTERFITISRLDDGNPNPAIPKNTISFYAPEVTKGGVNHNSKKKGGAAIAAAVAAAAINNQSSTKYKAYTKIENKHSNTIFWSPKGRYVVVATISRTSGELEFFDVSFDDETNKKSLPANVKLLKTDKFSGMTNISWDPSGRFVAAWSTSWLHAIENGYRLYEFTGNLLRDDSIDQFKDFVWRPRPPSLLTNSDKKKVRSNLREYSAQFEEADAMEADAAVKEIILARRKALEEWRKYRAKHISKQGNSKNEVQAEIIEEIKEEIIEEKEEIVE

SEQ ID NO: 25384 - DNA, 2106 bp, Tribolium castaneum
  CDS (1)..(2106)
atggcgaaaaagaaagtggacgacaaaaacagccttaacgggaataatacgaagaacgagagcgatttatcgtccaacgatgatgaaccaaacttcagcgatcccgagggatacgtcgacaacatcaccgatgaagagctcctggccgatattttgaagcagaagccgaaggagactgacggtgttgagagcgtgattgtggtcgacggtgtcccgcaagtgggccccgaccgtatcgagaaattgaaatccgtcattaataagattttcgtcaagttcggatccatagtcaatgagtactatccagtgaccgaaaacggtcacaccaaaggctacattttcctggaatactcctctccagtcaacgcagctgaagccgtgaagctcaccaataatttcaagcttgataagcagcacactttccaagtcaatctcttcactgactttaccaaatatgaggcgattccggaggagtgggaccccccgaagccgcagccctacgagggccagggggacgtccaccactatttgctcgagcctgatgcttacgaccaatttgccgtggttttgggacagggacagtcggttcaaatttggcaaaatacgcagcctgatccttccttacttgaggagagacatgcttggacacatgcttatatcaagtggtctccgttaggtacgtatttagccactttccataagcaaggtatcgcgttatgggtgggtcagaagtttagccaatacaaaaggtatgcccatgccaatgcacaatttattgatttttcgccgtgcgagaagtatttggtgacgtactcgcctcagggagatccgcagcatccgcaacagaaagggatcattatttgggatataagaactggccaagaaaagcgttctttcaaccctgaaggcccctcctcatggccgattttccgctggtctcacgacgacaaatacttcggacgcgtgggcaacgacgtcctctccatctacgaaaccccctcgttcggtctccttgagaaaaaatcaatcaaaatcagcggcatccgcgacttcagctggtcgcccaccgacaacatcgtcgcctattgggtggcagaagacaaagacgttccagccagcgtaaccctccttgaaatccccaaccgcaacgaaatccgcaagaagaacctcttcaacgtcgccgattgcaaaatccactggcaaaaatctggcgattatctatgcgtcaaagtcgaccgttactcgaaagttcgcaaagagaaaaatgagacgaagtacagcggaatgtactgcaacttcgagatcttccacatgagggaaaaacagatcccggtggatagcgtcgagagtaaggaacccatccaggcgttcgcttgggaaccggtcggatcgaagtttgcggtcatacatggagaatcgccgaatattaatgtcagtttttacgaagtgagagtgggacaagccccaattctgcttaaaaagttcgagaaaagggcgtgtaatcacctgttttggtcgcccggaggccagtttattgttttggcggggttgggatcgaatggtggtggatcattggagtttgttgatacgcacgagtttttggttatgaatacgacggatcatttccaaatgtcggatgtcgagtgggatccgacgggaagatacgtcacgacgtccgtttcgtactggaaaaccaaagttgatacaggttattggatttggtcgttccaaggaaaaatcctgaaacgtgttaatttggaaaaattcgcccagttgttgtggcgtccacgacctgcaactttattgtctgaagaaaagcagaaagaaatcaaaaagaacctcaaaaagtattatccacagtttgagagcaaagacagaatgagacaatcgaaagcttcaaaggaacttatcgaaaaacgtgccgctttaatgaaggagtttaacgaatacagaagtaaaaggattaaggaatataacgagaataagcaaagacgacttcaacttagaaataatattgataccgatgaattagatgccgacccacaaaacgtagaagaagaaattgtagaattctttattaaagaggaaacaaccattttggactaa

SEQ ID NO: 25385 - protein, 701 aa, Tribolium castaneum
MAKKKVDDKNSLNGNNTKNESDLSSNDDEPNFSDPEGYVDNITDEELLADILKQKPKETDGVESVIVVDGVPQVGPDRIEKLKSVINKIFVKFGSIVNEYYPVTENGHTKGYIFLEYSSPVNAAEAVKLTNNFKLDKQHTFQVNLFTDFTKYEAIPEEWDPPKPQPYEGQGDVHHYLLEPDAYDQFAVVLGQGQSVQIWQNTQPDPSLLEERHAWTHAYIKWSPLGTYLATFHKQGIALWVGQKFSQYKRYAHANAQFIDFSPCEKYLVTYSPQGDPQHPQQKGIIIWDIRTGQEKRSFNPEGPSSWPIFRWSHDDKYFGRVGNDVLSIYETPSFGLLEKKSIKISGIRDFSWSPTDNIVAYWVAEDKDVPASVTLLEIPNRNEIRKKNLFNVADCKIHWQKSGDYLCVKVDRYSKVRKEKNETKYSGMYCNFEIFHMREKQIPVDSVESKEPIQAFAWEPVGSKFAVIHGESPNINVSFYEVRVGQAPILLKKFEKRACNHLFWSPGGQFIVLAGLGSNGGGSLEFVDTHEFLVMNTTDHFQMSDVEWDPTGRYVTTSVSYWKTKVDTGYWIWSFQGKILKRVNLEKFAQLLWRPRPATLLSEEKQKEIKKNLKKYYPQFESKDRMRQSKASKELIEKRAALMKEFNEYRSKRIKEYNENKQRRLQLRNNIDTDELDADPQNVEEEIVEFFIKEETTILD

SEQ ID NO: 25386 - DNA, 2700 bp, Oryza sativa subsp
  CDS (1)..(2700)
atggcgctagaaatctccatggaaggcatcgaagcgcgggcgcgggagcttggggtcgacctctccaccgtcgatctcgactccgtcaccctccccgccggcgaggacttcggcatcctcagtgacgatgaggatttacttcggattgatgaccctatggagcttgaaatggggtttgctaacgttgttgtcgtggacaacctgcccgttgttccaccagagaagtttgagaagttggagaacgtcatacgcaagatctacagtcaaattggtgcgatcaaagaaggtggtctttggatgcctgtaaacccagagacaaagaagacatacggttactgcttcatcgagtataataccccacaggaagctgagcttgctagggaaaagacaaatgggtacaagctcgacaagtctcacatctttgcagttaacatgtttgatgactttgacaagtacatgaaagttccagacgaatggatgcctgctgaaattaagccatacactcctggagagaacttgcaaaaatggctggctgatgagaaggcccgggaccaatttgttatccgtgctggtactttcactgaagtttactggaatgatgcaaggcagaagatgcctgaacttgtgttccaaaagcagtactggacagacagttttattcagtggtcccctcttggaacatacttggcaacagtgcataggcagggctcccaggtgtggggtggcgacgataagtttgagcgtctaatgcgatttgctcatgcacaggtgaaactgattgacttctcccctggtgagaaatatttggtcacatatagtagccacgagcccagcaaccctagagacactcatagggttgttcttaatatctttgatgtgaggactggcaaagtgatgcgcgactttaaaggaagtgctgatgaattcagtgccagtggaaatatcagtgtttctggtgtttcatggcctattttcagatggggtggtggaaaagacgataaatattttgcaaggcttgggaagaatgttatatctgtctatgagactgaaacattctcccttcttgataagaaatctctgaaggttgagaatgtcgtcgacttctgctggtctccaactgatccaatcatagccctttttgtccctgagttgggtggaggaaaccagcctgcaagggtgagccttgtgcaaattcctggcaaagaggagctgcggcagaaaaaccttttcagtgtcagtgattgcaagatgtactggcagaacagtggagaatatcttgctgtccaggttgatagatacacaaaaaccaagaagagtacttacactggatttgagctttttagaattaaggaaagggacatacccattgaggttcttgaattggacaacaagaacgataagatcattgcctttgcatgggagcccaaaggtcaccgctttgctgttattcatggtgatggccctaagcctgatataagcttctactccatgaaaacatccaacaacatcagtcgtgtgtccaagctcaccactctcaagggcaagcaggctaatgcattgttctggtctcctggtggaagattcattgttttcgctggtctgaagggctttaatgggcagctggagttttacaatgttgatgagcttgagacgatggcaacgggtgaacatttcatggctactgacattatgtgggatcctactggaagatatcttgcatctgcagttacctcagtccatgaaatggagaatggtttccaaatatggtctttcagtggcaagcaactttacaaggtgtcaaaggaccacttctttcagttcctgtggcgtccgagaccaccgtcgctgctgacccctgaaaaggaagacgagattgcgaagaacctgaggaagtacagcaagaagtacgagcaagaggatcaggatgccttcaaccagctgagcgagcaggaacgcaagaggcggaagcagcttcaggaggaatgggaaggatgggttgccaagtggaagcagctgcacgaggaagagagaccatacaggatggagctcagagacggggaggccagtgacgatgaggaagagtacgacaccaaggaagttgagattgaagaggagatcatcagacggttttcaaatccgtcttcctgccgtctcggtatcttcctctgccttggcgaattccaagttcaggcatcccggcgttgcaagatgcaatcggacgcggtggcgcggagccccaggcaaacggtgagagtcggaggccggcgccccacggccgatccctcccgcggctcatcggaggcgtacggcttcgtgggatccatcgccgcggtggccgccgccgccgcctacctcgcgtgggcttacctgccggagccgtggctgcgtttcctcggtgtcacctactaccccgccaggcattgggcactggccatgccgtcgctgctgctggaagcggcggcgcaggggatggtgctctacatggcctccaactttctgctcgctcctgctccgactttgcttggccactatctccgtggtacatgttcagatattttttgccttttgccagatgaatttgcccgggagcctgcggcgtgtggtactgcaacaggggaggagaaacccatcgaggacatatcagatattagcattgacaagataaacaatctcatgtttggcaatgcatcatcaagctga

SEQ ID NO: 25387 - protein, 899 aa, Oryza sativa subsp
MALEISMEGIEARARELGVDLSTVDLDSVTLPAGEDFGILSDDEDLLRIDDPMELEMGFANVVVVDNLPVVPPEKFEKLENVIRKIYSQIGAIKEGGLWMPVNPETKKTYGYCFIEYNTPQEAELAREKTNGYKLDKSHIFAVNMFDDFDKYMKVPDEWMPAEIKPYTPGENLQKWLADEKARDQFVIRAGTFTEVYWNDARQKMPELVFQKQYWTDSFIQWSPLGTYLATVHRQGSQVWGGDDKFERLMRFAHAQVKLIDFSPGEKYLVTYSSHEPSNPRDTHRVVLNIFDVRTGKVMRDFKGSADEFSASGNISVSGVSWPIFRWGGGKDDKYFARLGKNVISVYETETFSLLDKKSLKVENVVDFCWSPTDPIIALFVPELGGGNQPARVSLVQIPGKEELRQKNLFSVSDCKMYWQNSGEYLAVQVDRYTKTKKSTYTGFELFRIKERDIPIEVLELDNKNDKIIAFAWEPKGHRFAVIHGDGPKPDISFYSMKTSNNISRVSKLTTLKGKQANALFWSPGGRFIVFAGLKGFNGQLEFYNVDELETMATGEHFMATDIMWDPTGRYLASAVTSVHEMENGFQIWSFSGKQLYKVSKDHFFQFLWRPRPPSLLTPEKEDEIAKNLRKYSKKYEQEDQDAFNQLSEQERKRRKQLQEEWEGWVAKWKQLHEEERPYRMELRDGEASDDEEEYDTKEVEIEEEIIRRFSNPSSCRLGIFLCLGEFQVQASRRCKMQSDAVARSPRQTVRVGGRRPTADPSRGSSEAYGFVGSIAAVAAAAAYLAWAYLPEPWLRFLGVTYYPARHWALAMPSLLLEAAAQGMVLYMASNFLLAPAPTLLGHYLRGTCSDIFCLLPDEFAREPAACGTATGEEKPIEDISDISIDKINNLMFGNASSS

SEQ ID NO: 25388 - DNA, 2634 bp, Oryza sativa subsp
  CDS (1)..(2634)
atggcgctagaaatctccatggaaggcatcgaagcgcgggcgcgggagcttggggtcgacctctccaccgtcgatctcgactccgtcaccctccccgccggcgaggacttcggcatcctcagtgacgatgaggatttacttcggattgatgaccctatggagcttgaaatggggtttgctaacgttgttgtcgtggacaacctgcccgttgttccaccagagaagtttgagaagttggagaacgtcatacgcaagatctacagtcaaattggtgcgatcaaagaaggtggtctttggatgcctgtaaacccagagacaaagaagacatacggttactgcttcatcgagtataataccccacaggaagctgagcttgctagggaaaagacaaatgggtacaagctcgacaagtctcacatctttgcagttaacatgtttgatgactttgacaagtacatgaaagttccagacgaatggatgcctgctgaaattaagccatacactcctggagagaacttgcaaaaatggctggctgatgagaaggcccgggaccaatttgttatccgtgctggtactttcactgaagtttactggaatgatgcaaggcagaagatgcctgaacttgtgttccaaaagcagtactggacagacagttttattcagtggtcccctcttggaacatacttggcaacagtgcataggcagggctcccaggtgtggggtggcgacgataagtttgagcgtctaatgcgatttgctcatgcacaggtgaaactgattgacttctcccctggtgagaaatatttggtcacatatagtagccacgagcccagcaaccctagagacactcatagggttgttcttaatatctttgatgtgaggactggcaaagtgatgcgcgactttaaaggaagtgctgatgaattcagtgccagtggaaatatcagtgtttctggtgtttcatggcctattttcagatggggtggtggaaaagacgataaatattttgcaaggcttgggaagaatgttatatctgtctatgagactgaaacattctcccttcttgataagaaatctctgaaggttgagaatgttgtcgacttctgctggtctccaactgatccaatcatagccctttttgtccctgagttgggtggaggaaaccagcctgcaagggtgagccttgtgcaaattcctggcaaagaggagctgcggcagaaaaaccttttcagtgtcagtgattgcaagatgtactggcagaacagtggagaatatcttgctgtccaggttgatagatacacaaaaaccaagaagagtacttacactggatttgagctttttagaattaaggaaagggacatacccattgaggttcttgaattggacaacaagaacgataagatcattgcctttgcatgggagcccaaaggtcaccgctttgctgttattcatggtgatggccctaagcctgatataagcttctactccatgaaaacatccaacaacatcagtcgtgtgtccaagctcaccactctcaagggcaagcaggctaatgcattgttctggtcgcctggtggaagattcattgttttcgctggtctgaagggctttaatgggcagctggagttttacaatgttgatgagcttgagacgatggcaacgggtgaacatttcatggctactgacattatgtgggatcctactggaagtggcaagcaactttacaaggtgtcaaaggaccacttctttcagttcctgtggcgtccgagaccaccgtcgctgctgacccctgaaaaggaagacgagattgcgaagaacctgaggaagtacagcaagaagtacgagcaagaggatcaggatgccttcaaccagctgagcgagcaggaacgcaagaggcggaagcagcttcaggaggaatgggaaggatgggttgccaagtggaagcagctgcacgaggaagagagaccatacaggatggagctcagagacggggaggccagtgacgatgaggaagagtacgacaccaaggaagttgagattgaagaggagatcatcagacggttttcaaatccgtcttcctgccgtctcggtatcttcctctgccttggcgaattccaagttcaggcatcccggcgttgcaagatgcaatcggacgcggtggcgcggagccccaggcaaacggtgagagtcggaggccggcgccccacggccgatccctcccgcggctcatcggaggcgtacggcttcgtgggatccatcgccgcggtggccgccgccgccgcctacctcgcgtgggcttacctgccggagccgtggctgcgtttcctcggtgtcacctactaccccgccaggcattgggcactggccatgccgtcgctgctgctggaagcggcggcgcaggggatggtgctctacatggcctccaactttctgctcgctcctgctccgactttgcttggccactatctccgtggtacatgttcagatattttttgccttttgccagatgaatttgcccgggagcctgcggcgtgtggtactgcaacaggggaggagaaacccatcgaggacatatcagatattagcattgacaagataaacaatctcatgtttggcaatgcatcatcaagctga

SEQ ID NO: 25389 - protein, 877 aa, Oryza sativa subsp
MALEISMEGIEARARELGVDLSTVDLDSVTLPAGEDFGILSDDEDLLRIDDPMELEMGFANVVVVDNLPVVPPEKFEKLENVIRKIYSQIGAIKEGGLWMPVNPETKKTYGYCFIEYNTPQEAELAREKTNGYKLDKSHIFAVNMFDDFDKYMKVPDEWMPAEIKPYTPGENLQKWLADEKARDQFVIRAGTFTEVYWNDARQKMPELVFQKQYWTDSFIQWSPLGTYLATVHRQGSQVWGGDDKFERLMRFAHAQVKLIDFSPGEKYLVTYSSHEPSNPRDTHRVVLNIFDVRTGKVMRDFKGSADEFSASGNISVSGVSWPIFRWGGGKDDKYFARLGKNVISVYETETFSLLDKKSLKVENVVDFCWSPTDPIIALFVPELGGGNQPARVSLVQIPGKEELRQKNLFSVSDCKMYWQNSGEYLAVQVDRYTKTKKSTYTGFELFRIKERDIPIEVLELDNKNDKIIAFAWEPKGHRFAVIHGDGPKPDISFYSMKTSNNISRVSKLTTLKGKQANALFWSPGGRFIVFAGLKGFNGQLEFYNVDELETMATGEHFMATDIMWDPTGSGKQLYKVSKDHFFQFLWRPRPPSLLTPEKEDEIAKNLRKYSKKYEQEDQDAFNQLSEQERKRRKQLQEEWEGWVAKWKQLHEEERPYRMELRDGEASDDEEEYDTKEVEIEEEIIRRFSNPSSCRLGIFLCLGEFQVQASRRCKMQSDAVARSPRQTVRVGGRRPTADPSRGSSEAYGFVGSIAAVAAAAAYLAWAYLPEPWLRFLGVTYYPARHWALAMPSLLLEAAAQGMVLYMASNFLLAPAPTLLGHYLRGTCSDIFCLLPDEFAREPAACGTATGEEKPIEDISDISIDKINNLMFGNASSS

SEQ ID NO: 25390 - DNA, 2067 bp, Aedes aegypti
  CDS (1)..(2067)
atggccaaaaagaaaggcgaaaactacgacagtgatgggggtgacgatcaggactacgacgaggagcccaatttcgatgatccggagggttttgtggacgacgtctctgacgaagaattgcttggtgattttctgaagcaaaaaccttgcgaatcggacggcgtagaaaatgttattgtcgtggataatattccggttgttggaccggcccgattccataagctgcaaggagtattggagaaactgttcaagacggccggaacgattgtcaacattcactaccccaaggatgatgaggagaacacccgaggttacgccttcattgagtttaagaatccggagatggccgaagaagccgtgaaggcattcaacaactatcgtctggacaagtcgcatacgttactggtaaatttgttttccgatttccaaaaatactcggacattcccaaagaatggagccctccggaaccgcagccctacaagatgcaaaacgatctttataacttcataactgaaccggacgcacaggatcagttctgtgtgatagccgaatcttcgccgggagcggtgcaggtccagttttggcaaaacacccaacccgaacccgtggaactgctgactcgtgatcgtttcacggaaacatacgtcaagtggtctcccctgggaacgtacatcgtgacgttccacaagcaaggtgtcgttatttggggtggttccaatttcaccaaaatcaacaaattcccgcactctggaactcaatatgtggacttttctccctgtgaacagtatttggtgacctacggtccaaacggccagaagatcatcatctgggacattcggaccggaacggaaaaacgttccttcatctcggacggcacttccaacatgtcgatgttccgttggtcccacgacgataaatacgtggcccggatgggtgacaatgcaattcatgtgtatgaaacgtcgactttctatcttttggataagaaatctattaaggtccaaggcattcgcaacttcagttggtctccaacggataacattattgcctactggatgtccgaagatctggaggctcccgctcgtgtgactctgttggaaatacctaggaaaaacgaaatccgtaataagaatttattcaacgtagctgattgtaagattcattggcaaaaatcaggagattacctctgtgtgaaggtcgatcgttactctaagtctaagaaagataagaaggacgccgatgttaagttccttggtatgttctacaactttgaaatcttccacatgcgagagaaggacattcccgtggactcggtagaggtaaaggagactatcctggcgtttgcttgggaaccagttggatctaagtttgccattatccatggcgatccagcgtccgcaaatgtcagcttctatgaggccaaaaagggacaagaacctacaatgttgaagaaattggagaaaaagatttgcagtcatctgttctggtccccgcgggggcagtttattgtgttggcaaacctccaggctggatcgtttgagtttgtggataccaacgactttaccatcatgaagagcggcgatcacttccgtgcttcggaggtggaatgggaccctaccggccgatatgtggtgactggaacctctggaaaggtcaaggaggatcacggttatcacatttggtccttccaaggcaagatactgaagcgcgtcaatctgaagaacttcattcttttcctctggcgtcctcgtccgcccactctattgtcagacgaaaagcagaaagaaatacgcaaaaacctcaaaaagtactacgcacaattcgagagcaaggatcgcatccgcatgacccgtgcctcgaaggaattgttggaaaaacgtgccaaactgcgagagcagtttgtggaatatcgcaccaagcgtgtgagcgaatgggaggagcagaagtaccggcgtatgcagctgagaaacaacatagataccgacacattggacgctgatccagataacgttgaagaagaaatagtagaaattctagtacgtgaagacaccaccctgctcgagtaa

SEQ ID NO: 25391 - protein, 688 aa, Aedes aegypti
MAKKKGENYDSDGGDDQDYDEEPNFDDPEGFVDDVSDEELLGDFLKQKPCESDGVENVIVVDNIPVVGPARFHKLQGVLEKLFKTAGTIVNIHYPKDDEENTRGYAFIEFKNPEMAEEAVKAFNNYRLDKSHTLLVNLFSDFQKYSDIPKEWSPPEPQPYKMQNDLYNFITEPDAQDQFCVIAESSPGAVQVQFWQNTQPEPVELLTRDRFTETYVKWSPLGTYIVTFHKQGVVIWGGSNFTKINKFPHSGTQYVDFSPCEQYLVTYGPNGQKIIIWDIRTGTEKRSFISDGTSNMSMFRWSHDDKYVARMGDNAIHVYETSTFYLLDKKSIKVQGIRNFSWSPTDNIIAYWMSEDLEAPARVTLLEIPRKNEIRNKNLFNVADCKIHWQKSGDYLCVKVDRYSKSKKDKKDADVKFLGMFYNFEIFHMREKDIPVDSVEVKETILAFAWEPVGSKFAIIHGDPASANVSFYEAKKGQEPTMLKKLEKKICSHLFWSPRGQFIVLANLQAGSFEFVDTNDFTIMKSGDHFRASEVEWDPTGRYVVTGTSGKVKEDHGYHIWSFQGKILKRVNLKNFILFLWRPRPPTLLSDEKQKEIRKNLKKYYAQFESKDRIRMTRASKELLEKRAKLREQFVEYRTKRVSEWEEQKYRRMQLRNNIDTDTLDADPDNVEEEIVEILVREDTTLLE

SEQ ID NO: 25392 - DNA, 2151 bp, Medicago truncatula
  CDS (1)..(2151)
atggcggatgtaatgctaatgaaagaaattgaagacaaagcgttgcttcttggtatcgatctatcctctatcgatcttgattccattcacctccctccaggtgacaactgcggaatccccagcgacgatgatgttgatcaagaggagaatctggagtttgattctggatttggcaatattattgtagtggataatctacccgttgttcccaaggagaaattcgagaagcttgtaacagttgttaggaaaatttatagtcagattggtgctattaaagaggacggtctctggatgcctgttgatcccgctactgaaaagtccttaggttattgcttcatcgagtacaacactcctcaggaagctgagcttgctaaagagaagactcagggatacaaactggatcgttcccatatattttctgttagtatgttcgatgattttgatcgattcatgaaagtgccagacgagtgggctcctcctccaaacaaggaatatgctccaggggaaaatctgcaacaatggcttactgatgctaaggcacgagaccagtttgtgattcgtgctggttcagatacggaggttttgtggaatgatgcaaagcttttaaagcccgaccctgtttataaacgtgctttttggacggagagttttgtacaatggtcacctttgggtacttacttggcaactgttcaccgtcagggggcagcagtttggggaggtgctaccaccttcaaccgtctcatgcgttatgcacatcctcaggttaagcttattgatttttcacctggtgagaagtatttggtaacttatagcagccatgaaccaagcaatcctcgagatgctaatagggttgtgatcaacatatttgatgtgaggactggtaaagtgatgagagattttaagggaagtgctgatgattttgctattggaggtactgggggtgtcactggagtgtcatggcctgttttcaaatggagcggtggaagagatgataagtactttgcaaggatgggaaaaaatgtactgtctgtatatgagacagaaacattttctcttgttgacaaaaaatctttgaaggttgaaaatataatggatttcagctggtcaccgactgatccaatcatttcactgtttgttcctgagacaggaggtggtaaccagcctgctagggtaagtcttgttcaaatccccagcaaagaagaactcaggcaaaagcttctttttaatgtcagtgactgcaagatgtactggcagagcaatggagaataccttgctgttaatgttgatcgatataccaaaacaaagaaaagcacattcacaggctttgagcttttccgtataaaggaacgtgacatacctattgaagttctggagctcgagaataagaatgataagatcattgcatttgcttgggagccaaagggacatagatttgctgttattcatggtgataaccctaaacctgatattagtatctactcaatgcgaactgctcagaacactggccgagtttcaaagctcactactctgaaaggcaagcaggcaaatgctttgttttggtcaccagcaggtcggttcattgtactagcagggttgaaaggtttcaatggactgttagaattttacaatgttgatgagcttgaaaccatggctaatactgaacatttttatgcaactgatgttgaatgggatccaactggaaggtatgttgcaactgctgtaacttcagttcatgaaatggaaaatggattcaatatatggtctttcaatggcaaacatctttatcggatattgaaggatcatttctttcagttcttatggagacccagaccagcttctttcttgactgctgagaaggaggaagagattgcaaagaacttgaagaagtatagtaagaaatatgaagctgaagaccaagatgtttcattgctgctgagtgagcaagagcgtgagaagcgtagggtcttgaaagaagattgggacaagtgggccaatgagtggaagctgttgcatgaagaagagaagctagagagggaaaatctgagggacggagaagctagtgacgaggaagaggaatatgaagccaaggacattgaagttgaggaagtagtcgatgttaccaaagagatccttcaagttgaggagtattag

SEQ ID NO: 25393 - protein, 716 aa, Medicago truncatula
MADVMLMKEIEDKALLLGIDLSSIDLDSIHLPPGDNCGIPSDDDVDQEENLEFDSGFGNIIVVDNLPVVPKEKFEKLVTVVRKIYSQIGAIKEDGLWMPVDPATEKSLGYCFIEYNTPQEAELAKEKTQGYKLDRSHIFSVSMFDDFDRFMKVPDEWAPPPNKEYAPGENLQQWLTDAKARDQFVIRAGSDTEVLWNDAKLLKPDPVYKRAFWTESFVQWSPLGTYLATVHRQGAAVWGGATTFNRLMRYAHPQVKLIDFSPGEKYLVTYSSHEPSNPRDANRVVINIFDVRTGKVMRDFKGSADDFAIGGTGGVTGVSWPVFKWSGGRDDKYFARMGKNVLSVYETETFSLVDKKSLKVENIMDFSWSPTDPIISLFVPETGGGNQPARVSLVQIPSKEELRQKLLFNVSDCKMYWQSNGEYLAVNVDRYTKTKKSTFTGFELFRIKERDIPIEVLELENKNDKIIAFAWEPKGHRFAVIHGDNPKPDISIYSMRTAQNTGRVSKLTTLKGKQANALFWSPAGRFIVLAGLKGFNGLLEFYNVDELETMANTEHFYATDVEWDPTGRYVATAVTSVHEMENGFNIWSFNGKHLYRILKDHFFQFLWRPRPASFLTAEKEEEIAKNLKKYSKKYEAEDQDVSLLLSEQEREKRRVLKEDWDKWANEWKLLHEEEKLERENLRDGEASDEEEEYEAKDIEVEEVVDVTKEILQVEEY

SEQ ID NO: 25394 - DNA, 2226 bp, Aspergillus oryzae
  CDS (1)..(2226)
atggcgcccagtttcgataccctgtccgagcaggatctccacgaagaggaggaggaggagattgacttctccgatctcaaggagcagtttgaagtgaagctcgaggagggcttggatacatttatcgtcatcgatggactcccgatcgtgccggaagagagcagacagaagcttatcaaattcttgctgaggaaactcaacgcggtcggccacacctccgaagatgccgttttcatgccaaccaacgacaagaacatgtccgaaggtttcgcctttgtcgaatatgaaacccccgaacaagccattgccgcagtcaagcagctgcacggaacacctctcgacaagaagcacacccttgccgtgaacaaattgatggatattgatcgctatggtcgtgaaggacgcatcgatgaggaatataagcccccaactgtcgaacctttcaaggagaaggagcacctccgctcatggttgtccgaccccaacgcccgtgaccagttcgccctctaccgtaatgacaaagttggcgtgttctggaacaacaagaacaatccgccagagaacgtcgtcgatcgtgctcattggacacagctcttcgttcagtggtcccccaagggtacataccttgcatccgtccacccccagggcgtgcagctctggggcggtcctgctttctcgaaacagaagcagttcccccatccgtttgttcagctcgtcgagttctcgccaggtgagagctacttgaccacctggtcttcccgccccattcaggttgaagagggtcaccctgtcttgtccttcgaagaggatggaaagaacattatcgtttgggatatcgtctctggaaagcctctgcgttccttcgtttctcatgatctcgccggcggccctgttgagggcgatgctgccccgaagaagaaggtgcagtggcccgctttcaagtggtccgctgatgagaagtacgtcgcaagaatgctccagggccagtctatctctatctacgagttgcctcggatgaacttgctgggtaagacttccgttaaaattgatggagtcatggacttcgaatggtcgccagcaacagttacccgtgatggtgtcaagcaatatgaacaactcctctccttctggactcctgaaattggtagcaatcccgcaagagtcgccttgatgagcgttccatctaaggagattgtacgaacccgtaacctgttcaacgtctctgatgtgaagctgcactggcagtctcaaggtacctacgtttgtgtcaaggttgatcgtcactccaagtccaagaaatcgatggctaccaaccttgagattttccgggtgcgcgagaagggtgttcctgttgaagttgtggacagtctcaaagacaccgtgatcaactttgcatgggaacccaacggtggacgttttgtcctgatcactacgggtgaagcccccagcggtgctgctgttctccccaagacctctgtatctttcttcgctcctgaaaagaagggcccccaggctggtaacttcaagcttgtgcgcaccatcgagaagaagacgagcaacgctatctactggtcccccaagggccgtttcgtcgttgtcgccacagttcactctcaatcgaacttcgatttggacttctgggatatggactttgagggtgaaaaggctgagggtgagaaggatctggccgccaacctccaattgatgaagaccgtggagcactacggtgtcacagatatcgactgggatcctacaggtcgctacgttgttagcagtgctagtgtgtggactcattcgatggaaaacggctggaacattcacactttcgccggtcagaccctcgctgagcaccctaccgataaattcaagcagttcgtttggcgtcctcgcccacccactcttcttagcaaggaggagcagaagcaagtgcgcaagaacctccgtgagtactccaaggagttcgacgaggaagacaagtatgctgtcgacattgccaacaccgccgttgtcgagacgcgcaagcgcgttctcaacgagtgggttgcctggctccgccgggagaaggagctcatggccgaggagaaggatgcgtacggtatccccgaagatgcagacgatgccaaggttgccaaggacgctccccctgtctccgaggaccagggcgaggccgttgtcgaagagattgtggaagagattgtggaggagaacgaggaagttatcggttga

SEQ ID NO: 25395 - protein, 741 aa, Aspergillus oryzae
MAPSFDTLSEQDLHEEEEEEIDFSDLKEQFEVKLEEGLDTFIVIDGLPIVPEESRQKLIKFLLRKLNAVGHTSEDAVFMPTNDKNMSEGFAFVEYETPEQAIAAVKQLHGTPLDKKHTLAVNKLMDIDRYGREGRIDEEYKPPTVEPFKEKEHLRSWLSDPNARDQFALYRNDKVGVFWNNKNNPPENVVDRAHWTQLFVQWSPKGTYLASVHPQGVQLWGGPAFSKQKQFPHPFVQLVEFSPGESYLTTWSSRPIQVEEGHPVLSFEEDGKNIIVWDIVSGKPLRSFVSHDLAGGPVEGDAAPKKKVQWPAFKWSADEKYVARMLQGQSISIYELPRMNLLGKTSVKIDGVMDFEWSPATVTRDGVKQYEQLLSFWTPEIGSNPARVALMSVPSKEIVRTRNLFNVSDVKLHWQSQGTYVCVKVDRHSKSKKSMATNLEIFRVREKGVPVEVVDSLKDTVINFAWEPNGGRFVLITTGEAPSGAAVLPKTSVSFFAPEKKGPQAGNFKLVRTIEKKTSNAIYWSPKGRFVVVATVHSQSNFDLDFWDMDFEGEKAEGEKDLAANLQLMKTVEHYGVTDIDWDPTGRYVVSSASVWTHSMENGWNIHTFAGQTLAEHPTDKFKQFVWRPRPPTLLSKEEQKQVRKNLREYSKEFDEEDKYAVDIANTAVVETRKRVLNEWVAWLRREKELMAEEKDAYGIPEDADDAKVAKDAPPVSEDQGEAVVEEIVEEIVEENEEVIG

SEQ ID NO: 25396 - DNA, 2262 bp, Cryptococcus neoformans var
  CDS (1)..(2262)
atgtcggtcaccgacttaacctatttctcggaagatgaacaacgcgagatccaagccgaactggacgcgggcttcaaggacatcgaggaaaagtatgctgtgaccgctcagaagggatttgagacgatgttggttgttgataacatccccgtcgtggatgttagcaagaaacaaagacttatagaacggttgaggcagacatttgccaaagtgggcgcgcccgtcgaggaggaaagcattgacatgccttggaatgtaacaactggcaccaacaaaggctttgtctttctaacgtatcccgacgtcaaggaagctgaaaatgcggtccatgttcttgacggcgtgtctttcggtaaaaacatacttcacgtcaatcgattcggagacatacagcgatttgccagcttgcctataggcgagggcgatttgccagccggctggaaagagaaggactatattgagaaagattatttgcgaagctggcttggggatcttgctggaagagatcaatatgtgactttctgggacacggaggttagcatctggtggaacggacgcaatggcagcgccgaggttttgaggggtcctgacggtaagcccgtgaagaacaacaaatggggtgaattgtatctacaatggtcccctatgggcacttacttggcctcacttcatcgtgtcggtgttgctctttggtccggccccaaacttgatgggcccattggcgtcaatgtcctcagattcactcaccctaacgttaggctcattcagttttctccctgtgagaattatctgattacctggtcagaagatcctcttccgagctatgagaaacatcctaatgcagctttgagagagaccttcggtccggaagatgaagggaaccaatatgtcgtttgggacataaagacggcacgcgttctccgcacattcccaggtgatagacttgcctctggtgctgatgatggccaatcccgcatgtcatggccagcattcaaatggtctgcggatgattcgtatgttgcaaaatgcaatgtcggtacgggaatcgcagtatatgagctccctatgatgggtcttctggacaaaaagagtatcaagattgagggtgttcaagactttgaatggtccccgatgagccaaaaggaaatcgtagccaggcatgatggcaagggcaaggaatgcgttttggccttctggacccctgaagctcaaaatcagccagctcgagtgaacatcatttctgttcctagccggacagttttaaggtcgaagaatttgttcaacgtttctgattgtaaattctactggcaaagtcaaggtgatttcctttgtgttaaggttgaccgccatgctcgaaaggcgaaatccaaaaaagctacttcatgcaacttggaaatcttccgcatgcgagagagagattaccctgtggaggttcttgaattcaaagattacgttccacaatttgcgtgggagcctttggggactcggttcgcaattgtgcttcaaacagaagctcacccttcctcggtatctggtgcgtcgacgaagtatagcatcgacttctatcagcttgacttgaagaagggtgattttattccaatcaagcatctcgacagcaaaatggccaatactcttgtttggtcaccaaaaggtcgccatatcgcgttggccactatagggtcgtccagcaagtttgatatcgagttctgggatcttgacttcaccgtcgatgaaaggcgagaggccgctgagcaaggagctaatgttacaatgctgggcaccggggaacatttcggtatcacggagattgcctgggatcctagtggacggtacattgcgacttctgcatctacatggcgacagtctcctgagccagggttttctatctgggactttaagggtcaacaacttctgcatgagtcgcgagatcgcttcaagcaattcctttggcgaccgcgtcctccgacgctccttagcaaggaacaaattaagaaagtcaggagggaacttcgagaacattcgcgccaatttgatgaagaagatgctgcagaggagaacagaggaagcgcagagaagctcgcgcaacgtcgcagagagattggggagtggaatgcttggagggctaggaacaacgacaggctggctgttgagcgtgagaatagaggaaagtcaaaggctaagatcaaggtggaagggcaggaggcacgggttgaggagtggtttgaagaactcatcgacgagattgaagaactgtcgacttag

SEQ ID NO: 25397 - protein, 753 aa, Cryptococcus neoformans var
MSVTDLTYFSEDEQREIQAELDAGFKDIEEKYAVTAQKGFETMLVVDNIPVVDVSKKQRLIERLRQTFAKVGAPVEEESIDMPWNVTTGTNKGFVFLTYPDVKEAENAVHVLDGVSFGKNILHVNRFGDIQRFASLPIGEGDLPAGWKEKDYIEKDYLRSWLGDLAGRDQYVTFWDTEVSIWWNGRNGSAEVLRGPDGKPVKNNKWGELYLQWSPMGTYLASLHRVGVALWSGPKLDGPIGVNVLRFTHPNVRLIQFSPCENYLITWSEDPLPSYEKHPNAALRETFGPEDEGNQYVVWDIKTARVLRTFPGDRLASGADDGQSRMSWPAFKWSADDSYVAKCNVGTGIAVYELPMMGLLDKKSIKIEGVQDFEWSPMSQKEIVARHDGKGKECVLAFWTPEAQNQPARVNIISVPSRTVLRSKNLFNVSDCKFYWQSQGDFLCVKVDRHARKAKSKKATSCNLEIFRMRERDYPVEVLEFKDYVPQFAWEPLGTRFAIVLQTEAHPSSVSGASTKYSIDFYQLDLKKGDFIPIKHLDSKMANTLVWSPKGRHIALATIGSSSKFDIEFWDLDFTVDERREAAEQGANVTMLGTGEHFGITEIAWDPSGRYIATSASTWRQSPEPGFSIWDFKGQQLLHESRDRFKQFLWRPRPPTLLSKEQIKKVRRELREHSRQFDEEDAAEENRGSAEKLAQRRREIGEWNAWRARNNDRLAVERENRGKSKAKIKVEGQEARVEEWFEELIDEIEELST

SEQ ID NO: 25398 - DNA, 2262 bp, Cryptococcus neoformans var
  CDS (1)..(2262)
atgtccgccgccgacctaggttacttttcagaagatgaacagcgtgagattgaagctgagctcgacattggcttcaaggacattgaggaaaagtacgctgtgaccgcccagaagggttttgagacgatgttggtcgtcgacaacattcctatcgtagacgatagtaagaagcagagactgttggagcgattgaagcagacattcgccaaagtgggcgcgcccatcgaggaggaaagtatagacatgccttggaacgcagcagctggtactaacaaaggtttcgttttcctgacgtatcccgatatgaaggaagcggaaaatgccgtccaagctctcgacggtgtatcctttggtaaaaacgtgctgcacgtaaatcgatttggagacattcaacgtttcgccagtatgcctattggagagggggatctgccatcgggctggaaagagaaggagtatattgagaaggattacttgcgaagttggcttggggatcttgctgggagagaccaatatgtaaccttctgggaagcagaggttacggtctggtggaatggacgcaatggaaccgctgaggcattaaagggtcccgacggtaaacctgtgaagaacaataaatggggtgagttgtacctacaatggtccaccatggggacctacttggcttcgcttcatcgtgttggtgttgccctttggtccggttccaaactcgatggacccattggcgtcaatgtgctcagattcactcaccctaatgttcggcttgtccaattttccccctgcgagaattatcttgttacctggtcagaagatcctcttccaaactatgagaatcatcccaatgcagctctgcgggagactttcggtcctgaagacgaaggaaaccaatatgtcatttgggacatcaagacgacacgtgttcttcggacattcccaggtgataaatctgcatttggggcagatgatactcaatcccgcatgtcgtggccaactttcaagtggtctgcggatgactcgtatgtcgctaagtgcaatgtcggcgcggggatttcagtgtatgaactgcctactatgggattgttggataaaaagagtatcaaaattgagggggtacaagacttcgaatggtctcctatgagtcagaaggatttgatagcgaggcaagaaggaaaggggaaggagtgtgttctagccttctggacccctgaagctcagaatcagcccgctagagtgaacataatggctgttccaagccggacgattttgagatcaaagaacctgtttaatgtctcagaatgtaaattttattggcagagtcaaggtgatttcctttgtgtaaaggttgatcgccatgctcgaaaggccaaatccaaaaaggcaacttcgtgcaatttggaaattttccgcatgcgcgagaaagattatcctgtggaggttcttgaatttaaagattatgttcctcaatttgcttgggagccttcgggcactcgttttgctatcgttctccaaacagaagcaaatctttcatccgtctcaggggtgtcgaccaagtacagcatcgacttctatcagcttgattccaagaagggggatttcatcgcaatcaagcatcttgacagcaagatggccaatactcttgtttggtcacccaagggccgccatatcgcattggccacgataggatcgtccagcaagtatgatatcgaattctgggatcttgacttcactatcgacgaaaggcgagagactgctgagcttggggctaacgtgaccatgttgggcactggggagcattacggcattacagagattgcttgggatcctagtggacggtacattgcgacttctgcatctacatggcgacagtcccctgagcctggcttttctatttgggacttcaagggtcaacagcttctgcacgaatcacgggatcgcttcaaacagttcctttggcggcctcgtcctccaacgctgcttagtaaggatcagattaagaaggtcagaaaggaacttcgagaatattcgcgccagtttgatgaagaagatgctgcggaggagaaccgagggagtgccgagaagctcgcccagcgtcgcagagagatcggcgaatggaatgcttggaggactaggaacaacgacaggatggctgttgagcgcgagaacagaggcaagtcaaaagcgaagatcgatgttaaagggcaggaggcacgggttgaggaatgggtcgaagaacttatcgatgagactgaggaattgtcgatgtaa

SEQ ID NO: 25399 - protein, 753 aa, Cryptococcus neoformans var
MSAADLGYFSEDEQREIEAELDIGFKDIEEKYAVTAQKGFETMLVVDNIPIVDDSKKQRLLERLKQTFAKVGAPIEEESIDMPWNAAAGTNKGFVFLTYPDMKEAENAVQALDGVSFGKNVLHVNRFGDIQRFASMPIGEGDLPSGWKEKEYIEKDYLRSWLGDLAGRDQYVTFWEAEVTVWWNGRNGTAEALKGPDGKPVKNNKWGELYLQWSTMGTYLASLHRVGVALWSGSKLDGPIGVNVLRFTHPNVRLVQFSPCENYLVTWSEDPLPNYENHPNAALRETFGPEDEGNQYVIWDIKTTRVLRTFPGDKSAFGADDTQSRMSWPTFKWSADDSYVAKCNVGAGISVYELPTMGLLDKKSIKIEGVQDFEWSPMSQKDLIARQEGKGKECVLAFWTPEAQNQPARVNIMAVPSRTILRSKNLFNVSECKFYWQSQGDFLCVKVDRHARKAKSKKATSCNLEIFRMREKDYPVEVLEFKDYVPQFAWEPSGTRFAIVLQTEANLSSVSGVSTKYSIDFYQLDSKKGDFIAIKHLDSKMANTLVWSPKGRHIALATIGSSSKYDIEFWDLDFTIDERRETAELGANVTMLGTGEHYGITEIAWDPSGRYIATSASTWRQSPEPGFSIWDFKGQQLLHESRDRFKQFLWRPRPPTLLSKDQIKKVRKELREYSRQFDEEDAAEENRGSAEKLAQRRREIGEWNAWRTRNNDRMAVERENRGKSKAKIDVKGQEARVEEWVEELIDETEELSM

SEQ ID NO: 25400 - DNA, 2250 bp, Cryptococcus neoformans var
  CDS (1)..(2250)
atgtcggtcaccgacttaacctatttctcggaagacgaacaacgcgagatccaagctgagctggattcgggctttaaggacatcgaggaaaagtatgctgtgaccgctcagaagggatttgagacgatgttggttgttgataacatccccgtcgtggatgttagcaagaagcaaagacttttagaacggttgaagcagacatttgccaaagtgggcgcgcctgtcgaggaggaaagcattgacatgccttgggatgtaacatctggcaccaacaaaggctttgtctttctaacgtaccccgacgtcaaggaagctgaaaatgccgtccatgttcttgaaggcgtgtctttcggtaaaaacgtacttcacgtcaatcgattcggagacatacagcgatttgccagtttgcctataggcgagggcgatctgccagcgggctggaaagagaaggactatattgagaaagattatttgcgaagctggcttggggatcttgctggaagagatcagtatgtgactttctgggacacggaggtcagcgtctggtggaacggacgcaatggaagcgctgaggttttaaggggtcctgacggtaagcccaaatggggtgaattgtatctacaatggtcccctatgggaacttacttggcctcacttcatcgtgtcggcgttgctctttggtccggccccaaactcgatgggcccattggcgtcaatgtgctcagattcactcaccctaatgttcggcttattcagttttctccttgtgagaattatctgattacctggtcagaagatcctcttccgaactatgagaatcatcctaatgtagctttgagagagaccttcggtccggaagatgaagggaaccagtatgtcatttgggacattaagacgacacgtgttctccgcacattcccaggtgacagacttgcctctggtattgatgatggccagtcccgcatgtcatggccagtattcaaatggtctgcggatgattcttatgttgcaaaatgcaacgtcggtacgggaatcgcagtatacgagctccctatgatgggtcttctggacaaaaagagtatcaagattgagggtgttcaagacttcgaatgggcccctatgagccaaaaggaaatggtagccaggcatgaaggaaagggcaaggaatgcgttttggccttctggacccctgaagctcaaaatcagccagctcgagtgaacatcatgtctgttcccagccggacagttttaaggtcgaagaatctgttcaacgtttctgattgtaaattctactggcaaagtcaaggtgacttcctttgtgttaaggttgaccgccatgctcgaaaggcgaaatccaaaaaagctacctcatgcaacttggaaatcttccgcatgcgggagagagattaccctgtggaggtccttgaattcaaagattatgtcccacaatttgcgtgggagcctttggggactcggttcgcaattgttcttcaaacagaagttcatccttcagcagtggctggtgcgtcgacgaagtatagcatcgacttttatcagcttgacttgaagaagggtgattttattccaatcaagcatctcgacagcaagatggccaatactcttgtttggtcacccaagggtcgccatatcgcgttggccactatagggtcgtccagcaagtttgatatcgagttctgggatcttgacttcaccatcgatgaaaggcgagagaccgctgagcaaggagctaatgttacaatgctgggcactggggaacatttcggcatcaccgagattgcctgggatcctagtggacggtacattgcgacttctgcatctacatggcgacagtctcctgagccagggttttctatttgggactttaagggtcaacagcttctgcacgagtcgcgagatcgcttcaagcaattcctttggcgaccgcgtcctccgacgctccttagcaaggaacaaatcaagaaagtcaggagagagctccgagaacattcgcgccagtttgatgaagaagatgctgcagaggagaacagaggaagcgcagagaagctcgcgcaacgtcgcagagagatcggggagtggaatgcttggagggctaggaataacgacaggctggctgttgagcgtgagaatagaggcaaatcaaaagctaagatcaaggtggaagggcaggaggcacgggttgaggagtggtttgaagaacttattgacgagaccgaagaattgtctatttag

SEQ ID NO: 25401 - protein, 749 aa, Cryptococcus neoformans var
MSVTDLTYFSEDEQREIQAELDSGFKDIEEKYAVTAQKGFETMLVVDNIPVVDVSKKQRLLERLKQTFAKVGAPVEEESIDMPWDVTSGTNKGFVFLTYPDVKEAENAVHVLEGVSFGKNVLHVNRFGDIQRFASLPIGEGDLPAGWKEKDYIEKDYLRSWLGDLAGRDQYVTFWDTEVSVWWNGRNGSAEVLRGPDGKPKWGELYLQWSPMGTYLASLHRVGVALWSGPKLDGPIGVNVLRFTHPNVRLIQFSPCENYLITWSEDPLPNYENHPNVALRETFGPEDEGNQYVIWDIKTTRVLRTFPGDRLASGIDDGQSRMSWPVFKWSADDSYVAKCNVGTGIAVYELPMMGLLDKKSIKIEGVQDFEWAPMSQKEMVARHEGKGKECVLAFWTPEAQNQPARVNIMSVPSRTVLRSKNLFNVSDCKFYWQSQGDFLCVKVDRHARKAKSKKATSCNLEIFRMRERDYPVEVLEFKDYVPQFAWEPLGTRFAIVLQTEVHPSAVAGASTKYSIDFYQLDLKKGDFIPIKHLDSKMANTLVWSPKGRHIALATIGSSSKFDIEFWDLDFTIDERRETAEQGANVTMLGTGEHFGITEIAWDPSGRYIATSASTWRQSPEPGFSIWDFKGQQLLHESRDRFKQFLWRPRPPTLLSKEQIKKVRRELREHSRQFDEEDAAEENRGSAEKLAQRRREIGEWNAWRARNNDRLAVERENRGKSKAKIKVEGQEARVEEWFEELIDETEELSI

SEQ ID NO: 25402 - DNA, 2073 bp, Drosophila melanogaster
  CDS (1)..(2073)
atggccaagaagaaaagcgaggagcactccggtgcggatgcgaacgacagtgattaccaggaggagccgaactttgacgatccgcccgggttcgtggacaacattagtgatgaagatctgttgggcgacatgttggcccagcgcccctcggaggccgatggcgtcgagagtgtggtggtagtggacaatatcccaaaggtggagccggtgcgcctggagaagctgaagttggtcatcaacaagctgttttcgaactacggagaaatcgtcaatgtggtctatcccgtcgacgaggagggcaaaaccaagggctacgccttcatggagtacaagcaggccagacaggcggaggaagccgtcaagaagctcaacaatcatcgcctagacaaaaaccacacctttgccgtcaatctcttcaccgatttccaaaagtacgaaaacatccccgagaagtgggagccgccaaccgtgcagaccttcaaggtgcagagcgatctatacaacttcatcaatgacccggacacttatgaccagtactgcgtggcagcggagaccgctcccaactgcgtgcaggttggtttctggcaaaacgtattgcccgaaccctttgagctggagacccgcgaacgcttcaccgacaccttcgtcaagtggtcgcccctgggtacttatgtagtcaccttccacaaacccggcgtggccatctggggtggcagtagcttccagaagattcagaagttcccccatcctggtacccaattcgttgagttttcgccctgcgagaattacctagttacttacggaccgacacccacgggccaaaagatcatcatttgggacattcgcactggagccgagaagcgttcgtttgttgccgatggcatgtcggttctttctatgttccgctggtcgcacgacgacaagtttgtggcccgcatgggcgagaattcgatccacatctacgagacaccctctttctatcttctggacctgaagtccattaagattcccggcattcgtggcttctcttggtcccccacagacaacgtgattgcctactgggtggaggagcagaaccaaatacccgcccgcgttaccctgatggagatccccaagaagcgtgagatccgtaacaagaaccttttccatgtggccgattgcaagttacattggcaaaagtccggcgactatctgtgcgttaaggtagatcgttactcaaagttgaagaaggataagaaggacctggacgtcaagtttctgggcatgttctacaactttgagatcttccacatgcgcgagaaggagattcccgtcgactctgtggagattcgtgagcttattttggcctttgcctgggagcccgtcggcaacaagttctccatcattcacggcgagaccaactcgtcgaatgtgagcttctacgaggtgaacaagggcgttaagcccagcttggtgaagcgtctagaaaagaagtcatgcacacatctgttctggtcgccacgcggtcagtttatcgtaatggccaacctcaccatgggtaccttcgagtttgtggactccaccaacgattacatcatcacggcatcgcccgatcatttccgcgcttccgaggtcgagtgggatcccactggacgctacgttgtgactggtgtctcgtcatggaaggtgaaggaggataccggcttcaacatgtacacgttccagggccgcatcatcaagcgtaccattctcaagaactttgtgcagttcttgtggcgcccgcgtcctcccaccctgcttagcgaggagaagcagaaggagatcaagaagaacttgaagaagtactacgctgccttcgaacaaaaggatcgcctgcgccttacccgtgcctccaaggagctgctcgagaagcgctctcagctgcgcgagacctttatggagtaccgcaacaagcgtattgccgagtgggcggagcagaagagtcgtcgcatcatgctgcgagggcatgtggacacagacaacctggaaactgacgaagtggatgaagaaattgttgaatttttagtcaaggaagaagtcactctgctcgagtag

SEQ ID NO: 25403 - protein, 690 aa, Drosophila melanogaster
MAKKKSEEHSGADANDSDYQEEPNFDDPPGFVDNISDEDLLGDMLAQRPSEADGVESVVVVDNIPKVEPVRLEKLKLVINKLFSNYGEIVNVVYPVDEEGKTKGYAFMEYKQARQAEEAVKKLNNHRLDKNHTFAVNLFTDFQKYENIPEKWEPPTVQTFKVQSDLYNFINDPDTYDQYCVAAETAPNCVQVGFWQNVLPEPFELETRERFTDTFVKWSPLGTYVVTFHKPGVAIWGGSSFQKIQKFPHPGTQFVEFSPCENYLVTYGPTPTGQKIIIWDIRTGAEKRSFVADGMSVLSMFRWSHDDKFVARMGENSIHIYETPSFYLLDLKSIKIPGIRGFSWSPTDNVIAYWVEEQNQIPARVTLMEIPKKREIRNKNLFHVADCKLHWQKSGDYLCVKVDRYSKLKKDKKDLDVKFLGMFYNFEIFHMREKEIPVDSVEIRELILAFAWEPVGNKFSIIHGETNSSNVSFYEVNKGVKPSLVKRLEKKSCTHLFWSPRGQFIVMANLTMGTFEFVDSTNDYIITASPDHFRASEVEWDPTGRYVVTGVSSWKVKEDTGFNMYTFQGRIIKRTILKNFVQFLWRPRPPTLLSEEKQKEIKKNLKKYYAAFEQKDRLRLTRASKELLEKRSQLRETFMEYRNKRIAEWAEQKSRRIMLRGHVDTDNLETDEVDEEIVEFLVKEEVTLLE

SEQ ID NO: 25404 - DNA, 2288 bp, Arabidopsis thaliana
  CDS (50)..(2200)
ttcttcctcgatatcgattgagagaaacttcgttctaagattcgaaatcatggcggcggttgttgatattgatgtcctaacagctcagttagggattaattggtcagatgttaatctcgattcaatccaacttcctcctggaaacgactttgggatcgaaagtgatgatgaaagtgtttaccaagatgaccagtcagaattcgacactggattcggtaacattatcgttgtcgatcacctccctgttgttcccaaggagaagtttgagaaactagaaggtgttgttaagaaaatttacaaccagttaggtgtgattaaggaaaatggactgttgatgcccgttgatcccgatactaagatgacattgggctactgttttattgagttcaacactcctcaggaagcacaaaacgctaaggaaaagtctcatggctacaagttggacaagtctcacatatttgctgttaatatgttcgatgatttcgataggttgatgaatgtgaaggaggagtgggagcctcctcaagaaaggccctatgtccctggggaaaatttgcagaagtggcttactgatgacaaagcccgggaccagctagtcattcgttttggccatgatactgaagtttactggaatgatgctaggcagaagaagcctgaacctgttcataagcgttcttattggacagagagttatgtgcagtggtctccaataggtacataccttgtgacacttcacaagcagggggcagctgtttggggtggtgctgatacatttacgcgtctcatgcgttatcagcattcaatggtcaaactagttgatttctcgcctggtgagaaatatcttgtaacttaccatagccaagaaccaagcaatccgagagatgcaagtaaagtagagattaaggtctttgatgtgagaaccgggaggatgatgagagatttcaagggtagtgctgatgagttttcaattggaggacctggtggtgttgctggtgcctcttggcctgttttcagatgggcttgcggaaaagatgataaatactttgccaagctgagcaaaaacactatctctgtctatgagactgagactttcagcctaatagacaagaaatccatgaaggttgataatgttgtggatatttgctggtctcccactgattcaatcctttcattgtttgttcctgaacaaggtggtggaaaccaaccagccaaggttgctctagtccaaatcccgagtaaggtagagctgaggcagaagaatctcttcagtgtgagcgactgcaagatgtactggcagagtagtggagagtatcttgctgttaaggttgatcgatacacaaaaactaagaagagtacatactctggatttgagcttttccgtatcaaagaaagggatattccaatcgaggttcttgagctggataacaagaacgataagatcattgctttcgcgtgggagcccaagggtcaaaggtttgctgggattcatggggaccagccaaaccgggatgttagtttctactcgataaaaactggcacaaaaacactggaaagagtttcaaagctcgcaactttgaaggccaaacaagccaaatgccctcttctggtcgccccacaggcaagtacatcatttcttgctgggttaaaaggtttcaatggccagcttgaatttttcaacgtggatgagctcgagacaatggccacagctgaacacttcatggccacagatatcgaatgggacccaactggaaggtacgttgcaacctcagtgacaacagtccacgagatggagaatgggttcaccatatggtctttcaatgggaatatggtttaccggatactgaaggatcatttcttccagttggcttggcgtccaagaccggcatcattcttgactgcggagaaggaagaagagatagcaaagaacctgaggaattacagcaagaggtatgaggcagaggatcaggacgtgtcgttgctattgagtgaacaagacagagagaagaggagggcattgaatgaagagtggcagaaatgggtgatgcagtggaagtctctgcatgaagaggagaaactcgtgaggcaaaatcttcgggatggtgaagttagtgatgtggaagaagatgagtatgaagccaaagaagttgagtttgaggatcttattgatgttactgaggaaattgttcaagagttgatgtaacgtaagatactcggtctcttttgttgccatctctttggatcccttagacaattttaaatcgtgttcgctatacttggaagataatttt

SEQ ID NO: 25405 - protein, 716 aa, Arabidopsis thaliana
MAAVVDIDVLTAQLGINWSDVNLDSIQLPPGNDFGIESDDESVYQDDQSEFDTGFGNIIVVDHLPVVPKEKFEKLEGVVKKIYNQLGVIKENGLLMPVDPDTKMTLGYCFIEFNTPQEAQNAKEKSHGYKLDKSHIFAVNMFDDFDRLMNVKEEWEPPQERPYVPGENLQKWLTDDKARDQLVIRFGHDTEVYWNDARQKKPEPVHKRSYWTESYVQWSPIGTYLVTLHKQGAAVWGGADTFTRLMRYQHSMVKLVDFSPGEKYLVTYHSQEPSNPRDASKVEIKVFDVRTGRMMRDFKGSADEFSIGGPGGVAGASWPVFRWACGKDDKYFAKLSKNTISVYETETFSLIDKKSMKVDNVVDICWSPTDSILSLFVPEQGGGNQPAKVALVQIPSKVELRQKNLFSVSDCKMYWQSSGEYLAVKVDRYTKTKKSTYSGFELFRIKERDIPIEVLELDNKNDKIIAFAWEPKGQRFAGIHGDQPNRDVSFYSIKTGTKTLERVSKLATLKAKQAKCPLLVAPQASTSFLAGLKGFNGQLEFFNVDELETMATAEHFMATDIEWDPTGRYVATSVTTVHEMENGFTIWSFNGNMVYRILKDHFFQLAWRPRPASFLTAEKEEEIAKNLRNYSKRYEAEDQDVSLLLSEQDREKRRALNEEWQKWVMQWKSLHEEEKLVRQNLRDGEVSDVEEDEYEAKEVEFEDLIDVTEEIVQELM

SEQ ID NO: 25406 - DNA, 2178 bp, Schizosaccharomyces pombe
  CDS (1)..(2178)
atgtcggaaatcctaattgaggaaattaaggatcaaatcgtcgtaaaggacgaggaaatcgatgtttctgaactggaagttaagcttaatgtaactaaacctgttggatatgacacggttgtagtaatcgaaggtgctccagttgtcgaagaagctaagcagcaagatttcttccgttttttgagctcaaaagtccttgctaaaattggaaaggttaaggaaaatggattttatatgccatttgaggaaaaaaatggaaaaaagatgtctcttggactagttttcgccgattttgaaaatgttgatggcgccgatctttgcgttcaagagttggatggaaagcaaattttaaaaaaccatactttcgttgttcgtaagttgaatcaactcgaaaaagcttttagcactcctgatgaatttagtttcgaagaacgtgaatttaaggagcgcgaacatttgcgtagctggttaactgattactatggtcgtgatcaatttatcagctattacggtaaccgtgtatctgttaactggaaccgtaagagcgacgtccctgaacagattgtggatcgtgaaaactggaccgagacctacgtgcaatggtctcccatgggcacttacctcgtatcacttcatcttcgtggtattcaattatggggtggggaatcttggggaatgtgtgctcgtttcttgcacccctacgtaaaatttgtcgacttcagccctaacgagaagtatcttgtttcatggtcctatgagcctgttcgacttcctcccatcggacatccggctcgtgaaacaatgcctttcactgatgatgatgaaggaaaacattgcttcgtttgggatattgcctctggtcgtattcttcgttcttttaagattcctcctcaaccagaaggttcaaaggatggcaaaaaagttatttggcctattttcaagtggtctgccgatgataaataccttgctcgcgttactgttggtcagtcgatttctgtttatgagacaccctcccttgctttggttgacaagaaaactatcaagatcgacggtgtgcaaaattttgaatggtgcccagtttcagatgctctcggacgtgattccaaggagcagcttttagcttactggacccctgaaattaccaatcaacctgctcgcgttgccttaattagtattccttcaaaatcaactatccgtacgaaaaatcttttcaatgtttccgactgtaagttgtactggcagtctaatggtgattatttatgtgttaaggttgatcgtcacacaaaaactaagaaatcaacattctctaaccttgaaatattccgaattcgtgagaaaaatattcccgttgaagtagtggatcttaaggatgttgttctcaattttgcctgggaacctaagagtgatcgttttgccataatttcagctaatgatcaagttttaaattctacaaatgtaaaaactaatttatcgttttatggttttgagcagaaaaagaacacccctagtactttccgtcatatcattacttttgataagaaaacatgcaattcactttttatggcgcctaagggtagatttatggttgctgcaacccttggttcctctactcaatatgatttggagttttacgacttagattttgataccgaaaagaaagaaccggatgctcttgccaatgttcagcaaataggttctgccgagcactttggtatgactgagctggagtgggatcctagtggtcgatatgttactactagcagtactatttggaggcataagcttgagaacggttacagactttgcgattttaggggcacacttcttcgtgaagaaatgattggagaatttaagcagtttatctggcgtccgagacctccttctccattgacaaaggaagacatgaagaaaattagaaagaaacttaaggattataatcgtttgtttgatgaagaggatatcgccgaacagagttccgccaatcgtgaattggcagcccgtagaagacagctcattagtgagtggcagaaatatagggatgaggttattgctcgggttgcggaagaacgtgcaatcactggccaacctgctatcactgttcctgctgaagaagaagaaataattcaggaaacggttgaggaagtaatctctgaagagatagaacccgttgaagattaa

SEQ ID NO: 25407 - protein, 725 aa, Schizosaccharomyces pombe
MSEILIEEIKDQIVVKDEEIDVSELEVKLNVTKPVGYDTVVVIEGAPVVEEAKQQDFFRFLSSKVLAKIGKVKENGFYMPFEEKNGKKMSLGLVFADFENVDGADLCVQELDGKQILKNHTFVVRKLNQLEKAFSTPDEFSFEEREFKEREHLRSWLTDYYGRDQFISYYGNRVSVNWNRKSDVPEQIVDRENWTETYVQWSPMGTYLVSLHLRGIQLWGGESWGMCARFLHPYVKFVDFSPNEKYLVSWSYEPVRLPPIGHPARETMPFTDDDEGKHCFVWDIASGRILRSFKIPPQPEGSKDGKKVIWPIFKWSADDKYLARVTVGQSISVYETPSLALVDKKTIKIDGVQNFEWCPVSDALGRDSKEQLLAYWTPEITNQPARVALISIPSKSTIRTKNLFNVSDCKLYWQSNGDYLCVKVDRHTKTKKSTFSNLEIFRIREKNIPVEVVDLKDVVLNFAWEPKSDRFAIISANDQVLNSTNVKTNLSFYGFEQKKNTPSTFRHIITFDKKTCNSLFMAPKGRFMVAATLGSSTQYDLEFYDLDFDTEKKEPDALANVQQIGSAEHFGMTELEWDPSGRYVTTSSTIWRHKLENGYRLCDFRGTLLREEMIGEFKQFIWRPRPPSPLTKEDMKKIRKKLKDYNRLFDEEDIAEQSSANRELAARRRQLISEWQKYRDEVIARVAEERAITGQPAITVPAEEEEIIQETVEEVISEEIEPVED

SEQ ID NO: 25408 - DNA, 2523 bp, Nicotiana tabacum
  CDS (118)..(2277)
ctatctctaagctaacacttctgcgttcagtttcaaaggtggctatctctctcctatacgcaccatcccatatagagcatagaaagaaagctaaacaaagagaacagagttccaatcatggcggacgttacgtctatgggagaaatcacagccatagccgctaggattggtgtggatctttcccaaatcgatcttgactccattcatcttcctcctggtgaagattgtggcatacccagtgatgatgatgacttaatggaggaggaccccttggagtttgatgctggttttgggaacatactggtggtggacaatcttcctgtggtgcctaaagagaaatttgagaagttggaaggagtagttcggaaaatttacagccaacttggtgttattaaggaggatggtctgtggatgcctgttgatcctgagactcacaaaaccctagggtactgcttcatcgagtataatactcctcaggaagctgagctgagtaaggagaagacacatggatacaagttagataggtcgcatatatttgctgttaacatgtttgatgacattgagagattcctgaaagttcctgatgagtgggctccaccagagatcaagccttatgttccaggggagaatctgcaacagtggcttactgatgagaaagctagagaccagtttgtgattcgggctggcaatgacacagaggtcctctggaatgatgcaagacagttgaagcctgagcttgtttacaaacgttctttctggactgagagttttgtgcaatggtcccctctgggaacgtatctggcaacagttcacagacaaggtggtgcaatttggggtggtgccaccacttccaaccgtctgatgcgatatgcacatccacaggtaaaactgattgatttctcccttgctgaaagatatctggtgacatacagcagccatgaaccaagtaatccccgtgactctcatgcggttgtgctgaatatttctgatgtgagaactgggaaagtgatgagagatttccagggaagtgccgatgaatttgcagttggaggaactggaggtgttactggtgtgtcgtggccagtttttaggtggagtggtggtaaacaagacaagtactttgcaagaataggaaagaatgtcatctctgtttatgaaacagagacgttctctcttattgacaagaaatctatcaaggttgaaaatgttatggattttagctggtcgccagcagatccaattcttgcactttttgttcctgaatgcggaaatcaacctgccagggtcagtcttgtgcaaatcccaagcaaagaggagttgaggcagaagaatctcttcagtgttagtgattgcaaaatgtattggcaaagcaatggagactaccttgctgtcaaagttgatcggtacacgaagactaagaaaagcacttacactggttttgagctgttcagaatcaaagaacgggacattccgattgaggttttggagcttgacaacacgaacgacaaaatccctgcctttggctggggacccgaaggttcccccatttgttgttatccttcggtgacaacccctcggccagacatccgtttctactctgtgccggtctgggcactaacaccgggccttgtttcaaagctgacaactctcaagggaaagcaggctaatgctctctactggtcacctggaggccgcttccttattttgactggactgaaaggtttcaatgggcagttggaattctttgatgttgatgagcttgaaaccatggcatctgctgagcattttatggccacagatgttgaatgggatcctactggaaggtatgtagcaacatctgttacctcagttcatgagatggaaaatggattcaacatttggtctttcaacggaaagctgttgtataggatacttaaggatcatttcttccagtatttgtggcgccccaggccaccatctttcttgagcaaggagaaagaggaagagatcgctaagaacttgaaaagatacagcaagaagtatgaggcagaggatcaggatgtttcattgcaattgagtgagcaagatcgtgagaaacggaagaagttgaaagaagaatgggaagcatggattaatgagtggaagcggctgcatgaagaggagaaaatggagaggcagaagttgcgtgatggagaagctagtgatgaagaggaggaatacgaggcaaaggaagttgaagtcgaggaaataataaatgttactgaggagattattccttttgaagagagccaacagtgaattcaatagtttgagaagccctgtcccaacattttctgcgagagctgctataaggagaagcgaactctgagagctttaggtaggatatttggttaaaaactttgttttctttttgtttctttttccaactcattttcttttattttcttgtttgttgattatactatacgcagttttgtctgttaattagcccaaaattcctgttaccatgggcaatgaatttgattacagaaacttgattaaaaa

SEQ ID NO: 25409 - protein, 719 aa, Nicotiana tabacum
MADVTSMGEITAIAARIGVDLSQIDLDSIHLPPGEDCGIPSDDDDLMEEDPLEFDAGFGNILVVDNLPVVPKEKFEKLEGVVRKIYSQLGVIKEDGLWMPVDPETHKTLGYCFIEYNTPQEAELSKEKTHGYKLDRSHIFAVNMFDDIERFLKVPDEWAPPEIKPYVPGENLQQWLTDEKARDQFVIRAGNDTEVLWNDARQLKPELVYKRSFWTESFVQWSPLGTYLATVHRQGGAIWGGATTSNRLMRYAHPQVKLIDFSLAERYLVTYSSHEPSNPRDSHAVVLNISDVRTGKVMRDFQGSADEFAVGGTGGVTGVSWPVFRWSGGKQDKYFARIGKNVISVYETETFSLIDKKSIKVENVMDFSWSPADPILALFVPECGNQPARVSLVQIPSKEELRQKNLFSVSDCKMYWQSNGDYLAVKVDRYTKTKKSTYTGFELFRIKERDIPIEVLELDNTNDKIPAFGWGPEGSPICCYPSVTTPRPDIRFYSVPVWALTPGLVSKLTTLKGKQANALYWSPGGRFLILTGLKGFNGQLEFFDVDELETMASAEHFMATDVEWDPTGRYVATSVTSVHEMENGFNIWSFNGKLLYRILKDHFFQYLWRPRPPSFLSKEKEEEIAKNLKRYSKKYEAEDQDVSLQLSEQDREKRKKLKEEWEAWINEWKRLHEEEKMERQKLRDGEASDEEEEYEAKEVEVEEIINVTEEIIPFEESQQ

SEQ ID NO: 25410 - DNA, 3019 bp, Saccharomyces cerevisiae
  CDS (375)..(2666)
cgatttgcccaaaaagaaattaacggcgatgatgacgaggacgaagatgacagtgataacgtcatgtccagtgatgatgaaaatgctccagtggctacgaatgcaaacgctaccactgaccaagagggtgatattcacctagaataggtgacattctgataatacgttaagaagaaccaaagagttgaaataatatgaactcacgtgtaacgccgcgaaacaaaaaatacattttagtaccttccattacattttacgtaactagataaacttctcattgtgcaccatcttatcattattacttgatcgcctaatacttttattcttctgacacctattaccctcctttccatattttggatagcgggaaactaatgaaaaattttcttccacgcacattgaaaaatatttacgaattatatttcaataacatctcagtacatagtatagtatctcgcaacacacagctcaaaaggtcaaagataattcaaatgactaccgagactttcgaagacattaagctagaggacatccctgttgacgacattgatttttccgacctggaagaacaatacaaggtcactgaagaattcaatttcgatcagtacatcgtcgttaatggtgccccagtcatcccatccgccaaagttcctgttttgaaaaaggctttgacttctttgttttccaaagctggtaaagttgttaacatggaatttccaattgatgaagccactggtaagacgaaaggttttctcttcgtggaatgtggctcaatgaacgatgctaaaaaaattatcaagagtttccacggtaaaagactggatttaaaacatcgtttgtttctttatactatgaaagatgttgaaagatataattctgacgactttgacaccgaattcagggagcctgatatgcctacattcgttccatctagttccttaaaatcctggttaatggacgacaaagtgagagatcagtttgtattacaagatgacgtgaagactagtgtgttctggaactctatgttcaatgaagaagattctttggtggaatctagagagaactggtctaccaattatgttagattctccccaaagggtacctatttgttttcttaccatcaacagggtgtaactgcatggggtggtccaaacttcgatcgtttgagaagattctatcatccagatgtaagaaactcttccgtctctccgaatgaaaagtacctggtcactttctccacggaaccaatcattgtagaagaagataacgaattctctccatttaccaagaaaaatgagggtcatcaattatgcatctgggacattgcttctggtctgttgatggcaactttcccagtgataaagagcccatatctgaaatggcctttagttagatggtcttataatgataaatattgtgctcgtatggttggagacagtttaatagttcacgatgctactaaaaacttcatgccattagaagctaaggctttgaagccttctggtattagagatttctcatttgctccagaaggtgttaaattacaaccattcagaaacggtgacgagccttctgttttattggcttattggactcctgagactaataattccgcttgtactgctaccattgctgaagttcctcgcggtagagtgctaaaaaccgttaacttagttcaagtctccaacgtaactctgcactggcaaaaccaagctgagttcctgtgcttcaatgtcgaacgtcacacaaagtctggtaagactcaattcagtaatctacaaatttgtaggttgactgaaagagatataccagttgaaaaggttgaattgaaagatagtgtctttgaattcggttgggaaccccacggaaatagatttgttacaatttctgttcatgaagtagctgatatgaattatgctatcccagcaaatacaatcagattttacgctccagaaactaaagaaaagactgacgtaattaaaagatggagcttggtcaaagaaattccaaaaacttttgccaacactgtttcttggtctccagcgggtagatttgtggttgtaggtgctttagtgggtccaaacatgcgtagatcagacctacaattttacgatatggactatccaggtgaaaagaatattaatgacaataatgatgtttcagcttctttgaaagatgttgctcatcctacctactctgcggctactaatatcacttgggatccatctggtagatacgttaccgcatggtcaagttctttgaaacacaaggtggagcatggttacaaaattttcaatattgctggtaacttagttaaagaagacatcattgctggcttcaagaactttgcctggagaccaaggccagcttccattttgtctaacgccgaaaggaaaaaggttaggaaaaacttgagggaatggtctgcccaattcgaagagcaagatgcaatggaagctgacaccgccatgagagatttgattctacaccaacgtgaattattgaagcaatggaccgaatatagagaaaaaattggccaagaaatggaaaaatctatgaatttcaaaatctttgacgttcaaccagaagatgccagcgatgactttaccaccatcgaagagatagttgaagaagttttggaagaaacaaaggaaaaggtcgaataaatttcatgaacttacgggcttgtatgtaaactaacaacaatatctagtataagtatgagaattagtctaatattcataaatactacaataggctctattatctttgtaatctgcaggggtcgctctcctcgtacaaaattataaaagggtcctgcgtccttttctagttgcacttttctttttttgttctccgagaatttctttttactgggcacaatttttcctcttttctttttgttttaggcattataaagaagaaaaattggcttagagagaatatacttgcaaattgaaaactatagtcactgtgagagattggactaaaaagcgcaaatttgagataaagtgggatc

SEQ ID NO: 25411 - protein, 763 aa, Saccharomyces cerevisiae
MKNFLPRTLKNIYELYFNNISVHSIVSRNTQLKRSKIIQMTTETFEDIKLEDIPVDDIDFSDLEEQYKVTEEFNFDQYIVVNGAPVIPSAKVPVLKKALTSLFSKAGKVVNMEFPIDEATGKTKGFLFVECGSMNDAKKIIKSFHGKRLDLKHRLFLYTMKDVERYNSDDFDTEFREPDMPTFVPSSSLKSWLMDDKVRDQFVLQDDVKTSVFWNSMFNEEDSLVESRENWSTNYVRFSPKGTYLFSYHQQGVTAWGGPNFDRLRRFYHPDVRNSSVSPNEKYLVTFSTEPIIVEEDNEFSPFTKKNEGHQLCIWDIASGLLMATFPVIKSPYLKWPLVRWSYNDKYCARMVGDSLIVHDATKNFMPLEAKALKPSGIRDFSFAPEGVKLQPFRNGDEPSVLLAYWTPETNNSACTATIAEVPRGRVLKTVNLVQVSNVTLHWQNQAEFLCFNVERHTKSGKTQFSNLQICRLTERDIPVEKVELKDSVFEFGWEPHGNRFVTISVHEVADMNYAIPANTIRFYAPETKEKTDVIKRWSLVKEIPKTFANTVSWSPAGRFVVVGALVGPNMRRSDLQFYDMDYPGEKNINDNNDVSASLKDVAHPTYSAATNITWDPSGRYVTAWSSSLKHKVEHGYKIFNIAGNLVKEDIIAGFKNFAWRPRPASILSNAERKKVRKNLREWSAQFEEQDAMEADTAMRDLILHQRELLKQWTEYREKIGQEMEKSMNFKIFDVQPEDASDDFTTIEEIVEEVLEETKEKVE

SEQ ID NO: 25412 - DNA, 2157 bp, Glycine max
  CDS (1)..(2157)
atggcggacgtcatgataatgaaggagatcgaggacacgtcgcttcgtctcggcgtcgatctctccactctcgatctcgacgccattcgcctccctaccggcgaagattgcggcatcgtcagtgatgacgaggaggtttaccaggaggagaatctcgagtttgagtctggatttggtaacatcattgtcgtggataacctccctgtcgttccgagggagaagttcgagaagctcgaaggagtggttcgcaaaatttatagtcaaattggtgttatcaaggaggatggcctctggatgccggttgatcctgaaaccgagaaaaccctaggttactgcttcattgagtacaatacccctcaggaagctgaacttgctaaagagaagactcatgggtacaaattggaccgggcacacatatttgccgtgagcatgtttgatgactttgacagattcatgaaggtgcctaatgagtgggctcctcccgaaactaagccatatgctccaggggaaaatcttcaacactggctcactgatgcaaaggccagggaccagtttgtgattcgtgctggttcggatactgaggttttgtggaacgatgccaggcatttaaagcctgatcctgtttataagcgtgcattttggacagagagttttgtgcaatggtctcctttggggacatatttggcaactgttcacagacagggagcagcagtctggggaggtgctgcaagctttaatagacttatgcgatatgcacatcctcaggtaaaactaattgatttttcgcctggtgagaagtatttggtaacatatagcagtcatgaaccaagcaatccccgagatgccaatagagttgtgataaatttatttgatgtgaggactggtaaagtgatgagggactttaaagggagtgctgatgattttgcagtcggaggtgctgggggtgtcactggagtttcatggcctgttttcaaatggagtggtggaagagatgataaatactttgcaaggatggggaaaaatatactctccgtttatgagacagagaccttttctctcgttgacaagaaatctttgaaggttgaaaatataatggatttctgctggtctccaactgatccaattattgctctttttgttcctgagatgggaggcggtaaccagcctgccagggttagtctgattcaaatccccagcaaagtggaactcaggcagaaaaaccttttcagtgtcagtgactgcaagatgtactggcaaagcaatggagactaccttgctgttaatgtagagaggtacacgaaaacaaaaaaaagcacatacacaggctttgagcttttccgtataaaggaacgggatataccaattgaagttttggagcttgagaataagaatgataagatcattgcatttgcttgggagccaaagggccacaggtttgcagttattcatggtgataaccctaagcctgatgttagcatttactccatgcgtactggtcagaacagccgagtttcaaaactcactactctgaagggcaagcaagcaaatgctctgttttggtcacctgctggtcgctacattgtactggctgggttgaaaggcttcaatggacagttggaattttacaacgttgatgaacttgaaaccatggctactgctgaacattttatggcaacagatattgaatgggatccaactggaagatatgttgcaactgcagtgacttcagttcatgaaatggagaatggtttcaatatatggtctttcaatggcaagcatctatatcggattctgaaggatcatttctttcagttcttatggagaccaaggccaccatctttcttgactcccgagaaagaggaagagattgccaagaacttgaagaagtacagtaagaaatacgaggcagaagatcaagatgtttcgttgctgctgagtgaacaagagcgggagaagcgcaggatgttgaaagaagagtgggacaagtgggttaacgaatggaagcggatccacgaggaagagagtttacagaggcaaaagctcagggatggagaggctagcgatgaagaggaggaatacgaggcaaaggacatcgaggtggaggaagtgatcgatcttacagaagaggtccttcaccttgagtatggtcaagagtga

SEQ ID NO: 25413 - protein, 718 aa, Glycine max
MADVMIMKEIEDTSLRLGVDLSTLDLDAIRLPTGEDCGIVSDDEEVYQEENLEFESGFGNIIVVDNLPVVPREKFEKLEGVVRKIYSQIGVIKEDGLWMPVDPETEKTLGYCFIEYNTPQEAELAKEKTHGYKLDRAHIFAVSMFDDFDRFMKVPNEWAPPETKPYAPGENLQHWLTDAKARDQFVIRAGSDTEVLWNDARHLKPDPVYKRAFWTESFVQWSPLGTYLATVHRQGAAVWGGAASFNRLMRYAHPQVKLIDFSPGEKYLVTYSSHEPSNPRDANRVVINLFDVRTGKVMRDFKGSADDFAVGGAGGVTGVSWPVFKWSGGRDDKYFARMGKNILSVYETETFSLVDKKSLKVENIMDFCWSPTDPIIALFVPEMGGGNQPARVSLIQIPSKVELRQKNLFSVSDCKMYWQSNGDYLAVNVERYTKTKKSTYTGFELFRIKERDIPIEVLELENKNDKIIAFAWEPKGHRFAVIHGDNPKPDVSIYSMRTGQNSRVSKLTTLKGKQANALFWSPAGRYIVLAGLKGFNGQLEFYNVDELETMATAEHFMATDIEWDPTGRYVATAVTSVHEMENGFNIWSFNGKHLYRILKDHFFQFLWRPRPPSFLTPEKEEEIAKNLKKYSKKYEAEDQDVSLLLSEQEREKRRMLKEEWDKWVNEWKRIHEEESLQRQKLRDGEASDEEEEYEAKDIEVEEVIDLTEEVLHLEYGQE

SEQ ID NO: 25414 - DNA, 2163 bp, Zea mays
  CDS (1)..(2163)
atggcgctctcagtatccatggagggcatcgaggcgcgggcgcgggatctcggggtggacctctccgctgtcgatctggactccatcaccctcccggccggcgaggacttcggcatcgtcagtgatgacgaggaggtacttcgtggtgaggatcttccagaacttgaaatgggtttgtccaacattattgtcgtggacaatctgccagttgttcctccagaaaagtttgagaagcttgagaatgtcatacgcaagatctacagccaaattggagcgataaaagaaaatggtctatggatgcctgtaaacccagagacaaagaagacatacggttactgtttcattgagtatagtacccctcaggaagctgagctggctagggaaaaaaccaatgggtacaaactcgacaagtctcacatctttgcagtcaatttgctcgatgatttcgagaagtacatgaaagttcctgacacatggacccctgctgaaattaagccatacactgctggagaaaatcttctgaagtggctaactgatgaaaaggcccgagatcaatttgtcattcgtgctggcacactaactgaagtttattggaatgatgcaagaaagctagcacctgagcttgtttttcaaaagcagtactggacagatagtttcattcagtggtcccctctgggaacctacatggcaacggttcataggcagggatcacaggtgtggggcggtgaaaatggcttcgagcgtttgatgcgttttgctcattccatggtgaaactgattgacttctctcctggtgagaggtatttggtcacatacagcagccatgagcccagcaaccctagagacacacatagagttgtcctgaatatatttgatgtaaggactgggaaagtgatgcgagactttaagggaagcgctgatgattttactactggcgggaatattggggtttctggtgtttcatggcctattttcaggtggggtggtggaaaggatgacaaatattttgcgaggcttgggaagaatataatatctgtatacgaaacagatacattctcccttcttgataagaagtctctgaaggtagaaaatgtagtggacttcagctggtctcccactgatcctatcatatctctgttcgtgcctgaaatgggtggtggaaatcagcctgcgagggtgagtctagtgcaaatccctggcaaagaggagctgcgacagaaaaaccttttcagtgtcagtgattgtaagatgtattggcaaaacagtggagaatatcttgctgttcaagttgatagatacacaaaaacaaaaaagagcacctacactgggtttgagctgtttagaattaaggagagggatatcccaattgaggtccttgaactcgagaacaagaacgacaagatcattgcatttgcatgggaacctaaaggacatcgctttgctatcatccatggtgatggccctaagcctgatgttagcttctacaccatgcgaacagccaataacactagccgtgtatccaagctcacaaccctcaaggccaagcaagctaatactctgtactggtctcctgctgggcgcttcatagttcttgctggactgaagggtttcaacgggcagctggaattctacaatgttgatgaactagagacaatggcaacaggagagcattttatggcaacagatatcatgtgggatccaactgggagatatctcgcgactgcagttacctcagttcatgaaatggagaatggctttcaaatatggtccttcagtggcaagcatctttacaaggtgtcaaaggatcatttctatcagtttatatggcgcccgagaccgccctcactactgacggccgagaaggaagaagagatctcaaggaacctgaagaagtatagcaagaagtacgaacaagaagaccaggatgcattcaatcagttgagcgagcaggaccgcaagaggcggacacagcttcaggaagaatgggactcatgggttgccaagtggaagcagatgcatgaggaggagcgtgcttacaggagggagctcagggatggggaggccagcgacgacgaggaagagtatgaggccaaggaagttgaggtggaagaagtcgttgatgtccgtcaagaagttcttgcattcgacctagatcaggagtga

SEQ ID NO: 25415 - protein, 720 aa, Zea mays
MALSVSMEGIEARARDLGVDLSAVDLDSITLPAGEDFGIVSDDEEVLRGEDLPELEMGLSNIIVVDNLPVVPPEKFEKLENVIRKIYSQIGAIKENGLWMPVNPETKKTYGYCFIEYSTPQEAELAREKTNGYKLDKSHIFAVNLLDDFEKYMKVPDTWTPAEIKPYTAGENLLKWLTDEKARDQFVIRAGTLTEVYWNDARKLAPELVFQKQYWTDSFIQWSPLGTYMATVHRQGSQVWGGENGFERLMRFAHSMVKLIDFSPGERYLVTYSSHEPSNPRDTHRVVLNIFDVRTGKVMRDFKGSADDFTTGGNIGVSGVSWPIFRWGGGKDDKYFARLGKNIISVYETDTFSLLDKKSLKVENVVDFSWSPTDPIISLFVPEMGGGNQPARVSLVQIPGKEELRQKNLFSVSDCKMYWQNSGEYLAVQVDRYTKTKKSTYTGFELFRIKERDIPIEVLELENKNDKIIAFAWEPKGHRFAIIHGDGPKPDVSFYTMRTANNTSRVSKLTTLKAKQANTLYWSPAGRFIVLAGLKGFNGQLEFYNVDELETMATGEHFMATDIMWDPTGRYLATAVTSVHEMENGFQIWSFSGKHLYKVSKDHFYQFIWRPRPPSLLTAEKEEEISRNLKKYSKKYEQEDQDAFNQLSEQDRKRRTQLQEEWDSWVAKWKQMHEEERAYRRELRDGEASDDEEEYEAKEVEVEEVVDVRQEVLAFDLDQE

SEQ ID NO: 25416 - DNA, 22 bp, Artificial sequence
  primer
atggaggtcgttgatattgatg

SEQ ID NO: 25417 - DNA, 21 bp, Artificial sequence
  primer
ttacgactcttgaacgatttc

SEQ ID NO: 25418 - protein, 840 aa, Artificial sequence
  consensus sequence
  Variant (2)..(6): Xaa in position 2 to 6 is any amino acid
  Variant (8)..(8): Xaa in position 8 is any amino acid
  Variant (10)..(11): Xaa in position 10 to 11 is any amino acid
  Variant (13)..(13): Xaa in position 13 is any amino acid
  Variant (15)..(21): Xaa in position 15 to 21 is any amino acid
  Variant (23)..(33): Xaa in position 23 to 33 is any amino acid
  Variant (34)..(34): Xaa in position 34 is any or no amino acid
  Variant (36)..(50): Xaa in position 36 to 50 is any amino acid
  Variant (51)..(56): Xaa in position 51 to 56 is any or no amino acid
  Variant (58)..(59): Xaa in position 58 to 59 is any amino acid
  Variant (61)..(61): Xaa in position 61 is any amino acid
  Variant (63)..(68): Xaa in position 63 to 68 is any amino acid
  Variant (69)..(94): Xaa in position 69 to 94 is any or no amino acid
  Variant (96)..(97): Xaa in position 96 to 97 is any amino acid
  Variant (99)..(107): Xaa in position 99 to 107 is any amino acid
  Variant (109)..(109): Xaa in position 109 is any amino acid
  Variant (110)..(110): Xaa in position 110 is any or no amino acid
  Variant (112)..(114): Xaa in position 112 to 114 is any amino acid
  Variant (117)..(119): Xaa in position 117 to 119 is any amino acid
  Variant (121)..(143): Xaa in position 121 to 143 is any amino acid
  Variant (144)..(149): Xaa in position 144 to 149 is any or no amino acid
  Variant (151)..(153): Xaa in position 151 to 153 is any amino acid
  Variant (155)..(155): Xaa in position 155 is any amino acid
  Variant (157)..(160): Xaa in position 157 to 160 is any amino acid
  Variant (161)..(162): Xaa in position 161 to 162 is any or no amino acid
  Variant (165)..(176): Xaa in position 165 to 176 is any amino acid
  Variant (177)..(180): Xaa in position 177 to 180 is any or no amino acid
  Variant (182)..(196): Xaa in position 182 to 196 is any amino acid
  Variant (197)..(203): Xaa in position 197 to 203 is any or no amino acid
  Variant (206)..(210): Xaa in position 206 to 210 is any amino acid
  Variant (214)..(214): Xaa in position 214 is any amino acid
  Variant (219)..(221): Xaa in position 219 to 221 is any amino acid
  Variant (223)..(224): Xaa in position 223 to 224 is any amino acid
  Variant (226)..(228): Xaa in position 226 to 228 is any amino acid
  Variant (232)..(241): Xaa in position 232 to 241 is any amino acid
  Variant (242)..(246): Xaa in position 242 to 246 is any or no amino acid
  Variant (248)..(249): Xaa in position 248 to 249 is any amino acid
  Variant (251)..(254): Xaa in position 251 to 254 is any amino acid
  Variant (258)..(258): Xaa in position 258 is any amino acid
  Variant (260)..(260): Xaa in position 260 is any amino acid
  Variant (265)..(275): Xaa in position 265 to 275 is any amino acid
  Variant (276)..(297): Xaa in position 276 to 297 is any or no amino acid
  Variant (299)..(300): Xaa in position 299 to 300 is any amino acid
  Variant (303)..(305): Xaa in position 303 to 305 is any amino acid
  Variant (307)..(307): Xaa in position 307 is any amino acid
  Variant (309)..(315): Xaa in position 309 to 315 is any amino acid
  Variant (316)..(329): Xaa in position 316 to 329 is any or no amino acid
  Variant (332)..(332): Xaa in position 332 is any amino acid
  Variant (334)..(334): Xaa in position 334 is any amino acid
  Variant (336)..(337): Xaa in position 336 to 337 is any amino acid
  Variant (338)..(339): Xaa in position 338 to 339 is any or no amino acid
  Variant (344)..(344): Xaa in position 344 is any amino acid
  Variant (346)..(354): Xaa in position 346 to 354 is any amino acid
  Variant (355)..(355): Xaa in position 355 is any or no amino acid
  Variant (358)..(362): Xaa in position 358 to 362 is any amino acid
  Variant (363)..(363): Xaa in position 363 is any or no amino acid
  Variant (365)..(365): Xaa in position 365 is any amino acid
  Variant (370)..(370): Xaa in position 370 is any amino acid
  Variant (372)..(376): Xaa in position 372 to 376 is any amino acid
  Variant (379)..(379): Xaa in position 379 is any amino acid
  Variant (381)..(381): Xaa in position 381 is any amino acid
  Variant (383)..(391): Xaa in position 383 to 391 is any amino acid
  Variant (392)..(409): Xaa in position 392 to 409 is any or no amino acid
  Variant (412)..(415): Xaa in position 412 to 415 is any amino acid
  Variant (416)..(417): Xaa in position 416 to 417 is any or no amino acid
  Variant (420)..(420): Xaa in position 420 is any amino acid
  Variant (422)..(422): Xaa in position 422 is any amino acid
  Variant (424)..(426): Xaa in position 424 to 426 is any amino acid
  Variant (428)..(432): Xaa in position 428 to 432 is any amino acid
  Variant (434)..(435): Xaa in position 434 to 435 is any amino acid
  Variant (439)..(439): Xaa in position 439 is any amino acid
  Variant (441)..(441): Xaa in position 441 is any amino acid
  Variant (445)..(446): Xaa in position 445 to 446 is any amino acid
  Variant (449)..(450): Xaa in position 449 to 450 is any amino acid
  Variant (452)..(453): Xaa in position 452 to 453 is any amino acid
  Variant (455)..(455): Xaa in position 455 is any amino acid
  Variant (457)..(457): Xaa in position 457 is any amino acid
  Variant (461)..(462): Xaa in position 461 to 462 is any amino acid
  Variant (463)..(465): Xaa in position 463 to 465 is any or no amino acid
  Variant (467)..(472): Xaa in position 467 to 472 is any amino acid
  Variant (473)..(482): Xaa in position 473 to 482 is any or no amino acid
  Variant (484)..(484): Xaa in position 484 is any amino acid
  Variant (486)..(488): Xaa in position 486 to 488 is any amino acid
  Variant (490)..(492): Xaa in position 490 to 492 is any amino acid
  Variant (494)..(497): Xaa in position 494 to 497 is any amino acid
  Variant (499)..(505): Xaa in position 499 to 505 is any amino acid
  Variant (506)..(508): Xaa in position 506 to 508 is any or no amino acid
  Variant (514)..(514): Xaa in position 514 is any amino acid
  Variant (516)..(517): Xaa in position 516 to 517 is any amino acid
  Variant (519)..(520): Xaa in position 519 to 520 is any amino acid
  Variant (522)..(531): Xaa in position 522 to 531 is any amino acid
  Variant (532)..(542): Xaa in position 532 to 542 is any or no amino acid
  Variant (545)..(560): Xaa in position 545 to 560 is any amino acid
  Variant (561)..(590): Xaa in position 561 to 590 is any or no amino acid
  Variant (592)..(593): Xaa in position 592 to 593 is any amino acid
  Variant (595)..(597): Xaa in position 595 to 597 is any amino acid
  Variant (598)..(598): Xaa in position 598 is any or no amino acid
  Variant (602)..(602): Xaa in position 602 is any amino acid
  Variant (604)..(608): Xaa in position 604 to 608 is any amino acid
  Variant (610)..(617): Xaa in position 610 to 617 is any amino acid
  Variant (618)..(623): Xaa in position 618 to 623 is any or no amino acid
  Variant (625)..(637): Xaa in position 625 to 637 is any amino acid
  Variant (638)..(653): Xaa in position 638 to 653 is any or no amino acid
  Variant (655)..(661): Xaa in position 655 to 661 is any amino acid
  Variant (665)..(665): Xaa in position 665 is any amino acid
  Variant (668)..(681): Xaa in position 668 to 681 is any amino acid
  Variant (682)..(682): Xaa in position 682 is any or no amino acid
  Variant (684)..(688): Xaa in position 684 to 688 is any amino acid
  Variant (690)..(690): Xaa in position 690 is any amino acid
  Variant (692)..(701): Xaa in position 692 to 701 is any amino acid
  Variant (703)..(703): Xaa in position 703 is any amino acid
  Variant (705)..(706): Xaa in position 705 to 706 is any amino acid
  Variant (712)..(714): Xaa in position 712 to 714 is any amino acid
  Variant (716)..(724): Xaa in position 716 to 724 is any amino acid
  Variant (726)..(726): Xaa in position 726 is any amino acid
  Variant (728)..(729): Xaa in position 728 to 729 is any amino acid
  Variant (732)..(737): Xaa in position 732 to 737 is any amino acid
  Variant (739)..(752): Xaa in position 739 to 752 is any amino acid
  Variant (754)..(787): Xaa in position 754 to 787 is any amino acid
  Variant (788)..(812): Xaa in position 788 to 812 is any or no amino acid
  Variant (814)..(818): Xaa in position 814 to 818 is any amino acid
  Variant (819)..(839): Xaa in position 819 to 839 is any or no amino acid
GXXXXXVXDXXPXVXXXXXXXLXXXXXXXXXXXXGXXXXXXXXXXXXXXXXXXXXXGXXFXEXXXXXXXXXXXXXXXXXXXXXXXXXXXXXXXXAXXAXXXXXXXXXDXXHXXXVNXXXDXXXXXXXXXXXXXXXXXXXXXXXXXXXXXLXXXLXDXXXXXXDQXXXXXXXXXXXXXXXXWXXXXXXXXXXXXXXXXXXXXXXWTXXXXXWSPXGTYLXXXHXXGXXXWGGXXXXXXXXXXXXXXXHXXVXXXXFSPXEXYLVTXXXXXXXXXXXXXXXXXXXXXXXXXXXXXXXXXDXXTGXXXRXFXXXXXXXXXXXXXXXXXXXXXWPXFXWXXXXDDKYXAXXXXXXXXXXYEXXXXXXLXDKKSXKXXXXXDFXWXPXXXXXXXXXXXXXXXXXXXXXXXXXXXPEXXXXXXPAXVXLXXXPXXXXXRXXNLFXVXDCKXXWQXXGXXLXVXVDRXXXXXKXXXXXXXXXXXXXXXXEXFXXXEXXXPXXXXEXXXXXXXXXXFAWEPXGXXFXXIXXXXXXXXXXXXXXXXXXXXXFYXXXXXXXXXXXXXXXXXXXXXXXXXXXXXXXXXXXXXXXXXXXXXXKXXNXXXXWSPXGXXXXXAXXXXXXXXXXXXXXFXXXXXXXXXXXXXXXXXXXXXXXXXXXXXHXXXXXXXWDPXGRXXXXXXXXXXXXXXXGXXXXXFXGXXXXXXXXXXFXQXXWRPRPXXXLXXXXXXXXXKXLXXYSXXXXXXDXXXXXXXXXXXXXXRXXXXXXXXXXXXXXXXXXXXXXXXXXXXXXXXXXXXXXXXXXXXXXXXXXXXXXXXXXXEXXXXXXXXXXXXXXXXXXXXXXXXXXE

SEQ ID NO: 25419 - protein, 51 aa, Artificial sequence
  protein pattern
  Variant (3)..(3): Xaa in position 3 is any amino acid
  Variant (5)..(5): Xaa in position 5 is Ala, Gly, Asn, Ser or Thr
  Variant (6)..(6): Xaa in position 6 is Ile, Leu or Val
  Variant (7)..(7): Xaa in position 7 is Ile, Leu, Met or Val
  Variant (8)..(8): Xaa in position 8 is Ala, Glu, Gln or Ser
  Variant (9)..(9): Xaa in position 9 is Ile or Val
  Variant (11)..(11): Xaa in position 11 is any amino acid
  Variant (12)..(12): Xaa in position 12 is Lys or Arg
  Variant (13)..(14): Xaa in position 13 to 14 is any amino acid
  Variant (15)..(15): Xaa in position 15 is Ile, Leu or Val
  Variant (17)..(18): Xaa in position 17 to 18 is any amino acid
  Variant (20)..(20): Xaa in position 20 is Ile or Leu
  Variant (22)..(22): Xaa in position 22 is any amino acid
  Variant (24)..(24): Xaa in position 24 is Ala or Ser
  Variant (25)..(25): Xaa in position 25 is Asp or Glu
  Variant (26)..(26): Xaa in position 26 is Ala, Cys or Val
  Variant (28)..(28): Xaa in position 28 is Phe, Ile, Leu or Met
  Variant (29)..(29): Xaa in position 29 is Phe, His or Tyr
  Variant (31)..(32): Xaa in position 31 to 32 is any or no amino acid
  Variant (34)..(40): Xaa in position 34 to 40 is any amino acid
  Variant (42)..(42): Xaa in position 42 is any amino acid
  Variant (43)..(44): Xaa in position 43 to 44 is any or no amino acid
  Variant (46)..(46): Xaa in position 46 is any amino acid
  Variant (47)..(47): Xaa in position 47 is Ala, Ser or Thr
  Variant (48)..(48): Xaa in position 48 is Lys or Arg
  Variant (49)..(50): Xaa in position 49 to 50 is any amino acid
  Variant (51)..(51): Xaa in position 51 is Glu or Lys
PAXVXXXXXPXXXXXRXXNXFXVXXXKXXWXXQXXXXXXXVXXXRXXXXXX

SEQ ID NO: 25420 - protein, 39 aa, Artificial sequence
  protein pattern
  Variant (2)..(3): Xaa in position 2 to 3 is any or no amino acid
  Variant (5)..(5): Xaa in position 5 is any amino acid
  Variant (6)..(7): Xaa in position 6 to 7 is any or no amino acid
  Variant (13)..(13): Xaa in position 13 is Ala or Pro
  Variant (14)..(14): Xaa in position 14 is Ser or Thr
  Variant (15)..(15): Xaa in position 15 is any amino acid
  Variant (17)..(17): Xaa in position 17 is Asn, Ser or Thr
  Variant (18)..(21): Xaa in position 18 to 21 is any amino acid
  Variant (22)..(22): Xaa in position 22 is Asp, Glu or Lys
  Variant (23)..(23): Xaa in position 23 is any amino acid
  Variant (24)..(24): Xaa in position 24 is Ile or Val
  Variant (25)..(27): Xaa in position 25 to 27 is any amino acid
  Variant (29)..(29): Xaa in position 29 is Glu, Lys or Arg
  Variant (30)..(30): Xaa in position 30 is any amino acid
  Variant (31)..(31): Xaa in position 31 is His, Trp or Tyr
  Variant (32)..(34): Xaa in position 32 to 34 is any amino acid
  Variant (35)..(35): Xaa in position 35 is Phe or Tyr
  Variant (36)..(36): Xaa in position 36 is Asp or Glu
  Variant (37)..(37): Xaa in position 37 is Ala, Glu, Gln or Ser
  Variant (38)..(38): Xaa in position 38 is any amino acid
FXXFXXXWRPRPXXXLXXXXXXXXXXXLXXXXXXXXXXD

SEQ ID NO: 25421 - protein, 27 aa, Artificial sequence
  protein pattern
  Variant (2)..(4): Xaa in position 2 to 4 is any amino acid
  Variant (5)..(5): Xaa in position 5 is Ala, Ile or Val
  Variant (6)..(6): Xaa in position 6 is any amino acid
  Variant (7)..(7): Xaa in position 7 is Phe or Trp
  Variant (10)..(10): Xaa in position 10 is any amino acid
  Variant (13)..(13): Xaa in position 13 is Phe or Tyr
  Variant (14)..(14): Xaa in position 14 is Ile, Leu, Met or Val
  Variant (15)..(15): Xaa in position 15 is any amino acid
  Variant (16)..(16): Xaa in position 16 is Ser or Thr
  Variant (17)..(17): Xaa in position 17 is any amino acid
  Variant (19)..(20): Xaa in position 19 to 20 is any amino acid
  Variant (22)..(24): Xaa in position 22 to 24 is any amino acid
  Variant (26)..(26): Xaa in position 26 is any or no amino acid
TXXXXXXSPXGTXXXXXHXXGXXXWXG

SEQ ID NO: 25422 - protein, 21 aa, Artificial sequence
  protein pattern
  Variant (2)..(5): Xaa in position 2 to 5 is any amino acid
  Variant (6)..(9): Xaa in position 6 to 9 is any or no amino acid
  Variant (12)..(12): Xaa in position 12 is Ser or Thr
  Variant (15)..(15): Xaa in position 15 is Phe or Tyr
  Variant (16)..(16): Xaa in position 16 is Ile, Leu or Val
  Variant (17)..(17): Xaa in position 17 is Ala, Thr or Val
  Variant (18)..(18): Xaa in position 18 is Ser or Thr
  Variant (19)..(19): Xaa in position 19 is any amino acid
  Variant (20)..(20): Xaa in position 20 is Ala, Ser, Thr or Val
  Variant (21)..(21): Xaa in position 21 is Ala, Ser or Thr
HXXXXXXXXDPXGRXXXXXXX

SEQ ID NO: 25423 - protein, 18 aa, Artificial sequence
  protein pattern
  Variant (2)..(2): Xaa in position 2 is Ala, Asn, Pro or Ser
  Variant (3)..(3): Xaa in position 3 is any amino acid
  Variant (4)..(4): Xaa in position 4 is Ala, Thr or Val
  Variant (5)..(7): Xaa in position 5 to 7 is any amino acid
  Variant (8)..(8): Xaa in position 8 is Ala, Asp, Glu, Gln or Ser
  Variant (9)..(9): Xaa in position 9 is Phe or Val
  Variant (12)..(12): Xaa in position 12 is any amino acid
  Variant (14)..(14): Xaa in position 14 is any amino acid
  Variant (16)..(16): Xaa in position 16 is Ile, Leu or Met
  Variant (17)..(17): Xaa in position 17 is any amino acid
HXXXXXXXXSPXEXYXXT

SEQ ID NO: 25424 - protein, 19 aa, Artificial sequence
  protein pattern
  Variant (2)..(2): Xaa in position 2 is Ile, Leu or Val
  Variant (3)..(3): Xaa in position 3 is Asp or Glu
  Variant (4)..(4): Xaa in position 4 is any amino acid
  Variant (6)..(6): Xaa in position 6 is any amino acid
  Variant (7)..(7): Xaa in position 7 is Ile, Leu, Met or Val
  Variant (9)..(9): Xaa in position 9 is Ala, Ile or Val
  Variant (10)..(10): Xaa in position 10 is Asp, Glu, Pro, Gln or Ser
  Variant (11)..(11): Xaa in position 11 is Asp, Gly or Asn
  Variant (12)..(12): Xaa in position 12 is Ile or Val
  Variant (13)..(13): Xaa in position 13 is any amino acid
  Variant (14)..(14): Xaa in position 14 is Asp, Glu, Gly or Asn
  Variant (15)..(15): Xaa in position 15 is Phe or Ile
  Variant (16)..(16): Xaa in position 16 is any amino acid
  Variant (18)..(18): Xaa in position 18 is Ala, Cys or Ser
LXXXKXXKXXXXXXXXWXP

SEQ ID NO: 25425 - protein, 19 aa, Artificial sequence
  protein pattern
  Variant (2)..(4): Xaa in position 2 to 4 is any amino acid
  Variant (5)..(6): Xaa in position 5 to 6 is any or no amino acid
  Variant (8)..(8): Xaa in position 8 is Ala or Gly
  Variant (12)..(12): Xaa in position 12 is any amino acid
  Variant (13)..(13): Xaa in position 13 is Gly, Ser or Thr
  Variant (14)..(14): Xaa in position 14 is any amino acid
  Variant (15)..(15): Xaa in position 15 is His, Lys or Arg
  Variant (17)..(17): Xaa in position 17 is any amino acid
  Variant (18)..(18): Xaa in position 18 is any or no amino acid
KXXXXXFXWEPXXXXFXXI

SEQ ID NO: 25426 - protein, 18 aa, Artificial sequence
  protein pattern
  Variant (2)..(2): Xaa in position 2 is Ile or Leu
  Variant (4)..(5): Xaa in position 4 to 5 is any or no amino acid
  Variant (7)..(8): Xaa in position 7 to 8 is any or no amino acid
  Variant (10)..(10): Xaa in position 10 is Lys or Arg
  Variant (11)..(11): Xaa in position 11 is Asp, Glu, Gly, Asn or Gln
  Variant (12)..(12): Xaa in position 12 is any amino acid
  Variant (14)..(14): Xaa in position 14 is Ile or Val
  Variant (15)..(15): Xaa in position 15 is Asp or Glu
  Variant (16)..(16): Xaa in position 16 is Ser or Val
  Variant (17)..(17): Xaa in position 17 is Ile, Leu or Val
  Variant (18)..(18): Xaa in position 18 is Asp or Glu
EXFXXRXXEXXXPXXXXX

SEQ ID NO: 25427 - protein, 13 aa, Artificial sequence
  protein pattern
  Variant (2)..(2): Xaa in position 2 is Ala or Ser
  Variant (4)..(4): Xaa in position 4 is any amino acid
  Variant (6)..(6): Xaa in position 6 is any amino acid
  Variant (7)..(7): Xaa in position 7 is Phe, His or Tyr
  Variant (8)..(8): Xaa in position 8 is Ile or Val
  Variant (9)..(9): Xaa in position 9 is Ala, Ile or Val
  Variant (10)..(10): Xaa in position 10 is Phe, Ile, Leu, Met or Val
  Variant (12)..(12): Xaa in position 12 is Gly, Asn or Thr
  Variant (13)..(13): Xaa in position 13 is Ile, Leu or Val
WXPXGXXXXXAXX

SEQ ID NO: 25428 - DNA, 1005 bp, Arabidopsis thaliana
  CDS (1)..(1005)
atgatggatatgactcctacaataacaacaacaacaacaccaactcctaaatcacccgaacccgaatccgaaactccgacccggatccaaccggcgaaacccatttcctttagcaacggcatcatcaaacgccaccaccaccaccaccatcctctcctctttacttacaaagaatgtctcaaaaaccacgcggcggctttaggtggtcacgctctcgacggttgcggcgaattcatgccgtctccgtcgtcaatctcctccgatccaacttctctcaaatgtgctgcttgtggctgccaccgtaatttccaccgccgtgatccagataacaacaacgactcttcccaaatccctcctcctccttccaccgccgtagagtatcaacctcaccaccgtcatcatccaccaccaccaccacctcctccaccaccacgtagtcctaactcagcttctcctccaccaatctcttcctcttacatgctcttatctctctccggtactaataacaacaacaacaacttagcttctttctccgatcttaacttctccgccggaaacaaccaccaccaccaccaccaacatactcttcacggatctcgtaaaagattccgaacaaaattcagccagtttcagaaagagaagatgcatgaattcgccgaacgtgttggttggaagatgcaaaaacgtgacgaagacgatgttcgtgatttttgccggcagatcggagttgataaaagtgttctcaaagtttggatgcataacaacaaaaacacctttaaccgccgtgatatcgccggaaacgagatccggcaaatcgataacggcggaggaaaccacactccgattctcgccggcgagattaataaccataacaatggacaccacggtgtcggaggaggaggagagcttcaccagagtgttagtagcggcggtggtggcggaggatttgatagtgatagcggcggagctaacggtggtaacgttaacggatcatcgtcgtcgtga

SEQ ID NO: 25429 - protein, 334 aa, Arabidopsis thaliana
MMDMTPTITTTTTPTPKSPEPESETPTRIQPAKPISFSNGIIKRHHHHHHPLLFTYKECLKNHAAALGGHALDGCGEFMPSPSSISSDPTSLKCAACGCHRNFHRRDPDNNNDSSQIPPPPSTAVEYQPHHRHHPPPPPPPPPPRSPNSASPPPISSSYMLLSLSGTNNNNNNLASFSDLNFSAGNNHHHHHQHTLHGSRKRFRTKFSQFQKEKMHEFAERVGWKMQKRDEDDVRDFCRQIGVDKSVLKVWMHNNKNTFNRRDIAGNEIRQIDNGGGNHTPILAGEINNHNNGHHGVGGGGELHQSVSSGGGGGGFDSDSGGANGGNVNGSSSS

SEQ ID NO: 25430 - DNA, 1595 bp, Glycine max
  CDS (279)..(1304)
attcaacactcttccttctcctccttcctccaacaaagcaacttttttttttctcttcctttccatttcctaatttccatcatataaaatagtgccacccatcaccacaacaataacaaaatcagcggcatcagcaggagccgaagcggctcgaacttcaattcatggaagtgtgatatctctaatctccacaacaaacctaaccctaaaaagctaaccctttttttttttttttttaaatattggttctttttttacttaccctagatgttagagccatggacataaccccaacaacaacgatcaacaacaacaacactactcccagtgcaacaacaaaatccccagaaaatgaaacagaaacaccgaccaggatcaccacccccatcactcccacaacgacaaaaacctcatctttctcgaatggtgtcctcaaacgcacccaccaccaccaccacctccaccaccctatccctccggtggttacctacaaagaatgcctcaaaaatcacgccgccaacttgggtggccacgccttagatggctgcggcgagttcatgccctctccgaccgccaccgctgccgaccccagctccataaaatgcgccgcctgcggctgccaccgcaacttccaccgccgcgagccggaggagccccccatcgcctccaccaccacgcacgtcatcgagtatcagccccaccaccgccaccaccctcccccgccgctgcacgcggcggcggtagcaacccgcagccccaattctgcttccccgccgccgatctcctcctcttactatccctccgcgccgcacatgctcctcgccctctccgccgggctagcggctccgccggagagcaccgcagcgccttccgccgcgctcagcagaaagcgtttccgaacgaagttcagtcaggagcagaaggagaagatgcacaagttcgcggagaaagtggggtggaagattcagaagcgggacgaggatttgattcacgagttctgcaacgaggttggggtcgatagaagcgttctcaaggtttggatgcataacaacaaaaacaccttcgccaaaaaagataacaatattgttattagtaatgatattaatattactactagtaataatattaataccagtattattgatgataatgatgcaaatgggggtgatgtcaaggtttttgaaaaccctaacaacaaccatggtagtggtagtggtggtggtgaagatcctgctgaagatccgagtcgtaatcactatggtggggtgaatgttggtgctaacgggtcttcttctagttcttgatctaaggggaagagaagaagaataatgtgatagataggttaatgatgatgatgctgctactactggttaattaattagtagtttttaatttcttttctttttttgtttttaattgtttagtttttatattgtgaatgagaccaagatgatggatgatctatcagcttaattggagagaatgatatatccaaagggaaatttattttgatttttatggttttaatggtattgttctgaattaattggggagttagttgttactacttgttatgaatgtgtatatgtttgttt

SEQ ID NO: 25431 - protein, 341 aa, Glycine max
MDITPTTTINNNNTTPSATTKSPENETETPTRITTPITPTTTKTSSFSNGVLKRTHHHHHLHHPIPPVVTYKECLKNHAANLGGHALDGCGEFMPSPTATAADPSSIKCAACGCHRNFHRREPEEPPIASTTTHVIEYQPHHRHHPPPPLHAAAVATRSPNSASPPPISSSYYPSAPHMLLALSAGLAAPPESTAAPSAALSRKRFRTKFSQEQKEKMHKFAEKVGWKIQKRDEDLIHEFCNEVGVDRSVLKVWMHNNKNTFAKKDNNIVISNDINITTSNNINTSIIDDNDANGGDVKVFENPNNNHGSGSGGGEDPAEDPSRNHYGGVNVGANGSSSSS

SEQ ID NO: 25432 - DNA, 1635 bp, Glycine max
  CDS (300)..(1328)
ccggaaccatcgggtcgacccacgcgtccgcgcacgtccgcgcgtcctcaaaaaccatcatcaatatctcttctcttcattcctcttctccctctcccttcaattttttctctttttttcccctcaattttttctcttcttcaattttagccctacatacaacataaacaacaacaattttagccctcactcacaaacccatttctctcaagttttagcaacacttttgatgaagtcgtcacaaaaagcaactgttttggcttaattattagtattattgttgttaattttttacaaggatggagataataacaccagtaccagcaacagcaacaacaacagccaaaaacgcaaccgcgaaatcgccagaacccgacgtagagacgccgacccggatccaccaaaacccgaacctgaatccaaagccggtgtctttctccaacggcgtcttgaagcgccaccatgcaaaccaccgccccaacgcggtggtttacaaggaatgcttgaagaaccacgtggcgagcttgggtggccacgctttggacggctgcggcgagttcatgccgtcgccggcggccaccgccgacgaccccagctccatcaaatgcgccgcctgcggctgccaccggaacttccaccgccgcgaaccggaggagacacccatttctccggcgacgcaccatgttctagagtaccagccccaccaccgccatcaccctcctccgccggccccgtcgcaccggagtccgaactccgcctccccgccgccgatctcctcctacccctacgcccgccacatgctcctcgccctctccggcggcggtggcttctccgtcgcgcgggaaaacaccggcgcgccggcgccggcgcacaaccactcgcgtaaacgcttccgaacgaagttcacccaagaacaaaaggagaagatgcatgagttcgccgacaaagttgggtggaagatgcagaagcgcgacgatgaaatggttatggagttctgcaacgagattggcgtcgaaagaggggttctcaaagtgtggatgcacaacaacaagaacactctcgcgaaaaaagacaaccttaacaacggtaacggtagcactctgagtgtcagcgccaacgggatttctctggatggcgctgttgggagtgccaccgttagaaccggtgttcatgtccccgaacatggacatgaacacagcggaattaatggtaacggtagcggcgacaacaaccacaaccacaatctcgcttcccatgatgtgaacgagtacgagaatgatagtgggactaacgggggtggtactaatgggtcttcttcttcttcttgaaaagaaaaaaaaaatgagagaataatgatatgtttagatgatagagtaattaagaggtggtaccggttaattacttaattagtcgtttttcttccttctttctttttattttgatttaattgtttagtttttgttaattaatgagatgctgatgctgatgaagaagataatcaccttcttaacatgggagagagatttgattttgatgatattgatatccgcagggaatttagttttcttgtttgattctgctgcttaattatagttaaatatagtgttaattaataattagtgctttcatttcccc

SEQ ID NO: 25433 - protein, 342 aa, Glycine max
MEIITPVPATATTTAKNATAKSPEPDVETPTRIHQNPNLNPKPVSFSNGVLKRHHANHRPNAVVYKECLKNHVASLGGHALDGCGEFMPSPAATADDPSSIKCAACGCHRNFHRREPEETPISPATHHVLEYQPHHRHHPPPPAPSHRSPNSASPPPISSYPYARHMLLALSGGGGFSVARENTGAPAPAHNHSRKRFRTKFTQEQKEKMHEFADKVGWKMQKRDDEMVMEFCNEIGVERGVLKVWMHNNKNTLAKKDNLNNGNGSTLSVSANGISLDGAVGSATVRTGVHVPEHGHEHSGINGNGSGDNNHNHNLASHDVNEYENDSGTNGGGTNGSSSSS

SEQ ID NO: 25434 - DNA, 1449 bp, Glycine max
  CDS (144)..(1142)
aacaacagaagcagcaggttcaaacttcaattcatggaagtgtgattctaatctccacaacaaacctaaccctaaaaagctaacccttttttttttttttttaaatattgtttctttttttacttaccctagatgttagagccatggacataaccccaacaacaacgatcaacaacaacaacactactcccagtgcaacaacaaaatccccagaaaatgaaacagaaacaccgaccaggatcaccacccccatcactcccacaacgacaaaaacctcatctttctcgaatggtgtcctcaaacgcacccaccaccaccaccacctccaccaccctatccctccggtggttacctacaaagaatgcctcaaaaatcacgccgccaacttgggtggccacgccttagatggctgcggcgagttcatgccctctccgaccgccaccgctgccgaccccagctccataaaatgcgccgcctgcggctgccaccgcaacttccaccgccgcgagccggaggagccccccatcgcctccaccaccacgcacgtcatcgagtatcagccccaccaccgccaccaccctcccccgccgctgcacgcggcggcggtagccacccgcagccccaattctgcttccccaccgccgatctcctcgtcgtactacccctccgcgccgcacatgctcctcgccctctccgccggactggcggctccgccggagagcaccgccgcgcctgccgccgcgcccacgagaaagcggttccgcacgaagttcagccaagagcagaaggagaagatgcacaagttcgcggagaaagtagggtggaagattcagaagcgcgacgaggatttgattcacgaaatttgcaacgaagttggcgttgatagaagcgttctcaaggtttggatgcataacaacaaaaacacctttgccaaaaaggataacaataatattgttactagtaatgatattaatattactactaaaaataatatttctactgataatgatgcaaatgggagtgatgtcaaggtttttgaaaaccctaacaatgatggtggtgaagatcgcgctgaagatccgagtagtaatcactatgatggggtgaacgttgttggtgctaatggatcttctagttcttgatctaagggggaagaaaataataatgtattagataggttaatgatgattatgatgatgatgatgatgctacaaggttaattaatcagctgtttttaatttcttttcttttcttttttttgtttttaattgtttagtttttatattgttaatgagagcatgatgatcaatcagtttaatgggagagaatgttatatccggaagagagtttattttgcttttaatggttttatgctgaattaagttagcttttagttgttaccacttgttatgaatgtatattatgtttatctttaaaaaaaaaaaaaaa

SEQ ID NO: 25435 - protein, 332 aa, Glycine max
MDITPTTTINNNNTTPSATTKSPENETETPTRITTPITPTTTKTSSFSNGVLKRTHHHHHLHHPIPPVVTYKECLKNHAANLGGHALDGCGEFMPSPTATAADPSSIKCAACGCHRNFHRREPEEPPIASTTTHVIEYQPHHRHHPPPPLHAAAVATRSPNSASPPPISSSYYPSAPHMLLALSAGLAAPPESTAAPAAAPTRKRFRTKFSQEQKEKMHKFAEKVGWKIQKRDEDLIHEICNEVGVDRSVLKVWMHNNKNTFAKKDNNNIVTSNDINITTKNNISTDNDANGSDVKVFENPNNDGGEDRAEDPSSNHYDGVNVVGANGSSSS

SEQ ID NO: 25436 - DNA, 1116 bp, Oryza sativa (japonica cultivar-group)
  CDS (1)..(1116)
atgataaaacccgcgcgaaccgagcgtgctctggcgatggaggccgtcgtcggcgtcaagtacaggccggtggtgttccccaacggcggcgcggcggcggctgcggcggggaagagcaaggcgacgccggcgtcggcgacggcggcggtgtacagggagtgcttgaagaatcacgcggcgagcttgggcgggcacgcggtggatgggtgcggggagttcatgccgtcgccggcggcggatgccgctgatccggcgtcgctcaagtgcgccgcgtgtgggtgccaccgcaacttccaccgccggctccccgaggcgccgccctccccgcctctcctcgcgctgcctccgccgccgccgccaccgccaccgccaccgccgccgccgcagcctcagcagcatctgccgcggaccgcggcggtggcggtggcgccgcagctgctgctgcatgggagccaccagcgtcgcgagcagtcgccggagaccgaccgcgtgcgcgggcccgggcaccaccacgacgacgacgccgccgccgacgatgatgattccgaggactccgagatgtccgactacgacgacgaccgctccgcctcgccgctgcaggcgccgccaccggtgctctctccggggtacctcccctccgcgacgcacatgctgctgtcgcttggctccgcgtccgccccggccgtggcggcgtcgaggccccacgccgccgccgccgccatggggcccccgcctccgccgggcgccgcgacgtcggcgtcgaggaagcggttccggaccaagttcagcccggagcagaagcagcggatgcaggcgctgtcggagcggctcgggtggcgcctccagaagcgcgacgaggccgtcgtcgacgagtgctgccgcgagatcggcgtcggcaagggcgtcttcaaggtctggatgcacaacaacaagcacaacttcctcggcggccacagcgcccgccgctccgccgccgccgccgccgccgcgccactcgccccaccaccagtgctcactgacttcagcatcaacggctcatccacgcatgccgccgccgccgaccacgccgcggcaacggcgagtggcggcggcggcggctcgccgcagtcgacttaa

SEQ ID NO: 25437 - protein, 371 aa, Oryza sativa (japonica cultivar-group)
MIKPARTERALAMEAVVGVKYRPVVFPNGGAAAAAAGKSKATPASATAAVYRECLKNHAASLGGHAVDGCGEFMPSPAADAADPASLKCAACGCHRNFHRRLPEAPPSPPLLALPPPPPPPPPPPPPPQPQQHLPRTAAVAVAPQLLLHGSHQRREQSPETDRVRGPGHHHDDDAAADDDDSEDSEMSDYDDDRSASPLQAPPPVLSPGYLPSATHMLLSLGSASAPAVAASRPHAAAAAMGPPPPPGAATSASRKRFRTKFSPEQKQRMQALSERLGWRLQKRDEAVVDECCREIGVGKGVFKVWMHNNKHNFLGGHSARRSAAAAAAAPLAPPPVLTDFSINGSSTHAAAADHAAATASGGGGGSPQST

SEQ ID NO: 25438 - DNA, 939 bp, Arabidopsis thaliana
  CDS (1)..(939)
atggaaattgcaagtcaagaagatcatgatatgcccatcccattaaacactacatttggtggtggtggtagtcatggtcacatgatccatcatcatgatcatcatgctgctaattctgctcctccaactcacaacaacaacaatactactcaaccacctccaatgccgttacatggtaatggtcatggcaacaattatgatcatcatcatcatcaagatcctcatcatgttggttacaacgctatcatcaagaagcctatgataaagtacaaggagtgtctcaagaaccatgcagcagctatgggaggcaatgctactgatgggtgtggagagtttatgccaagtggtgaagatggctccattgaggctctcacttgctcagcttgcaattgccacaggaacttccatagaaaagaagtggaaggcgaactcgcagccaccgccatgtccccttaccaccaacaccctccacaccgaaaactcatgctcaaccaccaaaagatcagatcagctatgccacaccaaatgatcatgcccattggagtctctaactaccggtacatgcataacaactccgagtccgaggactttatggaggaagatggcgtaaccaccgcatctagatcgctaccaaacctgccatacaaccagaagaagaggttcaggacaaagttcacgccggaacagaaggagaagatgcttagttttgctgagaaagttgggtggaaaatacaaaggcaagaagattgtgttgttcaaaggttttgtgaagagattggagtgaagagaagagtgcttaaggtttggatgcacaacaacaagatccatttctccaagaagaacaacattaacctcgaagacaacgacaacgaaaagatcaacaatctcaacaatgttgatctgtccggtaataacgacatgactaagatcgtcccatga

SEQ ID NO: 25439 - protein, 312 aa, Arabidopsis thaliana
MEIASQEDHDMPIPLNTTFGGGGSHGHMIHHHDHHAANSAPPTHNNNNTTQPPPMPLHGNGHGNNYDHHHHQDPHHVGYNAIIKKPMIKYKECLKNHAAAMGGNATDGCGEFMPSGEDGSIEALTCSACNCHRNFHRKEVEGELAATAMSPYHQHPPHRKLMLNHQKIRSAMPHQMIMPIGVSNYRYMHNNSESEDFMEEDGVTTASRSLPNLPYNQKKRFRTKFTPEQKEKMLSFAEKVGWKIQRQEDCVVQRFCEEIGVKRRVLKVWMHNNKIHFSKKNNINLEDNDNEKINNLNNVDLSGNNDMTKIVP

SEQ ID NO: 25440 - DNA, 729 bp, Arabidopsis thaliana
  CDS (1)..(729)
atggatttgtcttccaaaccacaacaacaacttctaaactctcttcccatcgccggagaactaactgtcaccggagaaatgggtgtttgttacaaagagtgtttgaaaaaccacgcggctaatctcggcggccatgctctcgacggttgcggcgagtttatgccgagtcccacggctacttccaccgatccttcttctctccgttgcgctgcttgtggctgccaccgtaacttccaccgccgtgacccttccgagaatctcaacttcctcaccgcgcctccgatttcttctccctccggcactgagtcgccgccgtctcgtcacgtgtcttctcctgttccttgctcttactacacctcagctcctccacatcacgtgattctctctctcagctccggtttccctggaccgtcagatcaagatccaacggtggttaggtcagagaacagttcaagaggagcaatgaggaaacgaacaagaaccaaattcacgccggagcagaagatcaagatgagagccttcgcagagaaagctggttggaaaatcaacggatgtgatgaaaagtcggtgagagagttttgtaacgaagttgggattgagagaggagttcttaaagtgtggatgcataacaacaagtactcacttctcaatggcaagatcagagagatcgaacatggcctgtgtctgaacactcacagcaatgatggtgatgggtcttcatcttcttga

SEQ ID NO: 25441 - protein, 242 aa, Arabidopsis thaliana
MDLSSKPQQQLLNSLPIAGELTVTGEMGVCYKECLKNHAANLGGHALDGCGEFMPSPTATSTDPSSLRCAACGCHRNFHRRDPSENLNFLTAPPISSPSGTESPPSRHVSSPVPCSYYTSAPPHHVILSLSSGFPGPSDQDPTVVRSENSSRGAMRKRTRTKFTPEQKIKMRAFAEKAGWKINGCDEKSVREFCNEVGIERGVLKVWMHNNKYSLLNGKIREIEHGLCLNTHSNDGDGSSSS

SEQ ID NO: 25442 - DNA, 933 bp, Arabidopsis thaliana
  CDS (1)..(933)
atggagattgcaagtcaagaagatcctattccaataaacactagttatggtaatagtggaggtgggcatgggaacatgaaccatcatcatcatgccaattctgcaccatcatctctcaacattactacttcaaacccactactagtctcctcaaatagtaatggtcttggtaaaaatcatgatcattctcatcatcatcatgtgggttacaacatcatggttaccaacatcaagaaagagaagcctgtggtgataaagtacaaggaatgcctaaagaaccatgcagctaccatgggaggcaatgccattgatggttgtggagagtttatgccaagtggtgaagaaggttccattgaagctctcacttgctcagtttgcaactgccatagaaactttcatagaagagaaaccgaaggtgaagagaaaacattcttttccccttacctcaaccaccaccaaccacctccgcagcagagaaaactcatgttccaccacaagatgatcaaatcaccattaccacaacaaatgataatgcctattggcgttacaaccgctggatccaactcagagtcagaggatcttatggaggaagaaggcggaggaagcttgacattccggcagccaccaccaccaccatcaccgtatagttacggacataatcagaagaaaaggtttaggacaaagtttacacaagagcaaaaggagaagatgattagttttgcggaaagagttggttggaagattcagagacaagaggaatctgttgttcaacagctttgtcaagagattggaattaggagaagagttcttaaagtttggatgcacaacaacaaacaaaatctctccaagaagagcaacaacgttagtaacaatgtcgacctttctgctggtaataacgacattactgaaaatcttgcttctactaatccttag

SEQ ID NO: 25443 - protein, 310 aa, Arabidopsis thaliana
MEIASQEDPIPINTSYGNSGGGHGNMNHHHHANSAPSSLNITTSNPLLVSSNSNGLGKNHDHSHHHHVGYNIMVTNIKKEKPVVIKYKECLKNHAATMGGNAIDGCGEFMPSGEEGSIEALTCSVCNCHRNFHRRETEGEEKTFFSPYLNHHQPPPQQRKLMFHHKMIKSPLPQQMIMPIGVTTAGSNSESEDLMEEEGGGSLTFRQPPPPPSPYSYGHNQKKRFRTKFTQEQKEKMISFAERVGWKIQRQEESVVQQLCQEIGIRRRVLKVWMHNNKQNLSKKSNNVSNNVDLSAGNNDITENLASTNP

SEQ ID NO: 25444 - DNA, 939 bp, Arabidopsis thaliana
  CDS (1)..(939)
atgcttgaagttagatcaatggatatgactccaaaatcaccagaacccgaatccgaaactccgacccggatccaaccagctaaaccaatctctttcagtaacggaatcatcaaacgccaccaccaccaccaccacaacaacaacaaagtcacttacaaagaatgtctcaagaaccacgcggcggcgattggtggtcacgcgcttgacggttgcggcgaatttatgccgtctccttcgtcaacaccttccgatccaacttctctcaagtgtgcagcttgtggttgtcaccgtaacttccaccgccgtgaaactgacgattcctccgccgttccaccaccgtctcttcttccatcttcaacaacaaccgccgcaattgagtatcagcctcatcaccgtcatcatcctcctcctccgctagctcctccgttaccacgtagtcctaattcatcttctccgccgcctatctcttcctcctacatgcttttagctctctccggtaataataaaaccgcaccgttctcagatctaaacttcgccgccgcggctaaccatctctccgccacgcctggctcgaggaagcgattcaggacgaagtttagctcaaatcagaaagagaagatgcatgaattcgccgatcgaatcggttggaagattcagaaacgtgacgaagacgaagttcgtgatttttgccgtgagatcggagttgataaaggtgttctcaaagtttggatgcataataacaaaaactccttcaaattctccggcggaggagcaaccaccgtgcagagaaacgataacggtatcggcggcgagaacagtaacgatgatggagttcgcggtttagctaacgacggtgacggtggtggtgggagatttgagagtgatagtggaggagctgatggtggcggaaacgtaaacgcctcgtcgtcttcgtcgtga

SEQ ID NO: 25445 - protein, 312 aa, Arabidopsis thaliana
MLEVRSMDMTPKSPEPESETPTRIQPAKPISFSNGIIKRHHHHHHNNNKVTYKECLKNHAAAIGGHALDGCGEFMPSPSSTPSDPTSLKCAACGCHRNFHRRETDDSSAVPPPSLLPSSTTTAAIEYQPHHRHHPPPPLAPPLPRSPNSSSPPPISSSYMLLALSGNNKTAPFSDLNFAAAANHLSATPGSRKRFRTKFSSNQKEKMHEFADRIGWKIQKRDEDEVRDFCREIGVDKGVLKVWMHNNKNSFKFSGGGATTVQRNDNGIGGENSNDDGVRGLANDGDGGGGRFESDSGGADGGGNVNASSSSS

SEQ ID NO: 25446 - DNA, 816 bp, Arabidopsis thaliana
  CDS (1)..(816)
atggatgtaatagctactacaactactatagtatccgacttggattcacgacaacccgaaatcgaagctccgatccggatccagcccgcgaagcctatttctttctcaaacggcaaacgctgccaccaccatcatcttgcatctgaagcggttgcggttgcgacttataaagaatgtctaaagaatcacgcagcaggtatcggcggtcacgctttagacggatgcggcgagtttatgccgtcaccgtcgtttaactccaatgaccccgcttcactaacgtgcgctgcttgtggttgccaccgtaacttccaccgccgtgaggaggatccatcttctctctctgccatcgtccctgcgatcgaatttcgacctcacaaccgtcaccagcttcctccaccgcctcctcctcatctggcggggattcgtagtccagacgacgatgattcagcttctccaccgccgatctcgtcttcttacatgcttctcgcactctctggaggaagaggaggagctaacacggcggttccaatgtctaggaaacgttttaggacgaagtttagtcagtatcagaaggagaagatgttcgagttctcggagagagttgggtggaggatgccgaaagctgatgacgtggtggttaaggagttttgtcgggagattggagttgataaaagcgttttcaaagtgtggatgcataacaacaagatttcaggacgcagcggcgctagaagagctaacggcggagtagtagtaggaggagtaggagatagtcgtcagagtgttgttccgacaaatgggtcgttttcttcgacgtga

SEQ ID NO: 25447 - protein, 271 aa, Arabidopsis thaliana
MDVIATTTTIVSDLDSRQPEIEAPIRIQPAKPISFSNGKRCHHHHLASEAVAVATYKECLKNHAAGIGGHALDGCGEFMPSPSFNSNDPASLTCAACGCHRNFHRREEDPSSLSAIVPAIEFRPHNRHQLPPPPPPHLAGIRSPDDDDSASPPPISSSYMLLALSGGRGGANTAVPMSRKRFRTKFSQYQKEKMFEFSERVGWRMPKADDVVVKEFCREIGVDKSVFKVWMHNNKISGRSGARRANGGVVVGGVGDSRQSVVPTNGSFSST

SEQ ID NO: 25448 - DNA, 1026 bp, Medicago truncatula
  CDS (1)..(1026)
atggacataaccttaaccccaacaccaacacctacaccagcaccaacatcaacaacatcaatagcaccaaccatattaacagcatctacaacaaccttaactaaatcaccagaacaacaacatgaaactgaaacacccacaacaaaattcacaacctcaacaaccccaaaaatctcacctttttcaaatggtgttctcaaacgtttccaccaccaccaccaccacttcaaccaccacaacaaccatcaacctaccataacctacaaagaatgtctcaaaaaccatgcagcaaacctaggtggtcatgccctagatggctgtggtgaattcatgacatcaccaacagcaacaccaaccgacccaacatccttaaaatgtgctgcttgtggctgccaccgtaacttccaccgccgtgaaccagaagagccaccactcacaaccactcatgtcattgaatatcaacctcaccaccgtcatcaaccacttccaccaccaccgttctctcaccggagcccaaattcctcttcaccaccaccgatctcatcttcctactacccctccgcccctcacatgcttcttgctctctccgccgccttaccggaaaacgttgcagctccaaaccaaaccatgttgatgaattctcactctaacaattcaagaaagcgtttcaggacaaagtttacacaagatcagaaggataagatgctgaaatttgctgagaaagttgggtggaagatgcagaaaaaagatgatgaatttgttcatgagttttgtaatgaaattggtgttgatcgtagtgttcttaaggtttggatgcataacaacaagaacactttagctaaacgagaaaacattaacactaacaatgatattaatgatggtgttaagagttttcagctacctcttgaagatgaagaacacaagaataatgttgagattcatggtcttaatcacaatcattatcagaatgaaggtggagttgttggagtaactgttcgtgctaatggttcatcatcttcttcttaa

SEQ ID NO: 25449 - protein, 341 aa, Medicago truncatula
MDITLTPTPTPTPAPTSTTSIAPTILTASTTTLTKSPEQQHETETPTTKFTTSTTPKISPFSNGVLKRFHHHHHHFNHHNNHQPTITYKECLKNHAANLGGHALDGCGEFMTSPTATPTDPTSLKCAACGCHRNFHRREPEEPPLTTTHVIEYQPHHRHQPLPPPPFSHRSPNSSSPPPISSSYYPSAPHMLLALSAALPENVAAPNQTMLMNSHSNNSRKRFRTKFTQDQKDKMLKFAEKVGWKMQKKDDEFVHEFCNEIGVDRSVLKVWMHNNKNTLAKRENINTNNDINDGVKSFQLPLEDEEHKNNVEIHGLNHNHYQNEGGVVGVTVRANGSSSSS

SEQ ID NO: 25450 - DNA, 807 bp, Oryza sativa subsp
  CDS (1)..(807)
atggaggccatggacgtcaagtacaagccgctcgtgttccccaacggcgccatcaagaaggcggcgaagccggcggcggttgcgcctgcggtgggcggcggcggagggggagagacggtgtaccgggagtgcctcaagaaccacgcggcgagcctgggcgggcacgcgctggacgggtgcggggagttcatgccgtcgccggcggcgaaccccgccgacccgacgtcgctcaggtgcgccgcgtgcggctgccaccgcaacttccaccgccggctgccggaggggtcccccccgcctccgccgccgcctgcgctactgcccgcgccgcccatgccgccgcaccgcgagaaggagacccccgaggtccgcctccccggggtggaatgcgacaagtccgactccgactcggacgggtcggagtacgacgacgaccggtccgtttccccccctcctcccccgcttacgtcccccttttgccaaccaggtgtactaccattcggcgccgcacatgctgctgtcgctggggtcgagcggggcagggcgcagaggctcccgccgcagaagcagcggatgcaggagctctcggagcggctcgggtggcgcctccagaagcgcgacgaggccatcgtcgacgagtggtgccgcgacatcggcgtcggcaagggcgtcttcaaggtctggatgcacaacaacaagcacaactacctcggcggccacagcgcccgccgcagcgcctcctcctcctccgccgccgcagatgttttagcgcagaattcgctaaatggtaaaggatgggagacccagtag

SEQ ID NO: 25451 - protein, 268 aa, Oryza sativa subsp
MEAMDVKYKPLVFPNGAIKKAAKPAAVAPAVGGGGGGETVYRECLKNHAASLGGHALDGCGEFMPSPAANPADPTSLRCAACGCHRNFHRRLPEGSPPPPPPPALLPAPPMPPHREKETPEVRLPGVECDKSDSDSDGSEYDDDRSVSPPPPPLTSPFCQPGVLPFGAAHAAVAGVERGRAQRLPPQKQRMQELSERLGWRLQKRDEAIVDEWCRDIGVGKGVFKVWMHNNKHNYLGGHSARRSASSSSAAADVLAQNSLNGKGWETQ

SEQ ID NO: 25452 - DNA, 858 bp, Solanum tuberosum
  CDS (1)..(858)
atggagttaccttgtagtactaaccccacccccacctccaccaaaaccccagattcagaagttgataccccacctttaattaagcctttatctttcagcaacggcaataatcaccaccaaccgccgccgtgcacggtggtgatttacaaggaatgtttgaagaatcatgcagcaagtttaggcgggcacgccgtagacggttgcggtgagtttatgccttcgacggaatccaccccatcagatcccatttcactaaaatgcgccgcttgtggttgccaccgcaacttccaccgccgtgaaccgtcggacaattcatcaccgccggcccacttcatcgatttccgccgccatattttcccccaaattaagcgattttctccatctccgtctccgtccctttctccgccaccgctgccgtcactgttccagccccaacccgttactcctacaggtttaaaatcagagaacccaaatggtagaaagcgatttaggaccaaatttacagcagaacagaaagagaaaatgcattcattttcggagaaattgggttggaaattgcagaaatgtgatgaaactgctgttgatgaattttgcaatgaaattggagttggaaaaaatgttcttagagtttggatgcacaataacaaaaacactattggtaaaaaagattaccaaatttcgaataacagtagtagagatcatagcttcgagaacaaaaatggattcaatatcaatggcaccgcaagcagcaatgaagaagaagatcatcacaaaaataacaacaatgataatagtactactagtaattgtgagcttcatcttcatatttccactaatgggtcttcttcttcatcctaa

SEQ ID NO: 25453 - protein, 285 aa, Solanum tuberosum
MELPCSTNPTPTSTKTPDSEVDTPPLIKPLSFSNGNNHHQPPPCTVVIYKECLKNHAASLGGHAVDGCGEFMPSTESTPSDPISLKCAACGCHRNFHRREPSDNSSPPAHFIDFRRHIFPQIKRFSPSPSPSLSPPPLPSLFQPQPVTPTGLKSENPNGRKRFRTKFTAEQKEKMHSFSEKLGWKLQKCDETAVDEFCNEIGVGKNVLRVWMHNNKNTIGKKDYQISNNSSRDHSFENKNGFNINGTASSNEEEDHHKNNNNDNSTTSNCELHLHISTNGSSSSS

SEQ ID NO: 25454 - DNA, 867 bp, Oryza sativa
  CDS (1)..(867)
atggatcacctgagcctggtgccctacgagggcggcagcgccggcgggggaggaggtggaggtggaggtggtggagggaagtacaaggagtgcatgcggaaccacgcggcggcgatgggcgggcaggcgttcgacgggtgcggggagtacatgccggcgtcgcccgactcgctcaagtgcgccgcgtgcggctgccaccgcagcttccaccgccgcgccgccgcgggcatcggcggcgggccggtgttcttccgcccgccgccaccgccgcagccgcactcgcaccacgccgcgctgcagggcttcctcccgtcgtccgtgccggcgccgccgccgccgccgcagctcgcgctgccgtaccacgccgtgcccgccgcggcgtggcaccacgcggctgcggcggcggcaggccgcgcaggctcggagacgcccccgcggatggacgacttcggccccggcagcgccggcgggagcgggagcggcggcggcggcatcttcgggcggaagcggttccggaccaagttcacgccggagcagaaggagcggatgcgggagttcgccgagaagcaaggatggcgcatcaaccgcaacgacgacggcgccctggaccgcttctgcgtcgagatcggcgtcaagcgccacgtcctcaaggtctggatgcacaaccacaagaaccagctcgcctcctccccgacctccgccgccgccgccgccgccggcgtcatgaaccccggcgccggcatcggcctcggcaccggcctcggcaccggcatcagcggcgacggcgacggcgacgacgacgacaccgacgactccccgccccgcgccgccgtgtcctccccctccccttcaccgatcagcgtctag

SEQ ID NO: 25455 - protein, 288 aa, Oryza sativa
MDHLSLVPYEGGSAGGGGGGGGGGGGKYKECMRNHAAAMGGQAFDGCGEYMPASPDSLKCAACGCHRSFHRRAAAGIGGGPVFFRPPPPPQPHSHHAALQGFLPSSVPAPPPPPQLALPYHAVPAAAWHHAAAAAAGRAGSETPPRMDDFGPGSAGGSGSGGGGIFGRKRFRTKFTPEQKERMREFAEKQGWRINRNDDGALDRFCVEIGVKRHVLKVWMHNHKNQLASSPTSAAAAAAGVMNPGAGIGLGTGLGTGISGDGDGDDDDTDDSPPRAAVSSPSPSPISV

SEQ ID NO: 25456 - DNA, 1005 bp, Arabidopsis thaliana
  CDS (1)..(1005)
atgatggatatgactcctacaataacaacaacaacaacaccaactcctaaatcacccgaacccgaatccgaaactccgacccggatccaaccggcgaaacccatttcctttagcaacggcatcatcaaacgccaccaccaccaccaccatcctctcctctttacttacaaagaatgtctcaaaaaccacgcggcggctttaggtggtcacgctctcgacggttgcggcgaattcatgccgtctccgtcgtcaatctcctccgatccaacttctctcaaatgtgctgcttgtggctgccaccgtaatttccaccgccttgatccagataacaacaacgactcttcccaaatccctcctcctccttccaccgccgtagagtatcaacctcaccaccgtcatcatccaccaccaccaccacctcctccaccaccacgtagtcctaactcagcttctcctccaccaatctcttcctcttacatgctcttatctctctccggtactaataacaacaacaacaacttagcttctttctccgatcttaacttctccgccggaaacaaccaccaccaccaccaccaacatactcttcacggatctcgtaaaagattccgaacaaaattcagccagtttcagaaagagaagatgcatgaattcgccgaacgtgttggttggaagatgcaaaaacgtgacgaagacgatgttcgtgatttttgccggcagatcggagttgataaaagtgttctcaaagtttggatgcataacaacaaaaacacctttaaccgccgtgatatcgccggaaacgagatccggcaaatcgataacggcggaggaaaccacactccgattctcgccggcgagattaataaccataacaatggacaccacggtgtcggaggaggaggagagcttcaccagagtgttagtagcggcggtggtggcggaggatttgatagtgatagcggcggagctaacggtggtaacgttaacggatcatcgtcgtcgtga

SEQ ID NO: 25457 - protein, 334 aa, Arabidopsis thaliana
MMDMTPTITTTTTPTPKSPEPESETPTRIQPAKPISFSNGIIKRHHHHHHPLLFTYKECLKNHAAALGGHALDGCGEFMPSPSSISSDPTSLKCAACGCHRNFHRLDPDNNNDSSQIPPPPSTAVEYQPHHRHHPPPPPPPPPPRSPNSASPPPISSSYMLLSLSGTNNNNNNLASFSDLNFSAGNNHHHHHQHTLHGSRKRFRTKFSQFQKEKMHEFAERVGWKMQKRDEDDVRDFCRQIGVDKSVLKVWMHNNKNTFNRRDIAGNEIRQIDNGGGNHTPILAGEINNHNNGHHGVGGGGELHQSVSSGGGGGGFDSDSGGANGGNVNGSSSS

SEQ ID NO: 25458 - DNA, 1002 bp, Medicago truncatula
  CDS (1)..(1002)
atgatggaagttataacagcaacagcaaccaccacaaacacaaacacaaacacaacctcaaactccacaaacactactacatctttaacaacaaatctaacaaaagaacaacaacccgaatcggaaaacccgacccgaatccatcaacccatattatcaaacataacaaaacctttgtctttttcaaatggtgttctcaaacgccaccaccccaaccaccataacaacaacaacaacaacgttaataaccttaacaacgttgttgttacttacaaagaatgtctcaaaaaccacgtggcaaccctaggtggtcatgccctagacggttgttgtgaattcatgccatcaccaaccgccacctccgatgaccctgcctccataaaatgtgccgcatgtggttgtcaccggaatttccaccgccgtgaaccggaagaaccaatttccaccgtttttgaatatcaacctcatcaccgtcaccacccaccaccaccacctcttttccagtcacgttcaccaagctcaccatcaccaccaccgatctcatcatacccatcagccccacatatgctcttagcactctccggcgccggagttggtctttctatcccaccggaaaacactgctgcaccgttaaaccacctaagttcacctatgggaacaagtagaaaaagattcagaacaaaattcacgcaggaacagaaggaaaagatgcatgaatttgctgataaagttgggtggaagatgcagaagagagatgaagaaatggtgaatggtttttgcaatgaagttggtgttgatagaagtgttctcaaagtttggatgcataataataagaacactttgggaagaaaattatcattagatcatgttaatggtaatggtgacagcgccgccgtgaacgcctccgtggacggtggttctggtggtggttgtgagaatgagaataatgggagtaatgttgctgcttgtggtactactaatgggtcttcttcttcttcttga

SEQ ID NO: 25459 - protein, 333 aa, Medicago truncatula
MMEVITATATTTNTNTNTTSNSTNTTTSLTTNLTKEQQPESENPTRIHQPILSNITKPLSFSNGVLKRHHPNHHNNNNNNVNNLNNVVVTYKECLKNHVATLGGHALDGCCEFMPSPTATSDDPASIKCAACGCHRNFHRREPEEPISTVFEYQPHHRHHPPPPPLFQSRSPSSPSPPPISSYPSAPHMLLALSGAGVGLSIPPENTAAPLNHLSSPMGTSRKRFRTKFTQEQKEKMHEFADKVGWKMQKRDEEMVNGFCNEVGVDRSVLKVWMHNNKNTLGRKLSLDHVNGNGDSAAVNASVDGGSGGGCENENNGSNVAACGTTNGSSSSS

SEQ ID NO: 25460 - DNA, 876 bp, Solanum demissum
  CDS (1)..(876)
atggagttaacttgtagtactaaccccacccccacctccaccaaaaccccagattcagaagttgataccccacctttaattaagcctttatctttcagcaacggcaataatcgccacaatcatcaccaccaaccgccgccgtgcacggcggtgatctacaaagaatgtttgaagaatcatgcagcaagtttaggcggacacgccgtagacggttgcggtgagtttatgctttcgccggaatccaccccatcagatcccatttcactaaaatgcgccgcgtgtggttgccaccgcaacttccaccgccgtgaaccgtcggacgattcatcaccgccggcccacttcatcgatttccgccaccatatgttcccccaaattaagcgattttctccatcgccgtcaccatctccgtccctttctccgccgccgctgccgtcactgttccagccccaacccgttactcctacaggtttaaaatcagagaacccaaatggtagaaagcgatttaggaccaaatttacagcagaacagaaagagaaaatgcattcgttttcggagaaattgggttggaaattgcagaaatgtgatgaaactgctgttgatgaattttgcaatgaaattggagttggaaaaagtgttcttagagtttggatgcacaataacaaaaacactattggtaaaaaggattaccaaatttcgaataacagtagtagagatcatagtttcgagaacaaaaatggattcaatatcaatggcaccgcaagcagcaatgaagaagaagatcatcacaaaagtaacaacaatgataatagtactactagtaattgtgagcttcatcttcatatttccactaatgggtcttcttcttcatcctaa

SEQ ID NO: 25461 - protein, 291 aa, Solanum demissum
MELTCSTNPTPTSTKTPDSEVDTPPLIKPLSFSNGNNRHNHHHQPPPCTAVIYKECLKNHAASLGGHAVDGCGEFMLSPESTPSDPISLKCAACGCHRNFHRREPSDDSSPPAHFIDFRHHMFPQIKRFSPSPSPSPSLSPPPLPSLFQPQPVTPTGLKSENPNGRKRFRTKFTAEQKEKMHSFSEKLGWKLQKCDETAVDEFCNEIGVGKSVLRVWMHNNKNTIGKKDYQISNNSSRDHSFENKNGFNINGTASSNEEEDHHKSNNNDNSTTSNCELHLHISTNGSSSSS

SEQ ID NO: 25462 - DNA, 1080 bp, Oryza sativa subsp
  CDS (1)..(1080)
atggaggccgtcgtcggcgtcaagtacaggccggtggtgttccccaacggcggcgcggcggcggctgcggcggggaagagcaaggcgacgccggcgtcggcgacggcggcggtgtacagggagtgcttgaagaatcacgcggcgagcttgggcgggcacgcggtggatgggtgcggggagttcatgccgtcgccggcggcggatgccgctgatccggcgtcgctcaagtgcgccgcgtgtgggtgccaccgcaacttccaccgccggctccccgaggcgccgccctccccgcctctcctcgcgctgcctccgccgccgccgccaccgccaccgccaccgccgccgccgcagcctcagcagcatctgccgcggaccgcggcggtggcggtggcgccgcagctgctgctgcatgggagccaccagcgtcgcgagcagtcgccggagaccgaccgcgtgcgcgggcccgggcaccaccacgacgacgacgccgccgccgacgatgatgattccgaggactccgagatgtccgactacgacgacgaccgctccgcctcgccgctgcaggcgccgccaccggtgctctctccggggtacctcccctccgcgacgcacatgctgctgtcgcttggctccgcgtccgccccggccgtggcggcgtcgaggccccacgccgccgccgccgccatggggcccccgcctccgccgggcgccgcgacgtcggcgtcgaggaagcggttccggaccaagttcagcccggagcagaagcagcggatgcaggcgctgtcggagcggctcgggtggcgcctccagaagcgcgacgaggccgtcgtcgacgagtgctgccgcgagatcggcgtcggcaagggcgtcttcaaggtctggatgcacaacaacaagcacaacttcctcggcggccacagcgcccgccgctccgccgccgccgccgccgccgcgccactcgccccaccaccagtgctcactgacttcagcatcaacggctcatccacgcatgccgccgccgccgaccacgccgcggcaacggcgagtggcggcggcggcggctcgccgcagtcgacttaa

SEQ ID NO: 25463 - protein, 359 aa, Oryza sativa subsp
MEAVVGVKYRPVVFPNGGAAAAAAGKSKATPASATAAVYRECLKNHAASLGGHAVDGCGEFMPSPAADAADPASLKCAACGCHRNFHRRLPEAPPSPPLLALPPPPPPPPPPPPPPQPQQHLPRTAAVAVAPQLLLHGSHQRREQSPETDRVRGPGHHHDDDAAADDDDSEDSEMSDYDDDRSASPLQAPPPVLSPGYLPSATHMLLSLGSASAPAVAASRPHAAAAAMGPPPPPGAATSASRKRFRTKFSPEQKQRMQALSERLGWRLQKRDEAVVDECCREIGVGKGVFKVWMHNNKHNFLGGHSARRSAAAAAAAPLAPPPVLTDFSINGSSTHAAAADHAAATASGGGGGSPQST

SEQ ID NO: 25464 - DNA, 1002 bp, Arabidopsis thaliana
  CDS (1)..(1002)
  misc_feature (368)..(368): b is g, c or t
  misc_feature (688)..(688): s is g or c
atggatatgactcctacaataacaacaacaacaacaccaactcctaaatcacccgaacccgaatccgaaactccgacccggatccaaccggcgaaacccatttcctttagcaacggcatcatcaaacgccaccaccaccaccaccatcctctcctctttacttacaaagaatgtctcaaaaaccacgcggcggctttaggtggtcacgctctcgacggttgcggcgaattcatgccgtctccgtcgtcaatctcctccgatccaacttctctcaaatgtgctgcttgtggctgccaccgtaatttccaccgccgtgatccagataacaacaacgactcttcccaaatccctcctcctccttccactgbcgtagagaatcaacctcaccaccgtcatcatccaccaccaccaccacctcctccaccaccacgtagtcctaactcagcttctcctccaccaatctcttcctcttacatgctcttatctctctccggtactaataacaacaacaacaacttagcttctttctccgatcttaacttctccgccggaaacaaccaccaccaccaccaccaacatactcttcacggatctcgtaaaagattccgaacaaaattcagccagtttcagaaagagaagatgcatgaattcgccgaacgtgttggttggaagatgcaaaaacgtgacsaagacgatgttcgtgatttttgccggcagatcggagttgataaaagtgttctcaaagtttggatgcataacaacaaaaacacctttaaccgccgtgatatcgccggaaacgagatccggcaaatcgataacggcggaggaaaccacactccgattctcgccggcgagattaataaccataacaatggacaccacggtgtcggaggaggaggagagcttcaccagagtgttagtagcggcggtggtggcggaggatttgatagtgatagcggcggagctaacggtggtaacgttaacggatcatcgtcgtcgtga

SEQ ID NO: 25465 - protein, 333 aa, Arabidopsis thaliana
  misc_feature (123)..(123): The Xaa at location 123 stands for Ala, Gly, or Val.
MDMTPTITTTTTPTPKSPEPESETPTRIQPAKPISFSNGIIKRHHHHHHPLLFTYKECLKNHAAALGGHALDGCGEFMPSPSSISSDPTSLKCAACGCHRNFHRRDPDNNNDSSQIPPPPSTXVENQPHHRHHPPPPPPPPPPRSPNSASPPPISSSYMLLSLSGTNNNNNNLASFSDLNFSAGNNHHHHHQHTLHGSRKRFRTKFSQFQKEKMHEFAERVGWKMQKRDZDDVRDFCRQIGVDKSVLKVWMHNNKNTFNRRDIAGNEIRQIDNGGGNHTPILAGEINNHNNGHHGVGGGGELHQSVSSGGGGGGFDSDSGGANGGNVNGSSSS

SEQ ID NO: 25466 - DNA, 933 bp, Arabidopsis thaliana
  CDS (1)..(933)
  misc_feature (920)..(920): y is t or c
atggagattgcaagtcaagaagatcctattccaataaacactagttatggtaatagtggaggtgggcatgggaacatgaaccatcatcatcatgccaattctgcaccatcatctctcaacattactacttcaaacccactactagtctcctcaaatagtaatggtcttggtaaaaatcatgatcattctcatcatcatcatgtgggttacaacatcatggttaccaacatcaagaaagagaagcctgtggtgataaagtacaaggaatgcctaaagaaccatgcagctaccatgggaggcaatgccattgatggttgtggagagtttatgccaagtggtgaagaaggttccattgaagctctcacttgctcagtttgcaactgccatagaaactttcatagaagagaaaccgaaggtgaagagaaaacattcttttccccttacctcaaccaccaccaaccacctccgcagcagagaaaactcatgttccaccacaagatgatcaaatcaccattaccacaacaaatgataatgcctattggcgttacaaccgctggatccaactcagagtcagaggatcttatggaggaagaaggcggaggaagcttgacattccggcagccaccaccaccaccatcaccgtatagttacggacataatcagaagaaaaggtttaggacaaagtttacacaagagcaaaaggagaagatgattagttttgcggaaagagttggttggaagattcagagacaagaggaatctgttgttcaacagctttgtcaagagattggaattaggagaagagttcttaaagtttggatgcacaacaacaaacaaaatctctccaagaagagcaacaacgttagtaacaatgtcgacctttctgctggtaataacgacattactgaaaatcttgcttytactaatccttag

SEQ ID NO: 25467 - protein, 310 aa, Arabidopsis thaliana
  misc_feature (307)..(307): The Xaa at location 307 stands for Phe, or Ser.
MEIASQEDPIPINTSYGNSGGGHGNMNHHHHANSAPSSLNITTSNPLLVSSNSNGLGKNHDHSHHHHVGYNIMVTNIKKEKPVVIKYKECLKNHAATMGGNAIDGCGEFMPSGEEGSIEALTCSVCNCHRNFHRRETEGEEKTFFSPYLNHHQPPPQQRKLMFHHKMIKSPLPQQMIMPIGVTTAGSNSESEDLMEEEGGGSLTFRQPPPPPSPYSYGHNQKKRFRTKFTQEQKEKMISFAERVGWKIQRQEESVVQQLCQEIGIRRRVLKVWMHNNKQNLSKKSNNVSNNVDLSAGNNDITENLAXTNP

SEQ ID NO: 25468 - DNA, 1320 bp, Flaveria bidentis
  CDS (68)..(1087)
ctctaacccctttcttccttccatttccatatatggaccactaaccatttccccttaattattattcatggacataccatcaccaccaccaacaaccaccaccaccaccatcaccaccgccaccgccaccagccccgtcaaagatcttgacccagatgcccggatccaacccaatcaacacctcccaccgccgttcaccaacggcgtcctcaagcggctgaagccccgccaccaccagcagcagcagcagcagcagccggtggtggtgagttaccgagagtgtttaaagaaccacgccgcggccatgggcggacatgcggtggatggatgcggtgagtttatgccgtcgccgtcgtcaagtccgaccgacccgacgtcgttaaaatgtgcagcctgcggttgccaccgtaacttccaccgccgtgaccccgacggaccgtttccggccaacccaccggtgcaacacgtgatagaatacaaacctcaccaccgccaccaccctccaccaccgccaccgctaccaattcccctcgccggagttagagaaaacagcgtcagtccggcggattccccatctccaccgccgatctcctcctcctactacccatcagccccacacatgctcttagctctcagctccggcctaccggcaccaccgtcggaaaacgcccaattctccccaattccgatctccggcggcgtaatcgggtcaaactccgccggaaaaaaacgattccgaacgaaattcactcaagatcagaaggagaaaatgcacgagttagcagaacgagttgggtggaagatgcagaagaaagatgaagacttgattatcggattctgcaacgaaatcggagttgataaaggggttttcaaggtgtggatgcataacaacaagatgacgtttggaggtaagaaagattccgacaaccacctagccggaaatgggtcctccggtggtggtcttgatttcttcaacagaaacaaccaccagcaacagcagcagcaacaaccgcagaacaacgacagcgttacgagtggtggtggtgggaatgctatcggaactaatggttcatcatcgtcgtcttaaactcttgattaatcttgattattattatggataataagcctttatttaaatagagatagcaagagagaagaagaatatgaggctgttgtttgttttttcgttttagttaattatatattagaagctttttgttgattaaataattagttaatctttgtttaatccaaatgtggaaagatgtagttgtagtactgctagattttcatgcaataatactatgtttagaaactctc

SEQ ID NO: 25469 - protein, 339 aa, Flaveria bidentis
MDIPSPPPTTTTTTITTATATSPVKDLDPDARIQPNQHLPPPFTNGVLKRLKPRHHQQQQQQQPVVVSYRECLKNHAAAMGGHAVDGCGEFMPSPSSSPTDPTSLKCAACGCHRNFHRRDPDGPFPANPPVQHVIEYKPHHRHHPPPPPPLPIPLAGVRENSVSPADSPSPPPISSSYYPSAPHMLLALSSGLPAPPSENAQFSPIPISGGVIGSNSAGKKRFRTKFTQDQKEKMHELAERVGWKMQKKDEDLIIGFCNEIGVDKGVFKVWMHNNKMTFGGKKDSDNHLAGNGSSGGGLDFFNRNNHQQQQQQQPQNNDSVTSGGGGNAIGTNGSSSSS

SEQ ID NO: 25470 - DNA, 1131 bp, Oryza sativa subsp
  CDS (1)..(1131)
atgcccgcaaactccgtccccgtctaccatctagacgtcgacaaaaccatgtgctcctccgtccctgtcgaaggtgcaatgtccctcgctggcaaccgcggcgggagtgagctcagggatgatggtcaagccttgagacgacggccgacgagctcggagacgaagacaaagacggacgacgcggacaagcaaacggaatggcacgaaatgaagaatttcgcgtgtctggtggtagattttgaaagtccaatggcgtgggaggtgtcggccgcgcagcgtgtcaaggactcatcaaagactagccgtgtgatgaagtcagaggatcccggatccagcaagcgagcgatgccatttccgagccaaaccccgaccggaaacagtgttcccccaaagccccactcactcatcactctccccaggacgccaccctcctcctcctcctcccccgccgcctccgcctccgcggggaacggcgccggcgcggcggaggtgaggtaccacgagtgcctgcgcaaccacgccgcggcgatgggcggccacgtcgtggacggatgcagggagttcatgccgatgccgggggacgccgccgacgccctcaagtgcgccgcctgcggctgccaccgcagcttccaccgcaaggacgacgggcagcagcagcagcagctgcgcctgctcatcccgtccccgcccacgccgcgcgtcccgctgctcatgccgccgccgcagccgcagccgcacccgcacccgcaacacccctacctgcacccgccgttcccgtaccaccacaccccaagcggcagcggcggcacgacgaccgagtcgtccagcgaggagcgggggcctccctcctcgtcggcggcggcggcgcaggggcggcggaagcggttccggaccaagttcacgccggagcagaaggagcagatgctggcgttcgcggagcgggtggggtggcggatgcagaagcaggacgaggcactcgtcgaacagttctgcgcgcaggtcggcgtgcggcgccaggtgttcaaggtgtggatgcacaacaacaagagcagcatcggcagcagcagcggcggcggcagtaggaggcagccgcaggagcaacagtcacaacagcagcagcagcagcagtag

SEQ ID NO: 25471 - protein, 376 aa, Oryza sativa subsp
MPANSVPVYHLDVDKTMCSSVPVEGAMSLAGNRGGSELRDDGQALRRRPTSSETKTKTDDADKQTEWHEMKNFACLVVDFESPMAWEVSAAQRVKDSSKTSRVMKSEDPGSSKRAMPFPSQTPTGNSVPPKPHSLITLPRTPPSSSSSPAASASAGNGAGAAEVRYHECLRNHAAAMGGHVVDGCREFMPMPGDAADALKCAACGCHRSFHRKDDGQQQQQLRLLIPSPPTPRVPLLMPPPQPQPHPHPQHPYLHPPFPYHHTPSGSGGTTTESSSEERGPPSSSAAAAQGRRKRFRTKFTPEQKEQMLAFAERVGWRMQKQDEALVEQFCAQVGVRRQVFKVWMHNNKSSIGSSSGGGSRRQPQEQQSQQQQQQQ

SEQ ID NO: 25472 - DNA, 855 bp, Oryza sativa
  CDS (1)..(855)
atgatggatcacctgagcctggtgccctacgagggcggcagcgccggcgggggaggaggtggagggaagtacaaggagtgcatgcggaaccacgcggcggcgatgggcgggcaggcgttcgacgggtgcggggagtacatgccggcgtcgcccgactcgctcaagtgcgccgcgtgcggctgccaccgcagcttccaccgccgcgccgccgcgggcatcggcggcgggccggtgttcttccgcccgccgccaccgccgcagccgcactcgcaccacgccgcgctgcagggcttcctcccgtcgtccgtgccggcgccggcgccgccgccgcagctcgcgctgccgtaccacgccgtgcccgccgcggcgtggcaccacgcggcggcggcggcggcaggccgcgccggctcggagacgcccccgcggatggacgacttcggccccggcagcgccggcgggagcgggagcggcggcggcggcatcttcgggcggaagcggttccggaccaagttcacgccggagcagaaggagcggatgcgggagttcgccgagaagcaagggtggcgcatcaaccgcaacgacgacggcgccctggaccgcttctgcgtcgagatcggcgtcaagcgccacgtcctcaaggtctggatgcacaaccacaagaaccagctcgcctcctccccgacctccgccgccgccgccgccgccggcgtcatgaaccccggcgccggcatcggcctcggcaccggcctcggcaccggcatcagcggcgacggcgacggcgacgacgacgacaccgacgactccccgccccgcgccgccgtgtcctccccctccccttcaccgatcagcgtctag

SEQ ID NO: 25473 - protein, 284 aa, Oryza sativa
MMDHLSLVPYEGGSAGGGGGGGKYKECMRNHAAAMGGQAFDGCGEYMPASPDSLKCAACGCHRSFHRRAAAGIGGGPVFFRPPPPPQPHSHHAALQGFLPSSVPAPAPPPQLALPYHAVPAAAWHHAAAAAAGRAGSETPPRMDDFGPGSAGGSGSGGGGIFGRKRFRTKFTPEQKERMREFAEKQGWRINRNDDGALDRFCVEIGVKRHVLKVWMHNHKNQLASSPTSAAAAAAGVMNPGAGIGLGTGLGTGISGDGDGDDDDTDDSPPRAAVSSPSPSPISV

SEQ ID NO: 25474 - DNA, 999 bp, Oryza sativa
  CDS (1)..(999)
atggaggccgtcgtcggcgtcaagtacaggccggtggtgttccccaacggcggcgcggcggcggctgcggcggggaagagcaaggcgacgccggcgtcggcgacggcggcggtgtacagggagtgcttgaagaatcacgcggcgagcttgggcgggcacgcggtggatgggtgcggggagttcatgccgtcgccggcggcggatgccgctgatccggcgtcgctcaagtgcgccgcgtgtgggtgccaccgcaacttccaccgccggctccccgaggcgccgccctccccgcctctcctcgcgctgcctccgccgccgccgccaccgccaccgccaccgccgccgccgcagcctcagcagcatctgccgcggaccgcggcggtggcggtggcgccgcagctgctgctgcatgggagccaccagcgtcgcgagcagtcgccggagaccgaccgcgtgcgcgggcccgggcaccaccacgacgacgacgccgccgccgacgatgatgattccgaggactccgagatgtccgactacgacgacgaccgctccgcctcgccgctgcaggcgccgccaccggtgctctctccggggtacctcccctccgcgacgcacatgctgctgtcgcttggctccgcgtccgccccggccgtggcggcgtcgaggccccacgccgccgccgccgccatggggcccccgcctccgccgggcgccgcgacgtcggcgtcgaggaagcggttccggaccaagttcagcccggagcagaagcagcggatgcaggcgctgtcggagcggctcgggtggcgcctccagaagcgcgacgaggccgtcgtcgacgagtgctgccgcgagatcggcgtcggcaagggcgtcttcaagggacaattagtactaccactaagtacagtgattactagctttgttcttgagctaatctgggtgtgcatggataatgatgatgatgatgtgctaatcggagtcctaggtggggtagtgttctag

SEQ ID NO: 25475 - protein, 332 aa, Oryza sativa
MEAVVGVKYRPVVFPNGGAAAAAAGKSKATPASATAAVYRECLKNHAASLGGHAVDGCGEFMPSPAADAADPASLKCAACGCHRNFHRRLPEAPPSPPLLALPPPPPPPPPPPPPPQPQQHLPRTAAVAVAPQLLLHGSHQRREQSPETDRVRGPGHHHDDDAAADDDDSEDSEMSDYDDDRSASPLQAPPPVLSPGYLPSATHMLLSLGSASAPAVAASRPHAAAAAMGPPPPPGAATSASRKRFRTKFSPEQKQRMQALSERLGWRLQKRDEAVVDECCREIGVGKGVFKGQLVLPLSTVITSFVLELIWVCMDNDDDDVLIGVLGGVVF

SEQ ID NO: 25476 - DNA, 1026 bp, Oryza sativa
  CDS (1)..(1026)
atggaggccatggacgtcaagtacaagccgctcgtgttccccaacggcgccatcaagaaggcggcgaagccggcggcggtggcgcctgcggtgggcggcggcggagggggagagacggtgtaccgggagtgcctcaagaaccacgcggcgagcctgggcgggcacgcgctggacgggtgcggggagttcatgccgtcgccggcggcgaaccccgccgacccgacgtcgctcaggtgcgccgcgtgcggctgccaccgcaacttccaccgccggctgccggaggggtcccccccgccgccgccgccgccggcgctgctgcccgcgccgcccatgccgccgcaccgcggggaggagacgcccgaggtccgcctccccggggtggatggcgacgagtccgactccgactcggacgggtcggagtacgacgacgagcggtccgtgtccccgccgccgccgccgctggcggcggcggtggcgcaccaggtgtactacccttcggcgccgcacatgctgctgtcgctggggtcgagcgggcaggcgcagaggctcccgccgcaggtgatgtcgccggcggcggcggccgcgcctccccccggcggcggcggcggcgggatgccgaggaagcggttccgcaccaagttcaccgccgagcagaagcagcggatgcaggagctctcggagcggctcgggtggcgcctccagaagcgcgacgaggccatcgtcgacgagtggtgccgcgacatcggcgtcggcaagggcgtcttcaaggtctggatgcacaacaacaagcacaactacctcggcggccacagcgcccgccgcagcgcctcctcctcctccgccgccgccgccgccgccccgccattcaaccctcccacctcacctcctcctcctcctcctcctcctccacacgccaccgacttcaacatcaacggaacagccaccgccgccaccgccgccgccgccgccaccatcgccgccggcaaccaccaagagaacggagcatcgtcgccgcaatcagcataa

SEQ ID NO: 25477 - protein, 341 aa, Oryza sativa
MEAMDVKYKPLVFPNGAIKKAAKPAAVAPAVGGGGGGETVYRECLKNHAASLGGHALDGCGEFMPSPAANPADPTSLRCAACGCHRNFHRRLPEGSPPPPPPPALLPAPPMPPHRGEETPEVRLPGVDGDESDSDSDGSEYDDERSVSPPPPPLAAAVAHQVYYPSAPHMLLSLGSSGQAQRLPPQVMSPAAAAAPPPGGGGGGMPRKRFRTKFTAEQKQRMQELSERLGWRLQKRDEAIVDEWCRDIGVGKGVFKVWMHNNKHNYLGGHSARRSASSSSAAAAAAPPFNPPTSPPPPPPPPPHATDFNINGTATAATAAAAATIAAGNHQENGASSPQSA

SEQ ID NO: 25478 - DNA, 879 bp, Brassica napus
  CDS (1)..(879)
atggatatgagaagccatgaaatgatagagagaagaagagaagacaatggcaacaatggtgttggtaacatcaatagcattattacaagagaagataatggcaacaagactcgtgtctcttgcaactctcaaaccatagatccccaccaatcgaagtctccgtcttctttttccatctccaccgtacggtaccgagagtgtctgaagaaccacgcggcgagcgtcggtggaagtgtatacgacggttgcggcgagttcatgccgagtggtgaggaaggaacattagaagctcttagatgcgctgcttgtcactgccaccgtaatttccaccggaaagaaaacgacggtgtcggaagctcagatggaagctctcatcaccgtcatcatcaccaccatcaccagtacggtggagggagaagaccaccgccgagaaacatgatgcttaacccactcatgcttcctcccccgccgagttacgcgccgttgcaccaccacaagtacggaatgagtcctcctggtggaggagggatggtgacgccgatgagcgtttaccgcggcgtcggaggagctgagtcgtctagtgaagatctgaatatgtatggacaatcaagcggagagcatgcaggaggtgctacgccgggacaaacggcgttttcgatgaaacggttcaggacgaagttcacggcggagcagaaggagaagatgatggagtttgcggagaagctagggtggaggatgaacaagcaagacgaagaagagctcaggagattctgtagtgagatcggagttaagagacaggtcttcaaagtctggatgcataacaacaagaacactgccaggaaaccaccaccaacatcaacagcatcaagagctctctaa

SEQ ID NO: 25479 - protein, 292 aa, Brassica napus
MDMRSHEMIERRREDNGNNGVGNINSIITREDNGNKTRVSCNSQTIDPHQSKSPSSFSISTVRYRECLKNHAASVGGSVYDGCGEFMPSGEEGTLEALRCAACHCHRNFHRKENDGVGSSDGSSHHRHHHHHHQYGGGRRPPPRNMMLNPLMLPPPPSYAPLHHHKYGMSPPGGGGMVTPMSVYRGVGGAESSSEDLNMYGQSSGEHAGGATPGQTAFSMKRFRTKFTAEQKEKMMEFAEKLGWRMNKQDEEELRRFCSEIGVKRQVFKVWMHNNKNTARKPPPTSTASRAL

SEQ ID NO: 25480 - DNA, 879 bp, Brassica napus
  CDS (1)..(879)
atggatatgagaagccatgaaatgatagagagaagaagagatgacaatggcaacaatggtgttggtaacatcaatagcattattacaagagaagataatggcaacaagactcgtgtctcttgcaactctcaaaccatagatccccaccaatcgaagtctccgtcttctttttccatctccaccgtacggtaccgagagtgtctgaagaaccacgcggcgagcgtcggtggaagtgtatacgacggttgcggcgagttcatgccgagtggtgaggaaggaacattagaagctcttagatgcgctgcttgtcactgccaccgtaatttccaccggaaagaaaacgacggtgtcggaagctcagatggaagctctcatcaccgtcatcatcaccaccatcaccagtacggtggagggagaagaccaccgccgagaaacatgatgcttaacccactcatgcttcctcccccgccgagttacgcgccgttgcaccaccacaagtacggaatgagtcctcctggtggaggagggatggtgacgccgatgagcgtttaccgcggcgtcggaggagctgagtcgtctagtgaagatctgaatatgtatggacaatcaagcggagagcatgcaggaggtgctacgccgggacaaacggcgttttcgatgaaacggttcaggacgaagttcacggcggagcagaaggagaagatgatggagtttgcggagaagctagggtggaggatgaacaagcaagacgaagaagagctcaggagattctgtagtgagatcggagttaagagacaggtcttcaaagtctggatgcataacaacaagaacactgccaggaaaccaccaccaacatcaacagcatcaagagctctctaa

SEQ ID NO: 25481 - protein, 292 aa, Brassica napus
MDMRSHEMIERRRDDNGNNGVGNINSIITREDNGNKTRVSCNSQTIDPHQSKSPSSFSISTVRYRECLKNHAASVGGSVYDGCGEFMPSGEEGTLEALRCAACHCHRNFHRKENDGVGSSDGSSHHRHHHHHHQYGGGRRPPPRNMMLNPLMLPPPPSYAPLHHHKYGMSPPGGGGMVTPMSVYRGVGGAESSSEDLNMYGQSSGEHAGGATPGQTAFSMKRFRTKFTAEQKEKMMEFAEKLGWRMNKQDEEELRRFCSEIGVKRQVFKVWMHNNKNTARKPPPTSTASRAL

SEQ ID NO: 25482 - DNA, 1008 bp, Glycine max
  CDS (1)..(1008)
atggcaatgagagggcaacaagataaggaaatagagataccaaccacaaccactttaggttacaaccttcccaaccgagattcttcttcttcctcttccaagctctcttctccaactgttggtgaaagaagtagcagtgatcatgatcaacagcatcatcaaccaactcatcaaactcgcacattaatcttcaacgaaacacctcaccataatctctatccaccaccaccacctcctactcctgctcttgcacctcatcaacccacgtcagatccagatctaagcaccccaattgctcccacatcgaatccctcaagaacagcggcgcctcaaacgacaacaacaacaacctcgacgccgtcgatcaggtaccgagaatgtcttcggaaccacgcggcgagcatggggagccacgtggtggatggctgcggcgagttcatggcaagtggggaaggcacgccagaatcactaagatgcgcagcatgcgagtgccaccgcaacttccacagaaaagaagttgaaggagaattacgaccgcaaccacaaccacaaccgcaaacacatgttccaaattaccacagctactacaccaacaagcacaacggtcaccttcactaccctacaccctcttcatcttccctccatcatagattggttacaccaacaagcttggtctccccagtgatgatggcctttgggggcccagctgagtcatcaagtgaagatctcaacatgtttcagtccaacactggaggagcacagttaatatcagtgcagcagcatgcaccactactctcttccagcaagaagaggttcaggactaagttctctcagcaccagaaggataggatgatggagtttgctgacaagattgattggaagatccacaaacacaatgagcaggaggtacagcagttttgttctcaagtgggtgtcaagagacaggtttttaaggtttggatgcacaataacaagcaaacaactagtagtaagaagcagcaaatgtaa

SEQ ID NO: 25483 - protein, 335 aa, Glycine max
MAMRGQQDKEIEIPTTTTLGYNLPNRDSSSSSSKLSSPTVGERSSSDHDQQHHQPTHQTRTLIFNETPHHNLYPPPPPPTPALAPHQPTSDPDLSTPIAPTSNPSRTAAPQTTTTTTSTPSIRYRECLRNHAASMGSHVVDGCGEFMASGEGTPESLRCAACECHRNFHRKEVEGELRPQPQPQPQTHVPNYHSYYTNKHNGHLHYPTPSSSSLHHRLVTPTSLVSPVMMAFGGPAESSSEDLNMFQSNTGGAQLISVQQHAPLLSSSKKRFRTKFSQHQKDRMMEFADKIDWKIHKHNEQEVQQFCSQVGVKRQVFKVWMHNNKQTTSSKKQQM

SEQ ID NO: 25484 - DNA, 1026 bp, Glycine max
  CDS (1)..(1026)
atggagataataacaccagtaccagcaacagcaacaacaacagccaaaaacgcaaccgcgaaatcgccagaacccgacgtagagacgccgacccggatccaccaaaacccgaacctgaatccaaagccggtgtctttctccaacggcgtcttgaagcgccaccatgcaaaccaccgccccaacgcggtggtttacaaggaatgcttgaagaaccacgtggcgagcttgggtggccacgctttggacggctgcggcgagttcatgccgtcgccggcggccaccgccgacgaccccagctccatcaaatgcgccgcctgcggctgccaccggaacttccaccgccgcgaaccggaggagacacccatttctccggcgacgcaccatgttctagagtaccagccccaccaccgccatcaccctcctccgccggccccgtcgcaccggagtccgaactccgcctccccgccgccgatctcctcctacccctccgccccccacatgctcctcgccctctccggcggcggtggcttctccgtcgcgcgggaaaacaccggcgcgccggcgccggcgcacaaccactcgcgtaaacgcttccgaacgaagttcacccaagaacaaaaggagaagatgcacgagttcgcggacaaagttggttggaagatgcagaggcgcgacgaggaaatggttatggagttctgcaacgagattggtgtcgacagaggagttctcaaagtgtggatgcacaacaacaagaacactttcgcgaaaaaagacaaccttaacggcaacagtatcggtaacgttgccattgtcagtgccaacggagttgctcccattggcgccgttggcagcgctaccgttagaagcagcgttcatgtccacgaacatgaacacggaggaattaacggtaacggtagcggcgacaacaaccacaaccccctcggttcccgggatgtgaacgagtacgagaatgatagtgggactaacggcggcggcggtactaatgggtcttcttcttcttcttga

SEQ ID NO: 25485 - protein, 341 aa, Glycine max
MEIITPVPATATTTAKNATAKSPEPDVETPTRIHQNPNLNPKPVSFSNGVLKRHHANHRPNAVVYKECLKNHVASLGGHALDGCGEFMPSPAATADDPSSIKCAACGCHRNFHRREPEETPISPATHHVLEYQPHHRHHPPPPAPSHRSPNSASPPPISSYPSAPHMLLALSGGGGFSVARENTGAPAPAHNHSRKRFRTKFTQEQKEKMHEFADKVGWKMQRRDEEMVMEFCNEIGVDRGVLKVWMHNNKNTFAKKDNLNGNSIGNVAIVSANGVAPIGAVGSATVRSSVHVHEHEHGGINGNGSGDNNHNPLGSRDVNEYENDSGTNGGGGTNGSSSSS

SEQ ID NO: 25486 - DNA, 1020 bp, Glycine max
  CDS (1)..(1020)
atggacataaccccaacaacaacgatcatcaacaccaccaccactcccagtgcagcaaaatccccggaacatgaaacagaaacaccgaccaggatcaccacccccatcactcccacaacgacaaaaaccttatctttctcgaatggtgtcctcaaacgccaccaccaccaccaccttcaccaccctatgcctgcggtggttacctacaaagaatgcctcaaaaatcacgccgccaacttgggtggccacgccttagatggctgcggcgagttcatgccctctccgaccgccaccgctgccgaccccagctccataaaatgcgccgcctgcggctgccaccgcaacttccaccgccgcgagccggaggacccccccatcacctccaacaccacgcacgtcatcgagtaccagccccaccaccgccaccaccctcccccgccgcttcacgcggcggcggcagcaacccgcagccccaattccgcttccccgccgccgatctcctcctcttactacccctccgcgccgcacatgctcctcgccctctccgccggactagcggctccgccggagagcaccgcagcgccttccgccgcgctcaccagaaagcggttccgaacgaagttcagtcaggagcagaaggagaagatgcacaagttcgcggagaaagtggggtggaagattcagaagcgggacgaggatttgattcacgagttctgcaacgaggttggggtcgatagaagcgttctcaaggtttggatgcataacaacaaaaacaccttcgccaaaaaagataacaatattgttattagtaatgatattaatattactactagtaataatattaataccagtattattgatgataatgatgcaaatgggggtgatgtcaaggtttttgaaaaccctaacaacaaccatggtagtggtagtggtggtggtgaagatcctgctgaagatccgagtcgtaatcactatggtggggtgaatgttggtgctaacgggtcttcttctagttcttga

SEQ ID NO: 25487 - protein, 339 aa, Glycine max
MDITPTTTIINTTTTPSAAKSPEHETETPTRITTPITPTTTKTLSFSNGVLKRHHHHHLHHPMPAVVTYKECLKNHAANLGGHALDGCGEFMPSPTATAADPSSIKCAACGCHRNFHRREPEDPPITSNTTHVIEYQPHHRHHPPPPLHAAAAATRSPNSASPPPISSSYYPSAPHMLLALSAGLAAPPESTAAPSAALTRKRFRTKFSQEQKEKMHKFAEKVGWKIQKRDEDLIHEFCNEVGVDRSVLKVWMHNNKNTFAKKDNNIVISNDINITTSNNINTSIIDDNDANGGDVKVFENPNNNHGSGSGGGEDPAEDPSRNHYGGVNVGANGSSSSS

SEQ ID NO: 25488 - DNA, 792 bp, Brassica napus
  CDS (1)..(792)
atggatgtaatagctacttcagctactatagtatcccacctggattcgcagcaacccatgacccaagctccgacccggatacagcccgcgaagcctatttctttctccaacgggaaacatcaccacgaccaccaacatcatgcgtctcaagtggtggttgctgcttataaagagtgtctcaagaaccacgccgctggaatcggcggtcacgctttagacggttgcggcgagtttataccgtcgccgacgtttaacaccagcgacccgacttcactaacatgcgacgcctgcggttgccaccgtaactttcaccgccgcgaagacgatctatctgctgtttcagctgctgtcccgaggatagagtttcgtcctcataaccgtcaccagcttcctccgccgccgctacctccggtgggagttggcagccaagacgacgatgatcctgcttctcctccgccgatctcgtcttcttatatgcttcttgcactctccggaagagccacggcggctccggtgtcgaggaagcgttttaggacgaagtttagtgagtttcagaaggggaagatgttcgagttcgcggagagagtcgggtggaggatgccgaaagcggatgatgtggatgtggtggagttttgtcgggagataggagttgagagaagtgttttcaaagtgtggatgcataacaacaagactccaggacgcggcggtggagctagaagaaccaacggagacggaggagtaggagacgaccgtgagaatgttccgacaaacgggtcgtttgcttcaacgtga

SEQ ID NO: 25489 - protein, 263 aa, Brassica napus
MDVIATSATIVSHLDSQQPMTQAPTRIQPAKPISFSNGKHHHDHQHHASQVVVAAYKECLKNHAAGIGGHALDGCGEFIPSPTFNTSDPTSLTCDACGCHRNFHRREDDLSAVSAAVPRIEFRPHNRHQLPPPPLPPVGVGSQDDDDPASPPPISSSYMLLALSGRATAAPVSRKRFRTKFSEFQKGKMFEFAERVGWRMPKADDVDVVEFCREIGVERSVFKVWMHNNKTPGRGGGARRTNGDGGVGDDRENVPTNGSFAST

SEQ ID NO: 25490 - DNA, 738 bp, Brassica napus
  CDS (1)..(738)
atggagcatggaggaaagtgcaatgcaattacttccacaacaataaccttaaaagcaaaaccacataccaacccggatccgaaaaccaaacccggttcagatccattcttgatcaagaaagaaaaccaaaaaccgaggacgcgttccgaccaagcagccaagtacgaggagtgtcagaagaaccacgcggccttaaccggaggacaggtggtggacggatgctgcgagttcatgcccggaggagaagagggcactccaggtgcgctaaaatgcgcagcctgcaactgccaccggagtttccaccggaaggaagtgtacggacatagaaacagtacacaagaagagctaatatctccgacgttttaccgtagtagcaactcgtacaaggcgatccatccacgtggagtgtatccgacgggtgagattggacggaggacatcatcgtcgagcgaggatatgaagaagatattgaaccaaaatagtgatggaaaaggtctgacgatgattatgaggaagaagaaaagggttaggacaaagattaacgaaggacaaaagaagaagatgaaggagtttgcacagaggctagggtggagtattcaaaagaaagatgaagaagagattgataagttttgtaggacggtgaatctgaggagacaggttttcagagtgtggatgcataataacaagcaagcaatgaagaggaatggtaacatttgtgatctgcaaaagttaaattaa

SEQ ID NO: 25491 - protein, 245 aa, Brassica napus
MEHGGKCNAITSTTITLKAKPHTNPDPKTKPGSDPFLIKKENQKPRTRSDQAAKYEECQKNHAALTGGQVVDGCCEFMPGGEEGTPGALKCAACNCHRSFHRKEVYGHRNSTQEELISPTFYRSSNSYKAIHPRGVYPTGEIGRRTSSSSEDMKKILNQNSDGKGLTMIMRKKKRVRTKINEGQKKKMKEFAQRLGWSIQKKDEEEIDKFCRTVNLRRQVFRVWMHNNKQAMKRNGNICDLQKLN

SEQ ID NO: 25492 - DNA, 20 bp, Artificial sequence
  primer
atgatggatatgactcctac

SEQ ID NO: 25493 - DNA, 24 bp, Artificial sequence
  primer
tcacgacgacgatgatccgttaac

SEQ ID NO: 25494 - protein, 261 aa, Artificial sequence
  consensus sequence
  Variant (2)..(2): Xaa in position 2 is any amino acid
  Variant (11)..(12): Xaa in position 11 to 12 is any amino acid
  Variant (15)..(15): Xaa in position 15 is any amino acid
  Variant (17)..(17): Xaa in position 17 is any amino acid
  Variant (26)..(27): Xaa in position 26 to 27 is any amino acid
  Variant (28)..(33): Xaa in position 28 to 33 is any or no amino acid
  Variant (35)..(36): Xaa in position 35 to 36 is any amino acid
  Variant (38)..(38): Xaa in position 38 is any amino acid
  Variant (43)..(43): Xaa in position 43 is any amino acid
  Variant (51)..(112): Xaa in position 51 to 112 is any amino acid
  Variant (113)..(205): Xaa in position 113 to 205 is any or no amino acid
  Variant (213)..(215): Xaa in position 213 to 215 is any amino acid
  Variant (218)..(219): Xaa in position 218 to 219 is any amino acid
  Variant (221)..(222): Xaa in position 221 to 222 is any amino acid
  Variant (224)..(224): Xaa in position 224 is any amino acid
  Variant (226)..(227): Xaa in position 226 to 227 is any amino acid
  Variant (230)..(234): Xaa in position 230 to 234 is any amino acid
  Variant (236)..(242): Xaa in position 236 to 242 is any amino acid
  Variant (244)..(246): Xaa in position 244 to 246 is any amino acid
  Variant (249)..(251): Xaa in position 249 to 251 is any amino acid
  Variant (253)..(253): Xaa in position 253 is any amino acid
YXECLKNHAAXXGGXAXDGCGEFMPXXXXXXXXPXXLXCAACXCHRNFHRXXXXXXXXXXXXXXXXXXXXXXXXXXXXXXXXXXXXXXXXXXXXXXXXXXXXXXXXXXXXXXXXXXXXXXXXXXXXXXXXXXXXXXXXXXXXXXXXXXXXXXXXXXXXXXXXXXXXXXXXXXXXXXXXXXXXXXXXXXXXXXXXXXXXXXXXXXXKRFRTKFXXXQKXXMXXFXEXXGWXXXXXDXXXXXXXCXXXGVXXXVXKVWMHNNK

SEQ ID NO: 25495 - protein, 54 aa, Artificial sequence
  protein pattern
  Variant (8)..(8): Xaa in position 8 is any amino acid
  Variant (9)..(10): Xaa in position 9 to 10 is any or no amino acid
  Variant (12)..(13): Xaa in position 12 to 13 is any or no amino acid
  Variant (15)..(15): Xaa in position 15 is Asp, Glu, Gly or Gln
  Variant (16)..(16): Xaa in position 16 is any amino acid
  Variant (18)..(19): Xaa in position 18 to 19 is any amino acid
  Variant (20)..(20): Xaa in position 20 is Phe or Leu
  Variant (21)..(21): Xaa in position 21 is Ala or Ser
  Variant (22)..(22): Xaa in position 22 is Asp or Glu
  Variant (23)..(23): Xaa in position 23 is Lys or Arg
  Variant (24)..(24): Xaa in position 24 is any amino acid
  Variant (27)..(27): Xaa in position 27 is Lys or Arg
  Variant (28)..(28): Xaa in position 28 is Ile, Leu or Met
  Variant (29)..(29): Xaa in position 29 is Asn, Pro or Gln
  Variant (30)..(30): Xaa in position 30 is Lys or Arg
  Variant (31)..(31): Xaa in position 31 is any amino acid
  Variant (32)..(32): Xaa in position 32 is Asp or Glu
  Variant (33)..(35): Xaa in position 33 to 35 is any amino acid
  Variant (36)..(36): Xaa in position 36 is Ile, Leu or Val
  Variant (37)..(39): Xaa in position 37 to 39 is any amino acid
  Variant (41)..(41): Xaa in position 41 is any amino acid
  Variant (42)..(42): Xaa in position 42 is Asp, Glu or Gln
  Variant (43)..(43): Xaa in position 43 is Ile or Val
  Variant (46)..(46): Xaa in position 46 is any amino acid
  Variant (47)..(47): Xaa in position 47 is Lys or Arg
  Variant (48)..(48): Xaa in position 48 is any amino acid
  Variant (50)..(50): Xaa in position 50 is Phe or Leu
  Variant (51)..(51): Xaa in position 51 is Lys or Arg
  Variant (52)..(52): Xaa in position 52 is Gly or Val
  Variant (53)..(53): Xaa in position 53 is any amino acid
  Variant (54)..(54): Xaa in position 54 is Leu or Met
KRFRTKFXXXQXXKXXMXXXXXXXGWXXXXXXXXXXXXXCXXXGVXXXVXXXXX

SEQ ID NO: 25496 - protein, 27 aa, Artificial sequence
  protein pattern
  Variant (2)..(2): Xaa in position 2 is Lys or Arg
  Variant (5)..(5): Xaa in position 5 is Leu or Met
  Variant (6)..(6): Xaa in position 6 is Lys or Arg
  Variant (11)..(11): Xaa in position 11 is Ala, Gly, Asn, Ser or Thr
  Variant (12)..(12): Xaa in position 12 is Ile, Leu, Met or Val
  Variant (15)..(15): Xaa in position 15 is any amino acid
  Variant (16)..(16): Xaa in position 16 is Ala or Val
  Variant (17)..(17): Xaa in position 17 is any amino acid
  Variant (23)..(24): Xaa in position 23 to 24 is any amino acid
  Variant (25)..(26): Xaa in position 25 to 26 is any or no amino acid
YXECXXNHAAXXGGXXXDGCGEXXXXP

SEQ ID NO: 25497 - protein, 17 aa, Artificial sequence
  protein pattern
  Variant (2)..(5): Xaa in position 2 to 5 is any amino acid
  Variant (7)..(7): Xaa in position 7 is Ala or Asp
  Variant (10)..(10): Xaa in position 10 is Glu, Gly or Asn
  Variant (14)..(14): Xaa in position 14 is Asn or Ser
PXXXXCXACXCHRXFHR

SEQ ID NO: 25498 - DNA, 1242 bp, Arabidopsis thaliana; identical to SEQ ID NO: 5350
  CDS (1)..(1242)

SEQ ID NO: 25499 - protein, 413 aa, Arabidopsis thaliana; identical to SEQ ID NO: 5351

SEQ ID NO: 25500 - DNA, 1619 bp, Zea mays subsp. mays
  CDS (227)..(1453)
  misc_feature (705)..(705): n is a, g, c or t
gtgcccgtttcgcctcgcgcctgcgttgctctgctatttccatttccattgcacccatttccggggtcgcctgcgttgcttcgcgtgggagcgtgattcgtttaggcctctcgccaatttcggagggcgacggcgacgtgctttcggcgggcgggcagagaaaatctagagtcttgggtttgccagacgcgcctttgtgggagacagacacttgctctcgcctccaatggccgagatctgctgcgaggaagccaagtcgacgccggcaaccgccgtggctgcggcttcagtctccgccacggccgcagcggccgcagccgtggcagtggcctcctcggcgttagagaggaggcgacgcaggctggagatgaggaggttccgcgtcgcgagcgatcccgaggagctggtcgcggatgacgtccgcgctgccaagcggcagaggctggcgcgcacgctgtccggctcctgccccgacgcgggctcggactccgacaggccggccctgcccaggtacggggtcacctccgtctgcggccgacggcgcgagatggaggacacggtctccatcaggccggacttcctgcccggcaccagcaagcacaacttcttcggcgtcttcgacggccacggctgctcccacgtagcgacgatgtgccaggacaacatgcacgaggttgtcgcggacgagcacacgaaggctgcctntggcgaggagacggcgtggaagggcgtgatggagaggagcttctcgcgattggatgagcaggccgccagctgggcgaccagccgcagccgcgacgagcctgcctgcaggtgcgagcagcagatgcccttgcgctgcgatcacgtggggtccaccgccgtggtcgccgtcgttagccccagccacgtagtcgtcgccaacgccggcgactcgcgcgccgtcctctcccgcggcggcgtccccgttccgctctccgtcgaccacaagcctgaccgacctgacgagctggctcgcatcgaggcggcgggtggccgcgtcatttactgggatggtgcccgtgttctcggcgtcctcgccatgtctcgagccataggggataggtacctaaagccgtttgtgtcgtcggagccggaggtaacggtgacggagcgcaccgacgacgacgagtgtctgatcctggccagcgacggcctgtgggacgtcgtgaccaacgagatggcgtgcgaggtcgtccgggcgtgcttccgtagcaacggtccgccggcgccggccgctcgcccgaacggcgtggccctcccggcagccggcgcgggcgccgaggacggatcggcggttgtcaagggtgtgggcaaggaggactccgacaaggcgtgctccgacgcggccatgctgctggcaaagctggcgctggcccggcggagcgccgacaatgttagcgtggtcgtcgtggatctccgccggggcatatgattctcggagcgaagcagagcagggcaaaatcatatgctccatgcttgaaactagctcttctgaaatccacgctaatttctcccccattttgaccatccttctattttgatgtagtattagtagtagatcctgatcagatgaatataatagacgcttttcttctctc

SEQ ID NO: 25501 - protein, 408 aa, Zea mays subsp. mays
  misc_feature (160)..(160): The Xaa at location 160 stands for Cys, Phe, Ser, or Tyr.
MAEICCEEAKSTPATAVAAASVSATAAAAAAVAVASSALERRRRRLEMRRFRVASDPEELVADDVRAAKRQRLARTLSGSCPDAGSDSDRPALPRYGVTSVCGRRREMEDTVSIRPDFLPGTSKHNFFGVFDGHGCSHVATMCQDNMHEVVADEHTKAAXGEETAWKGVMERSFSRLDEQAASWATSRSRDEPACRCEQQMPLRCDHVGSTAVVAVVSPSHVVVANAGDSRAVLSRGGVPVPLSVDHKPDRPDELARIEAAGGRVIYWDGARVLGVLAMSRAIGDRYLKPFVSSEPEVTVTERTDDDECLILASDGLWDVVTNEMACEVVRACFRSNGPPAPAARPNGVALPAAGAGAEDGSAVVKGVGKEDSDKACSDAAMLLAKLALARRSADNVSVVVVDLRRGI

SEQ ID NO: 25502 - DNA, 1212 bp, Oryza sativa (japonica cultivar-group); identical to SEQ ID NO: 5324
  CDS (1)..(1212)

SEQ ID NO: 25503 - protein, 403 aa, Oryza sativa (japonica cultivar-group); identical to SEQ ID NO: 5325

SEQ ID NO: 25504 - DNA, 1245 bp, Oryza sativa (japonica cultivar-group); identical to SEQ ID NO: 5326
  CDS (1)..(1245)

SEQ ID NO: 25505 - protein, 414 aa, Oryza sativa (japonica cultivar-group); identical to SEQ ID NO: 5327

SEQ ID NO: 25506 - DNA, 1215 bp, Oryza sativa (japonica cultivar-group); identical to SEQ ID NO: 826
  CDS (1)..(1215)

SEQ ID NO: 25507 - protein, 404 aa, Oryza sativa (japonica cultivar-group); identical to SEQ ID NO: 827

SEQ ID NO: 25508 - DNA, 1146 bp, Oryza sativa (japonica cultivar-group); identical to SEQ ID NO: 832
  CDS (1)..(1146)

SEQ ID NO: 25509 - protein, 381 aa, Oryza sativa (japonica cultivar-group); identical to SEQ ID NO: 833

SEQ ID NO: 25510 - DNA, 1338 bp, Oryza sativa (japonica cultivar-group); identical to SEQ ID NO: 5334
  CDS (1)..(1338)

SEQ ID NO: 25511 - protein, 445 aa, Oryza sativa (japonica cultivar-group); identical to SEQ ID NO: 5335

SEQ ID NO: 25512 - DNA, 1329 bp, Arabidopsis thaliana; identical to SEQ ID NO: 5336
  CDS (1)..(1329)

SEQ ID NO: 25513 - protein, 442 aa, Arabidopsis thaliana; identical to SEQ ID NO: 5337

SEQ ID NO: 25514 - DNA, 1536 bp, Arabidopsis thaliana; identical to SEQ ID NO: 5338
  CDS (1)..(1536)

SEQ ID NO: 25515 - protein, 511 aa, Arabidopsis thaliana; identical to SEQ ID NO: 5339

SEQ ID NO: 25516 - DNA, 1338 bp, Arabidopsis thaliana; identical to SEQ ID NO: 5340
  CDS (1)..(1338)

SEQ ID NO: 25517 - protein, 445 aa, Arabidopsis thaliana; identical to SEQ ID NO: 5341

SEQ ID NO: 25518 - DNA, 1089 bp, Arabidopsis thaliana; identical to SEQ ID NO: 5344
  CDS (1)..(1089)

SEQ ID NO: 25519 - protein, 362 aa, Arabidopsis thaliana; identical to SEQ ID NO: 5345

SEQ ID NO: 25520 - DNA, 1251 bp, Arabidopsis thaliana; identical to SEQ ID NO: 866
  CDS (1)..(1251)

SEQ ID NO: 25521 - protein, 416 aa, Arabidopsis thaliana; identical to SEQ ID NO: 867

SEQ ID NO: 25522 - DNA, 1686 bp, Magnaporthe grisea 70-15
  CDS (1)..(1686)
atgtttggcggctcctcgaaagcggacagccctaccctaaccagcccaacttcgagcctaccggcgacagctactcctgcgccagggagcaagtctccgtccccggacgcgagcgagtcgacattgagcagcagccccaccaaagctgccgagcaggccacgagcagggagaaacggagcggcaatggcagcccacccgactctgccggtgctgccgagcagaagaaacggagaagcagcggcgtgagcagtaaggcaagcagtctgctcgccagcgcaaagaatacactcaatttcggacagggtagcagtcgttcgaataccgacaatggatcctctacgcagactgcactgcagaagctgggcaaacaggacccggctctcgtagtaccgcaaggccagcagaacaactcggcaggagaatcactacctgggcccaagtcgactttccgcgtcggtgtttgggaggatcgcaacaagaaatgcaggcgtactatggaagatacccacgcattcctctacaactttctccatacgccggcagcgacacctgccagttcgtcaaatgcgactgatggcgaaaccaaaaccacagccactccgggtgatgagattgttgagtctgataatggctactttgccatttttgatggtcacgctggcacctttgccgcggactggtgtggcaaaaaattacatctcatcctggaagagactatacgcaagaagcccaatgtacctatccccgagcttctcgacgagaccttcactacagtcgatgcgcagctcgaaaaactccctgtgaagaacagcggctgtacggctgcaatagcggtacttcgttgggaggatcgagtgcccagcagtcagtctgccactggttcccagcctgttgcagccgccaaggcttcagatgaaggcctgaagcccgaggacggaaagtccaacgatggtgccagtctacgcgcgtccgatgcggcgcccccgaggccgaaaccagccgtgacgaaacagcgcgtcctctatacggccaacgtgggcgatgctcgtatcatcctctgtcgatccgggaaagctctccgtctctcgtatgaccacaagggaagcgacgagaacgaaggcagacgcataactaatgctggtggcttgatactcaacaaccgtgtcaatggcgtacttgctgtgacgcgagccctcggcgacacctacatgaaggaattggtcacaggccatccctatacgaccgaaactgtcattcagccagaactggatgaatttcttatcattgcatgtgatggactttgggacgtgtgcgatgatcaagaggctgttgatcaggttagaaatatcgaagacccagcggctgcggcaaagctgctagtcaaccatgcccttgctcgattcagcaccgataacttgtcctgcatgattgttcgatttgacaagcaagcggtccttgacgggcactcccgcaaggacgctgccaccaaaggtgatccggctagcaaaccgagcgaggcagaccggaatgttcaattggccactaacgctgccggccggagcaatgaccctataccttcgattagtgaggagccggcggcggcggcagcagccgcagcaggggactcgtctggtggcacgaaagggcaggatgatgagaccagccaaccggccacatcttcataa

SEQ ID NO: 25523 - protein, 561 aa, Magnaporthe grisea 70-15
MFGGSSKADSPTLTSPTSSLPATATPAPGSKSPSPDASESTLSSSPTKAAEQATSREKRSGNGSPPDSAGAAEQKKRRSSGVSSKASSLLASAKNTLNFGQGSSRSNTDNGSSTQTALQKLGKQDPALVVPQGQQNNSAGESLPGPKSTFRVGVWEDRNKKCRRTMEDTHAFLYNFLHTPAATPASSSNATDGETKTTATPGDEIVESDNGYFAIFDGHAGTFAADWCGKKLHLILEETIRKKPNVPIPELLDETFTTVDAQLEKLPVKNSGCTAAIAVLRWEDRVPSSQSATGSQPVAAAKASDEGLKPEDGKSNDGASLRASDAAPPRPKPAVTKQRVLYTANVGDARIILCRSGKALRLSYDHKGSDENEGRRITNAGGLILNNRVNGVLAVTRALGDTYMKELVTGHPYTTETVIQPELDEFLIIACDGLWDVCDDQEAVDQVRNIEDPAAAAKLLVNHALARFSTDNLSCMIVRFDKQAVLDGHSRKDAATKGDPASKPSEADRNVQLATNAAGRSNDPIPSISEEPAAAAAAAAGDSSGGTKGQDDETSQPATSS

SEQ ID NO: 25524 - DNA, 1251 bp, Nicotiana tabacum; identical to SEQ ID NO: 5352
  CDS (1)..(1251)

SEQ ID NO: 25525 - protein, 416 aa, Nicotiana tabacum; identical to SEQ ID NO: 5353

SEQ ID NO: 25526 - DNA, 1221 bp, Oryza sativa subsp; identical to SEQ ID NO: 882
  CDS (1)..(1221)

SEQ ID NO: 25527 - protein, 406 aa, Oryza sativa subsp; identical to SEQ ID NO: 883

SEQ ID NO: 25528 - DNA, 1335 bp, Oryza sativa subsp; identical to SEQ ID NO: 5358
  CDS (1)..(1335)

SEQ ID NO: 25529 - protein, 444 aa, Oryza sativa subsp; identical to SEQ ID NO: 5359

SEQ ID NO: 25530 - DNA, 1251 bp, Oryza sativa subsp; identical to SEQ ID NO: 5360
  CDS (1)..(1251)

SEQ ID NO: 25531 - protein, 416 aa, Oryza sativa subsp; identical to SEQ ID NO: 5361

SEQ ID NO: 25532 - DNA, 1167 bp, Oryza sativa subsp; identical to SEQ ID NO: 5362
  CDS (1)..(1167)

SEQ ID NO: 25533 - protein, 388 aa, Oryza sativa subsp; identical to SEQ ID NO: 5363

SEQ ID NO: 25534 - DNA, 1194 bp, Oryza sativa subsp; identical to SEQ ID NO: 888
  CDS (1)..(1194)

SEQ ID NO: 25535 - protein, 397 aa, Oryza sativa subsp; identical to SEQ ID NO: 889

SEQ ID NO: 25536 - DNA, 1347 bp, Oryza sativa subsp; identical to SEQ ID NO: 17493
  CDS (1)..(1347)

SEQ ID NO: 25537 - protein, 448 aa, Oryza sativa subsp; identical to SEQ ID NO: 17494

SEQ ID NO: 25538 - DNA, 1218 bp, Oryza sativa subsp; identical to SEQ ID NO: 5368
  CDS (1)..(1218)

SEQ ID NO: 25539 - protein, 405 aa, Oryza sativa subsp; identical to SEQ ID NO: 5369

SEQ ID NO: 25540 - DNA, 1167 bp, Zea mays
  CDS (1)..(1167)
atgtcttgcacggtggccatcccgagctcgccagtcttctcgccctcacgccgcccactctcctgcaaggccgcctccgcctcaccggagcccaccgtccccgcctctaccgcggcgcccgcgcccgccgccgccgccggctcgccgctccgccccttcgcgctccgcgcgctgctgcgggaggaggtctccccgtctccgccgccccagccgacctccgccgcagcggtggctttggtaccgagcggggccgcgctgaagcggcggcgaccgacgccgcttgtcgtgccggcgtccggcgccgcggcagctgctgctgcggcggcggcggtggccgctgtggaggcggatccgaggaacgaggtggaggaggaaggggaggagttcgcagcgtactgccggaggggaaagggaaggagaagggtggaaatggaggaccggcatgtggccaaggtcgctctcggcggggacccccaagtggcactgtttggtgtgttcgatggccacggcgggaaaaacgcggcagagttcgccgcggagaacatgcccaagtttatggccgaggagttgacgaaggtaaacggcggagagatcgaaggagcggtgaagaggggttacctcaagacggacgaggagttcctcaagagggacgagagcgggggcgcgtgctgcgtcacagccgtcctccaaaagggtggactggtcgtctccaacgctggagactgccgtgcggtgctcagccgagcagggaaggcagaggcgctcacctctgaccaccgggcgtccagggaggacgagaaggaaaggattgagaatttgggtggatttgtggtgaattaccgtggaacatggcgagtccagggctccctggcagtgtctaggggcattggggatggacacctaaagcagtgggttgtggctgacccagacaccacgacgctcctggttgaccagcagtgcgagttcttgatacttgcttctgatggcctctgggataagatcgacaatcaggaggcggtagaccttgcacgacctctctgcatcaacaatgacaagacctctcgcatggctgcctgcaggatgctcaccgagacatcgatttccaggggctcgactgatgatatcagtgtcgtgatcgtgcagttgcagaaattttcaagctcgtaa

SEQ ID NO: 25541 - protein, 388 aa, Zea mays
MSCTVAIPSSPVFSPSRRPLSCKAASASPEPTVPASTAAPAPAAAAGSPLRPFALRALLREEVSPSPPPQPTSAAAVALVPSGAALKRRRPTPLVVPASGAAAAAAAAAAVAAVEADPRNEVEEEGEEFAAYCRRGKGRRRVEMEDRHVAKVALGGDPQVALFGVFDGHGGKNAAEFAAENMPKFMAEELTKVNGGEIEGAVKRGYLKTDEEFLKRDESGGACCVTAVLQKGGLVVSNAGDCRAVLSRAGKAEALTSDHRASREDEKERIENLGGFVVNYRGTWRVQGSLAVSRGIGDGHLKQWVVADPDTTTLLVDQQCEFLILASDGLWDKIDNQEAVDLARPLCINNDKTSRMAACRMLTETSISRGSTDDISVVIVQLQKFSSS

SEQ ID NO: 25542 - DNA, 1617 bp, Populus tremula; identical to SEQ ID NO: 5374
  CDS (1)..(1617)

SEQ ID NO: 25543 - protein, 538 aa, Populus tremula; identical to SEQ ID NO: 5375

SEQ ID NO: 25544 - DNA, 1617 bp, Populus tremula; identical to SEQ ID NO: 17501
  CDS (1)..(1617)

SEQ ID NO: 25545 - protein, 538 aa, Populus tremula; identical to SEQ ID NO: 17502

SEQ ID NO: 25546 - DNA, 1617 bp, Populus tremula
  CDS (1)..(1617)
atggaggagatgtatccggcggttgcagtgccatttagagtaggtaattcagcctgtgaaagtccatccatagatacccaaatggatatcacaagaattttaatggcagacacggctagcttattatctgatactgtaactaaggttcctactgctggggataaggattgtaattgtgcggctccggcttcaaaagaggacaggggaggaagaggagccgctttgttggatatgatctctgaaactgaaagaaattgggttgttggcgatgatgggataacacgggaaagtgaggaagaggattctttgtcgttggagggtgatccaattcttgatagttcttgttctctttcagtggctagtgagacaagtagcttatgtggagaggatctcttgagtttggagaccacctctgaggtaggaacactgagttctgtagaaattcaaaagagcattggtggtgttgatattgttgccaagacagcagatttgggggattcaaacgttgacactgttgtgagcgatcccccttcggtggcaggaagtgttgaggaagaggctggggatggatctgatgcaaagacatcttctgtggttcttcagttgactctggaaagagggaccagtggaacagtctcaagaagtgtttttgaagtggactatgtacccctttggggatttacatctgtttgtggaaggagaccggagatggaagatgcagttgctactgtgccttatttattaaaatttcctattcaaatgctgattggcgaccgattacttgatggaatgaacaagtatttgcctcaccagactgctcatttctttggagtttatgatggtcatggaggctcgcaagtggcaaattattgtcatgatcgtatccattcggctttgtccgaggagatagaatttgttaagaatggcctgagtgatggaagtattaaggatagttgccaggagcagtggaaaaaggctttcaccagttgttttctcaaggttgatgctgaagtcggaggaaaggctggtgccgaaccagttgccccagaaactgttggttctactgctgttgtggccattatttgttcatcccacatcatagtagcaaactgtggagactcacgagcagttctttgtcgcgggaaagaaccaatggcattatcagtggatcataaaccaaaccgagaagatgagtatgcaaggatagaagcagctggaggcaaggtcatacagtggaatgggcatcgtgtctttggtgttctagcaatgtcaaggtctattggtgatagatatttgaaaccatggattattccagaacccgaagttatgtttattcctagggcaagagaagatgaatgtctcattctggcaagtgatggtttgtgggatgtcatgtcaaatgaagaagcatgtgatctggcacgcaaacgaatacttgtctggcacaaaaagaatggcgttgcgctctcgtcctcaaggagcgagggaattgatcctgcagctcaagcagcagctgagttcctctcaaaccgtgcccttcaaaaaggaagcaaggataacatcactgtaatcgtggtggatctgaaagcgcaaaggaagttcaaaaccaaaacatga

SEQ ID NO: 25547 - protein, 538 aa, Populus tremula
MEEMYPAVAVPFRVGNSACESPSIDTQMDITRILMADTASLLSDTVTKVPTAGDKDCNCAAPASKEDRGGRGAALLDMISETERNWVVGDDGITRESEEEDSLSLEGDPILDSSCSLSVASETSSLCGEDLLSLETTSEVGTLSSVEIQKSIGGVDIVAKTADLGDSNVDTVVSDPPSVAGSVEEEAGDGSDAKTSSVVLQLTLERGTSGTVSRSVFEVDYVPLWGFTSVCGRRPEMEDAVATVPYLLKFPIQMLIGDRLLDGMNKYLPHQTAHFFGVYDGHGGSQVANYCHDRIHSALSEEIEFVKNGLSDGSIKDSCQEQWKKAFTSCFLKVDAEVGGKAGAEPVAPETVGSTAVVAIICSSHIIVANCGDSRAVLCRGKEPMALSVDHKPNREDEYARIEAAGGKVIQWNGHRVFGVLAMSRSIGDRYLKPWIIPEPEVMFIPRAREDECLILASDGLWDVMSNEEACDLARKRILVWHKKNGVALSSSRSEGIDPAAQAAAEFLSNRALQKGSKDNITVIVVDLKAQRKFKTKT

SEQ ID NO: 25548 - DNA, 1146 bp, Medicago sativa; identical to SEQ ID NO: 912
  CDS (1)..(1146)

SEQ ID NO: 25549 - protein, 381 aa, Medicago sativa; identical to SEQ ID NO: 913

SEQ ID NO: 25550 - DNA, 1613 bp, Mesembryanthemum crystallinum; identical to SEQ ID NO: 5384
  CDS (59)..(1201)

SEQ ID NO: 25551 - protein, 380 aa, Mesembryanthemum crystallinum; identical to SEQ ID NO: 5385

SEQ ID NO: 25552 - DNA, 1047 bp, Musa balbisiana; identical to SEQ ID NO: 5386
  CDS (1)..(1047)

SEQ ID NO: 25553 - protein, 348 aa, Musa balbisiana; identical to SEQ ID NO: 5387

SEQ ID NO: 25554 - DNA, 1023 bp, Aspergillus oryzae; identical to SEQ ID NO: 1406
  CDS (1)..(1023)

SEQ ID NO: 25555 - protein, 340 aa, Aspergillus oryzae; identical to SEQ ID NO: 1407

SEQ ID NO: 25556 - DNA, 1251 bp, Oryza sativa subsp; identical to SEQ ID NO: 5388
  CDS (1)..(1251)

SEQ ID NO: 25557 - protein, 416 aa, Oryza sativa subsp; identical to SEQ ID NO: 5389

SEQ ID NO: 25558 - DNA, 1164 bp, Oryza sativa subsp; identical to SEQ ID NO: 5392
  CDS (1)..(1164)

SEQ ID NO: 25559 - protein, 387 aa, Oryza sativa subsp; identical to SEQ ID NO: 5393

SEQ ID NO: 25560 - DNA, 1745 bp, Prunus avium; identical to SEQ ID NO: 5394
  CDS (122)..(1402)

SEQ ID NO: 25561 - protein, 426 aa, Prunus avium; identical to SEQ ID NO: 941

SEQ ID NO: 25562 - DNA, 1455 bp, Oryza sativa subsp; identical to SEQ ID NO: 5396
  CDS (1)..(1455)

SEQ ID NO: 25563 - protein, 484 aa, Oryza sativa subsp; identical to SEQ ID NO: 5397

SEQ ID NO: 25564 - DNA, 1329 bp, Arabidopsis thaliana; identical to SEQ ID NO: 5400
  CDS (1)..(1329)

SEQ ID NO: 25565 - protein, 442 aa, Arabidopsis thaliana; identical to SEQ ID NO: 5401

SEQ ID NO: 25566 - DNA, 1337 bp, Nicotiana tabacum; identical to SEQ ID NO: 5402
  CDS (2)..(1252)

SEQ ID NO: 25567 - protein, 416 aa, Nicotiana tabacum; identical to SEQ ID NO: 5403

SEQ ID NO: 25568 - DNA, 1242 bp, Arabidopsis thaliana; identical to SEQ ID NO: 5404
  CDS (1)..(1242)

SEQ ID NO: 25569 - protein, 413 aa, Arabidopsis thaliana; identical to SEQ ID NO: 5405

SEQ ID NO: 25570 - DNA, 1385 bp, Fagus sylvatica; identical to SEQ ID NO: 5410
  CDS (106)..(1347)

SEQ ID NO: 25571 - protein, 413 aa, Fagus sylvatica; identical to SEQ ID NO: 5411

SEQ ID NO: 25572 - DNA, 1318 bp, Lotus japonicus; identical to SEQ ID NO: 5412
  CDS (108)..(1196)

SEQ ID NO: 25573 - protein, 362 aa, Lotus japonicus; identical to SEQ ID NO: 5413

SEQ ID NO: 25574 - DNA, 1305 bp, Arabidopsis thaliana; identical to SEQ ID NO: 958
  CDS (1)..(1305)

SEQ ID NO: 25575 - protein, 434 aa, Arabidopsis thaliana; identical to SEQ ID NO: 959

SEQ ID NO: 25576 - DNA, 1272 bp, Arabidopsis thaliana; identical to SEQ ID NO: 19467
  CDS (1)..(1272)

SEQ ID NO: 25577 - protein, 423 aa, Arabidopsis thaliana; identical to SEQ ID NO: 5319

SEQ ID NO: 25578 - DNA, 1200 bp, Arabidopsis thaliana; identical to SEQ ID NO: 964
  CDS (1)..(1200)

SEQ ID NO: 25579 - protein, 399 aa, Arabidopsis thaliana; identical to SEQ ID NO: 965

SEQ ID NO: 25580 - DNA, 1107 bp, Oryza sativa; identical to SEQ ID NO: 840
  CDS (1)..(1107)

SEQ ID NO: 25581 - protein, 368 aa, Oryza sativa; identical to SEQ ID NO: 841

SEQ ID NO: 25582 - DNA, 1269 bp, Brassica napus; identical to SEQ ID NO: 972
  CDS (1)..(1269)

SEQ ID NO: 25583 - protein, 422 aa, Brassica napus; identical to SEQ ID NO: 973

SEQ ID NO: 25584 - DNA, 1206 bp, Brassica napus; identical to SEQ ID NO: 1444
  CDS (1)..(1206)

SEQ ID NO: 25585 - protein, 401 aa, Brassica napus; identical to SEQ ID NO: 1445

SEQ ID NO: 25586 - DNA, 939 bp, Glycine max; identical to SEQ ID NO: 1448
  CDS (1)..(939)

SEQ ID NO: 25587 - protein, 312 aa, Glycine max; identical to SEQ ID NO: 1449

SEQ ID NO: 25588 - DNA, 1104 bp, Brassica napus; identical to SEQ ID NO: 1450
  CDS (1)..(1104)

SEQ ID NO: 25589 - protein, 367 aa, Brassica napus; identical to SEQ ID NO: 1451

SEQ ID NO: 25590 - DNA, 1236 bp, Brassica napus; identical to SEQ ID NO: 974
  CDS (1)..(1236)

SEQ ID NO: 25591 - protein, 411 aa, Brassica napus; identical to SEQ ID NO: 975

SEQ ID NO: 25592 - DNA, 1203 bp, Glycine max; identical to SEQ ID NO: 1458
  CDS (1)..(1203)

SEQ ID NO: 25593 - protein, 400 aa, Glycine max; identical to SEQ ID NO: 1459

SEQ ID NO: 25594 - DNA, 1218 bp, Linum usitatissimum; identical to SEQ ID NO: 982
  CDS (1)..(1218)

SEQ ID NO: 25595 - protein, 405 aa, Linum usitatissimum; identical to SEQ ID NO: 983

SEQ ID NO: 25596 - DNA, 852 bp, Linum usitatissimum; identical to SEQ ID NO: 1464
  CDS (1)..(852)

SEQ ID NO: 25597 - protein, 283 aa, Linum usitatissimum; identical to SEQ ID NO: 1465

SEQ ID NO: 25598 - DNA, 1167 bp, Zea mays; identical to SEQ ID NO: 984
  CDS (1)..(1167)

SEQ ID NO: 25599 - protein, 388 aa, Zea mays; identical to SEQ ID NO: 985

SEQ ID NO: 25600 - DNA, 1209 bp, Brassica napus; identical to SEQ ID NO: 1478
  CDS (1)..(1209)

SEQ ID NO: 25601 - protein, 402 aa, Brassica napus; identical to SEQ ID NO: 1479

SEQ ID NO: 25602 - DNA, 1206 bp, Brassica napus; identical to SEQ ID NO: 1486
  CDS (1)..(1206)

SEQ ID NO: 25603 - protein, 401 aa, Brassica napus; identical to SEQ ID NO: 1487

SEQ ID NO: 25604 - DNA, 1167 bp, Brassica napus; identical to SEQ ID NO: 1494
  CDS (1)..(1167)

SEQ ID NO: 25605 - protein, 388 aa, Brassica napus; identical to SEQ ID NO: 1495

SEQ ID NO: 25606 - DNA, 1206 bp, Glycine max; identical to SEQ ID NO: 1496
  CDS (1)..(1206)

SEQ ID NO: 25607 - protein, 401 aa, Glycine max; identical to SEQ ID NO: 1497

SEQ ID NO: 25608 - DNA, 1203 bp, Glycine max; identical to SEQ ID NO: 1498
  CDS (1)..(1203)

SEQ ID NO: 25609 - protein, 400 aa, Glycine max; identical to SEQ ID NO: 1499

SEQ ID NO: 25610 - DNA, 1071 bp, Glycine max; identical to SEQ ID NO: 1004
  CDS (1)..(1071)

SEQ ID NO: 25611 - protein, 356 aa, Glycine max; identical to SEQ ID NO: 1005

SEQ ID NO: 25612 - DNA, 1017 bp, Glycine max; identical to SEQ ID NO: 1502
  CDS (1)..(1017)

SEQ ID NO: 25613 - protein, 338 aa, Glycine max; identical to SEQ ID NO: 1503

SEQ ID NO: 25614 - DNA, 1134 bp, Glycine max; identical to SEQ ID NO: 1006
  CDS (1)..(1134)

SEQ ID NO: 25615 - protein, 377 aa, Glycine max; identical to SEQ ID NO: 1007

SEQ ID NO: 25616 - DNA, 1017 bp, Glycine max; identical to SEQ ID NO: 1510
  CDS (1)..(1017)

SEQ ID NO: 25617 - protein, 338 aa, Glycine max; identical to SEQ ID NO: 1511

SEQ ID NO: 25618 - DNA, 1617 bp, Glycine max; identical to SEQ ID NO: 1518
  CDS (1)..(1617)

SEQ ID NO: 25619 - protein, 538 aa, Glycine max; identical to SEQ ID NO: 1519

SEQ ID NO: 25620 - DNA, 1134 bp, Glycine max; identical to SEQ ID NO: 1010
  CDS (1)..(1134)

SEQ ID NO: 25621 - protein, 377 aa, Glycine max; identical to SEQ ID NO: 1011

SEQ ID NO: 25622 - DNA, 1569 bp, Glycine max; identical to SEQ ID NO: 1524
  CDS (1)..(1569)

SEQ ID NO: 25623 - protein, 522 aa, Glycine max; identical to SEQ ID NO: 1525

SEQ ID NO: 25624 - DNA, 1134 bp, Glycine max; identical to SEQ ID NO: 1014
  CDS (1)..(1134)

SEQ ID NO: 25625 - protein, 377 aa, Glycine max; identical to SEQ ID NO: 1015

SEQ ID NO: 25626 - DNA, 1092 bp, Glycine max; identical to SEQ ID NO: 1018
  CDS (1)..(1092)

SEQ ID NO: 25627 - protein, 363 aa, Glycine max; identical to SEQ ID NO: 1019

SEQ ID NO: 25628 - DNA, 1092 bp, Glycine max; identical to SEQ ID NO: 1022
  CDS (1)..(1092)

SEQ ID NO: 25629 - protein, 363 aa, Glycine max; identical to SEQ ID NO: 1023

SEQ ID NO: 25630 - DNA, 945 bp, Glycine max; identical to SEQ ID NO: 1540
  CDS (1)..(945)

SEQ ID NO: 25631 - protein, 314 aa, Glycine max; identical to SEQ ID NO: 1541

SEQ ID NO: 25632 - DNA, 1083 bp, Glycine max; identical to SEQ ID NO: 1544
  CDS (1)..(1083)

SEQ ID NO: 25633 - protein, 360 aa, Glycine max; identical to SEQ ID NO: 1545

SEQ ID NO: 25634 - DNA, 1092 bp, Glycine max; identical to SEQ ID NO: 1030
  CDS (1)..(1092)

SEQ ID NO: 25635 - protein, 363 aa, Glycine max; identical to SEQ ID NO: 1031

SEQ ID NO: 25636 - DNA, 945 bp, Glycine max; identical to SEQ ID NO: 1554
  CDS (1)..(945)

SEQ ID NO: 25637 - protein, 314 aa, Glycine max; identical to SEQ ID NO: 1555

SEQ ID NO: 25638 - DNA, 1674 bp, Glycine max; identical to SEQ ID NO: 1558
  CDS (1)..(1674)

SEQ ID NO: 25639 - protein, 557 aa, Glycine max; identical to SEQ ID NO: 1559

SEQ ID NO: 25640 - DNA, 1113 bp, Zea mays; identical to SEQ ID NO: 1034
  CDS (1)..(1113)

SEQ ID NO: 25641 - protein, 370 aa, Zea mays; identical to SEQ ID NO: 1035

SEQ ID NO: 25642 - DNA, 1098 bp, Zea mays; identical to SEQ ID NO: 1564
  CDS (1)..(1098)

SEQ ID NO: 25643 - protein, 365 aa, Zea mays; identical to SEQ ID NO: 1565

SEQ ID NO: 25644 - DNA, 1074 bp, Zea mays; identical to SEQ ID NO: 1566
  CDS (1)..(1074)

SEQ ID NO: 25645 - protein, 357 aa, Zea mays; identical to SEQ ID NO: 1567

SEQ ID NO: 25646 - DNA, 1194 bp, Zea mays; identical to SEQ ID NO: 1570
  CDS (1)..(1194)

SEQ ID NO: 25647 - protein, 397 aa, Zea mays; identical to SEQ ID NO: 1571

SEQ ID NO: 25648 - DNA, 855 bp, Zea mays; identical to SEQ ID NO: 1572
  CDS (1)..(855)

SEQ ID NO: 25649 - protein, 284 aa, Zea mays; identical to SEQ ID NO: 1573

SEQ ID NO: 25650 - DNA, 873 bp, Zea mays; identical to SEQ ID NO: 1574
  CDS (1)..(873)

SEQ ID NO: 25651 - protein, 290 aa, Zea mays; identical to SEQ ID NO: 1575

SEQ ID NO: 25652 - DNA, 1185 bp, Zea mays; identical to SEQ ID NO: 1582
  CDS (1)..(1185)

SEQ ID NO: 25653 - protein, 394 aa, Zea mays; identical to SEQ ID NO: 1583

SEQ ID NO: 25654 - DNA, 873 bp, Zea mays; identical to SEQ ID NO: 1584
  CDS (1)..(873)

SEQ ID NO: 25655 - protein, 290 aa, Zea mays; identical to SEQ ID NO: 1585

SEQ ID NO: 25656 - DNA, 1092 bp, Zea mays; identical to SEQ ID NO: 1588
  CDS (1)..(1092)

SEQ ID NO: 25657 - protein, 363 aa, Zea mays; identical to SEQ ID NO: 1589

SEQ ID NO: 25658 - DNA, 1455 bp, Zea mays; identical to SEQ ID NO: 1594
  CDS (1)..(1455)

SEQ ID NO: 25659 - protein, 484 aa, Zea mays; identical to SEQ ID NO: 1595

SEQ ID NO: 25660 - DNA, 1047 bp, Zea mays; identical to SEQ ID NO: 1596
  CDS (1)..(1047)

SEQ ID NO: 25661 - protein, 348 aa, Zea mays; identical to SEQ ID NO: 1597

SEQ ID NO: 25662 - DNA, 1074 bp, Zea mays; identical to SEQ ID NO: 1602
  CDS (1)..(1074)

SEQ ID NO: 25663 - protein, 357 aa, Zea mays; identical to SEQ ID NO: 1603

SEQ ID NO: 25664 - DNA, 1167 bp, Zea mays; identical to SEQ ID NO: 1050
  CDS (1)..(1167)

SEQ ID NO: 25665 - protein, 388 aa, Zea mays; identical to SEQ ID NO: 1051

SEQ ID NO: 25666 - DNA, 1518 bp, Zea mays; identical to SEQ ID NO: 1052
  CDS (1)..(1518)

SEQ ID NO: 25667 - protein, 505 aa, Zea mays; identical to SEQ ID NO: 1053

SEQ ID NO: 25668 - DNA, 21 bp, Artificial sequence
  primer
atggctgagatttgttacgag

SEQ ID NO: 25669 - DNA, 21 bp, Artificial sequence
  primer
ctacgtgtctcgtcgtagatc

SEQ ID NO: 25670 - protein, 513 aa, Artificial sequence
  consensus sequence
  Variant (2)..(3): Xaa in position 2 to 3 is any amino acid
  Variant (5)..(6): Xaa in position 5 to 6 is any amino acid
  Variant (8)..(8): Xaa in position 8 is any amino acid
  Variant (10)..(11): Xaa in position 10 to 11 is any amino acid
  Variant (12)..(13): Xaa in position 12 to 13 is any or no amino acid
  Variant (17)..(30): Xaa in position 17 to 30 is any amino acid
  Variant (31)..(60): Xaa in position 31 to 60 is any or no amino acid
  Variant (64)..(64): Xaa in position 64 is any amino acid
  Variant (69)..(72): Xaa in position 69 to 72 is any amino acid
  Variant (74)..(105): Xaa in position 74 to 105 is any amino acid
  Variant (106)..(159): Xaa in position 106 to 159 is any or no amino acid
  Variant (161)..(170): Xaa in position 161 to 170 is any amino acid
  Variant (171)..(220): Xaa in position 171 to 220 is any or no amino acid
  Variant (225)..(226): Xaa in position 225 to 226 is any amino acid
  Variant (228)..(235): Xaa in position 228 to 235 is any amino acid
  Variant (236)..(236): Xaa in position 236 is any or no amino acid
  Variant (238)..(238): Xaa in position 238 is any amino acid
  Variant (240)..(240): Xaa in position 240 is any amino acid
  Variant (247)..(248): Xaa in position 247 to 248 is any amino acid
  Variant (250)..(255): Xaa in position 250 to 255 is any amino acid
  Variant (258)..(258): Xaa in position 258 is any amino acid
  Variant (262)..(266): Xaa in position 262 to 266 is any amino acid
  Variant (267)..(301): Xaa in position 267 to 301 is any or no amino acid
  Variant (303)..(303): Xaa in position 303 is any amino acid
  Variant (304)..(305): Xaa in position 304 to 305 is any or no amino acid
  Variant (308)..(309): Xaa in position 308 to 309 is any amino acid
  Variant (312)..(314): Xaa in position 312 to 314 is any amino acid
  Variant (317)..(317): Xaa in position 317 is any amino acid
  Variant (319)..(319): Xaa in position 319 is any amino acid
  Variant (320)..(323): Xaa in position 320 to 323 is any or no amino acid
  Variant (325)..(325): Xaa in position 325 is any amino acid
  Variant (326)..(326): Xaa in position 326 is any or no amino acid
  Variant (329)..(329): Xaa in position 329 is any amino acid
  Variant (331)..(331): Xaa in position 331 is any amino acid
  Variant (334)..(334): Xaa in position 334 is any amino acid
  Variant (337)..(338): Xaa in position 337 to 338 is any amino acid
  Variant (339)..(366): Xaa in position 339 to 366 is any or no amino acid
  Variant (369)..(370): Xaa in position 369 to 370 is any amino acid
  Variant (373)..(374): Xaa in position 373 to 374 is any amino acid
  Variant (376)..(378): Xaa in position 376 to 378 is any amino acid
  Variant (381)..(390): Xaa in position 381 to 390 is any amino acid
  Variant (391)..(391): Xaa in position 391 is any or no amino acid
  Variant (393)..(393): Xaa in position 393 is any amino acid
  Variant (405)..(406): Xaa in position 405 to 406 is any amino acid
  Variant (408)..(409): Xaa in position 408 to 409 is any amino acid
  Variant (411)..(422): Xaa in position 411 to 422 is any amino acid
  Variant (423)..(496): Xaa in position 423 to 496 is any or no amino acid
  Variant (498)..(500): Xaa in position 498 to 500 is any amino acid
  Variant (502)..(504): Xaa in position 502 to 504 is any amino acid
  Variant (506)..(508): Xaa in position 506 to 508 is any amino acid
  Variant (509)..(509): Xaa in position 509 is any or no amino acid
  Variant (511)..(511): Xaa in position 511 is any amino acid
GXXSXXGXRXXXXMEDXXXXXXXXXXXXXXXXXXXXXXXXXXXXXXXXXXXXXXXXXXXXFGVXDGHGXXXXAXXXXXXXXXXXXXXXXXXXXXXXXXXXXXXXXXXXXXXXXXXXXXXXXXXXXXXXXXXXXXXXXXXXXXXXXXXXXXXXXXXXXXXDXXXXXXXXXXXXXXXXXXXXXXXXXXXXXXXXXXXXXXXXXXXXXXXXXXXXXXXXXXXXGSTAXXAXXXXXXXXXVXNXGDSRAVXXRXXXXXXLSXDHKXXXXXXXXXXXXXXXXXXXXXXXXXXXXXXXXXXXXXXXXPXXXDEXXRIXXXGGXVXXXXXGXXRVXGXLAXSRXXXXXXXXXXXXXXXXXXXXXXXXXXXXXXGDXXLKXXVXXXPEXXXXXXXXXXXEXLILASDGLWDVXXNXXAXXXXXXXXXXXXXXXXXXXXXXXXXXXXXXXXXXXXXXXXXXXXXXXXXXXXXXXXXXXXXXXXXXXXXXXXXXXXXXXXXXXXXXAXXXLXXXAXXXXSXDN

SEQ ID NO: 25671 - protein, 29 aa, Artificial sequence
  protein pattern
  Variant (2)..(2): Xaa in position 2 is Ala, Cys or Val
  Variant (5)..(5): Xaa in position 5 is Cys or Ser
  Variant (7)..(7): Xaa in position 7 is any amino acid
  Variant (8)..(8): Xaa in position 8 is Ile, Met or Val
  Variant (9)..(9): Xaa in position 9 is Ile or Leu
  Variant (10)..(14): Xaa in position 10 to 14 is any amino acid
  Variant (15)..(15): Xaa in position 15 is Ala, Pro, Ser or Thr
  Variant (16)..(17): Xaa in position 16 to 17 is any amino acid
  Variant (18)..(18): Xaa in position 18 is Leu or Val
  Variant (20)..(20): Xaa in position 20 is any amino acid
  Variant (25)..(27): Xaa in position 25 to 27 is any amino acid
  Variant (28)..(28): Xaa in position 28 is Ala, Asp, Glu or Gly
NXGDXRXXXXXXXXXXXXSXDHKPXXXXE

SEQ ID NO: 25672 - protein, 18 aa, Artificial sequence
  protein pattern
  Variant (2)..(2): Xaa in position 2 is Ile or Val
  Variant (10)..(10): Xaa in position 10 is Asp or Lys
  Variant (11)..(11): Xaa in position 11 is any amino acid
  Variant (12)..(12): Xaa in position 12 is Ile, Leu, Met or Val
  Variant (13)..(13): Xaa in position 13 is Asp, Glu, Pro, Ser or Thr
  Variant (14)..(14): Xaa in position 14 is any amino acid
  Variant (15)..(15): Xaa in position 15 is Asp, Glu or Gln
  Variant (16)..(16): Xaa in position 16 is any amino acid
  Variant (17)..(17): Xaa in position 17 is Ala or Val
  Variant (18)..(18): Xaa in position 18 is Cys, Gly or Val
LXLASDGLWXXXXXXXXX

SEQ ID NO: 25673 - protein, 12 aa, Artificial sequence
  protein pattern
  Variant (3)..(3): Xaa in position 3 is any amino acid
  Variant (6)..(6): Xaa in position 6 is Ala, Gly or Ser
  Variant (7)..(7): Xaa in position 7 is Phe or Ile
  Variant (10)..(11): Xaa in position 10 to 11 is any amino acid
  Variant (12)..(12): Xaa in position 12 is Leu or Met
LAXSRXXGDXXX

SEQ ID NO: 25674 - protein, 13 aa, Artificial sequence
  protein pattern
  Variant (2)..(2): Xaa in position 2 is any amino acid
  Variant (3)..(3): Xaa in position 3 is any or no amino acid
  Variant (5)..(5): Xaa in position 5 is Asp or Asn
  Variant (6)..(6): Xaa in position 6 is Ile or Val
  Variant (7)..(7): Xaa in position 7 is Ser or Thr
  Variant (8)..(8): Xaa in position 8 is any amino acid
  Variant (9)..(9): Xaa in position 9 is Ile, Met or Val
  Variant (10)..(10): Xaa in position 10 is Ile, Leu or Val
  Variant (11)..(11): Xaa in position 11 is Ile or Val
  Variant (12)..(12): Xaa in position 12 is any amino acid
  Variant (13)..(13): Xaa in position 13 is Phe or Leu
SXXDXXXXXXXXX

SEQ ID NO: 25675 - protein, 15 aa, Artificial sequence
  protein pattern
  Variant (2)..(2): Xaa in position 2 is any amino acid
  Variant (3)..(3): Xaa in position 3 is Ala, Ser, Thr or Val
  Variant (4)..(4): Xaa in position 4 is Ala or Ser
  Variant (5)..(6): Xaa in position 5 to 6 is any amino acid
  Variant (8)..(8): Xaa in position 8 is any or no amino acid
  Variant (10)..(11): Xaa in position 10 to 11 is any amino acid
  Variant (12)..(12): Xaa in position 12 is any or no amino acid
GXXXXXGXRXXXMED

SEQ ID NO: 25676 - DNA, 633 bp, Azotobacter vinelandii
  CDS (1)..(633): transl_table=11
atgaacactgacaaacctacggcccgccggggccggcctcccaggatcaatcgagagcacggcgacacgcgtgaggccctcctgcgtgccgggatggaaatactcaccgagcaaggtttcgcggccactggcatcgataccgtgctcaagcgtatccaagtgcccaaggggtccttctaccactacttcgacagcaaggaggcgttcggccaacaggtcctcgagcgctatgccgcctacttcgcccgcaagctcgaccgctggctgctggatcaggacgaagccccgctgcagcgactgcggaatttcgtcgaggacgcgaaggccggcatggcccggcaccagttccggcgcggttgcctggtcggcaacctgggccaggaggtcgtggtcctgccggacagcttccgctggcagttggagcaggtcctgctcgattggcaacaacgccttgtccgttgcctgaacgaggcggtcgaagcgggtgagatcgctcccggtaccgactgcaacgcccttgcggcgtacttctggatcggctgggaaggcgccgtgctacgcgccaggctggtccagggtatccatcccctggatgtcttcatccagggatttctgactggcatcgaacgctga

SEQ ID NO: 25677 - protein, 210 aa, Azotobacter vinelandii
MNTDKPTARRGRPPRINREHGDTREALLRAGMEILTEQGFAATGIDTVLKRIQVPKGSFYHYFDSKEAFGQQVLERYAAYFARKLDRWLLDQDEAPLQRLRNFVEDAKAGMARHQFRRGCLVGNLGQEVVVLPDSFRWQLEQVLLDWQQRLVRCLNEAVEAGEIAPGTDCNALAAYFWIGWEGAVLRARLVQGIHPLDVFIQGFLTGIER

SEQ ID NO: 25678 - DNA, 600 bp, Klebsiella pneumoniae subsp. pneumoniae MGH 78578
  CDS (1)..(600): transl_table=11
atgaacagacacagcgattgcgatacccgagaacatatcctggccaccggcgagcagctttgcatgcatcgcggttttaccggaatgggcttgagcgaacttctgaagacggcggaggtgcccaagggctccttctaccactactttcgctctaaggaagccttcggcgtcgcgctgcttgaacatcactacaccggatatctgcagcgcctggtcgaccacttcgatcatggcgacggtaactatcgcgatcgcctgctggcctactatcagcacacgctgaatcagttctgccagcaggggattattagcgggtgtcttactgtcaagctatccgcggaggtttgcgatctgtcggaagatatgcgcgccgccatggatcgcggagccagccagattatcgccctgctgggcgacgcgctggagaaaggacgtcaggaaggcagtctcgcatttgacggcgcggccatgaccctgtcgcaggtgctgtattccctgtggctcggggccaacctgcaggccaaaattacgcgtagcgcaacgccgctggaaagcgcccttgcccacgccaaacagattattgcggcgcctgcggtataa

SEQ ID NO: 25679 - protein, 199 aa, Klebsiella pneumoniae subsp. pneumoniae MGH 78578
MNRHSDCDTREHILATGEQLCMHRGFTGMGLSELLKTAEVPKGSFYHYFRSKEAFGVALLEHHYTGYLQRLVDHFDHGDGNYRDRLLAYYQHTLNQFCQQGIISGCLTVKLSAEVCDLSEDMRAAMDRGASQIIALLGDALEKGRQEGSLAFDGAAMTLSQVLYSLWLGANLQAKITRSATPLESALAHAKQIIAAPAV

SEQ ID NO: 25680 - DNA, 705 bp, Klebsiella pneumoniae subsp. pneumoniae MGH 78578
  CDS (1)..(705): transl_table=11
atgaatcccgatacctccgccgtcctgaagccccgccgcggccgtccacccaaggtcgatcgccagtttgacgatacgcgtcaggcgctgattcgctcaggccttgaagtgctgaccgaaacgggctatctcgcggcgggtattgatgcggtgatcaagaatatcgccgtgccaaaggggtcgttttatcattgctttaaaagcaaagaggcttttggcctcgccgtgcttgccgcctatggcgacttctttgcgcataaattagataaattcctgctggacgacgccgtgccgccgctggaacgaatggcggcctttgtgcgtcatgccggtcagggaatggagaaattccagtttcgccgcggctgcctggtgggcaacctgctgcaggaagccccgttgttacccgagacgtttccccaacggttgatggctatcctggcggcatgggagtcgcgcgtggcgcgctgcctgcgcgaagcgcaggcagccggggccatcgccagcgacgcctcaccgcaggcgctggcccaggtgttctggatcggctgggaaggcgcggtgatgcgcgccaggctggtccagtctgccgcaccgcttaaccagtactgggatttttttgcgcacagtatgacaacaaaaacacctgcacaggacggcgctagcgccgataacccccttccgacgaggaatactctgtcatga

SEQ ID NO: 25681 - protein, 234 aa, Klebsiella pneumoniae subsp. pneumoniae MGH 78578
MNPDTSAVLKPRRGRPPKVDRQFDDTRQALIRSGLEVLTETGYLAAGIDAVIKNIAVPKGSFYHCFKSKEAFGLAVLAAYGDFFAHKLDKFLLDDAVPPLERMAAFVRHAGQGMEKFQFRRGCLVGNLLQEAPLLPETFPQRLMAILAAWESRVARCLREAQAAGAIASDASPQALAQVFWIGWEGAVMRARLVQSAAPLNQYWDFFAHSMTTKTPAQDGASADNPLPTRNTLS

SEQ ID NO: 25682 - DNA, 594 bp, Mesorhizobium loti MAFF303099
  CDS (1)..(594): transl_table=11
atggctagacaatcactccgcgaaaaacttctcgacgccggtttccggaccatctggaattcaggctatgccgccgccggcgtgcgcgacatcgttgccgccgccgacgcccggccgggatccttcaccaatcatttcgcctcgaaggaggcgttcgccggcgaagtgctggaccgctacttcacctatgtcagtgggctggtcgaggctgcgctggcgcaggacggcacgccgcccataggcaggctgcgccgctacctcgacgtcatcacctcgaagctcgaggcgcatgactgggcgcgcggctgcatgatcggcaatctcagcctcgaggcagcggtgcacagcgagccgttgcgcgtgcaactcgtcgccatcttcgagcgctggcgccagcccttcgccgtctgcatcgccgaaggccaggcggccggcgacatcgccaagaccttcgaggccgaggacctcgccgacttcctgctgtcgtcctggcagggcgccatgctgcgcatgaaggtcgagcgcagccccgaaccgctcgagcggttcaagaaaatcatcttcaacacagcgtttgcaaaggagaccccatga

SEQ ID NO: 25683 - protein, 197 aa, Mesorhizobium loti MAFF303099
MARQSLREKLLDAGFRTIWNSGYAAAGVRDIVAAADARPGSFTNHFASKEAFAGEVLDRYFTYVSGLVEAALAQDGTPPIGRLRRYLDVITSKLEAHDWARGCMIGNLSLEAAVHSEPLRVQLVAIFERWRQPFAVCIAEGQAAGDIAKTFEAEDLADFLLSSWQGAMLRMKVERSPEPLERFKKIIFNTAFAKETP

SEQ ID NO: 25684 - DNA, 591 bp, Pseudomonas aeruginosa PAO1
  CDS (1)..(591): transl_table=11
atgactagcaaccgactcgacaagcgcgaactgatcctggccaagggctccgaggtcatgacccggcgtggctaccacggcaccggggtgctggagatcgtccaggccgcgcgcatccccaagggctccttctatcactacttcgacagcaaggaagccttcgcccagcaggccctggagcacgtctacgcgccgcgcctggcgcgctacgcccaggccctcggcgacagccgcttcagcccgcgcgagcgggtgctgcgctactacggcgagctactggagcacttcgcccgccaggaaaagcccgaataccactgcttcatcggcagcctgagcttcgagatggccgagctgtcgccgccgatcgcggccaaggtcgagtcgatcctgcaggcttccgcgcaaatcctccaggactgcctggagcaggcgcgcgaggccggcgaactggccgccgacgaggactgcgcgagcctggccggcttcatcggcttcgcctggcagggcgccctggcgcgcttcaaggtcggcgccggcctcgctccgttgaatgctttcatgtcgcgcctggagctgctgctccgcgcctga

SEQ ID NO: 25685 - protein, 196 aa, Pseudomonas aeruginosa PAO1
MTSNRLDKRELILAKGSEVMTRRGYHGTGVLEIVQAARIPKGSFYHYFDSKEAFAQQALEHVYAPRLARYAQALGDSRFSPRERVLRYYGELLEHFARQEKPEYHCFIGSLSFEMAELSPPIAAKVESILQASAQILQDCLEQAREAGELAADEDCASLAGFIGFAWQGALARFKVGAGLAPLNAFMSRLELLLRA

SEQ ID NO: 25686 - DNA, 585 bp, Pseudomonas aeruginosa PAO1
  CDS (1)..(585): transl_table=11
atgaaaaccagctacgacgacacccgccagcatctgctcgataccggataccggatcatggcggtcaaaggcttctccggagtcggcctcaacgaaatcctgcagagcgcgggcgttcccaagggctcgttctaccattacttcaaatccaaggaacagttcggccaggccctgctggaggactacttccgcgtctacctggcggacatggaccaacgcttctccgcgccagggctgaatgcccgcgaacgactgatgagctactggcagaagtggctggacaacgcctgcccgccctgcgacgagcagcgctgcctggtggtcaagctcagcgccgaggtcgcggacctttcggaaagcatgcgcatcaccctgcgcgacggctccgacgggatcatcgaacgcctggtcggctgcctcgggcagggccgcgacgacggctccctcgcgccctgcgatgcccggcacatggccagcgcgctgtaccagttgtggctcggcgcgagcctgctgagcaagctgcaccgcagcccgggaccgctggaaacagccatgcagaccacccgcagcctgctggaaatctga

SEQ ID NO: 25687 - protein, 194 aa, Pseudomonas aeruginosa PAO1
MKTSYDDTRQHLLDTGYRIMAVKGFSGVGLNEILQSAGVPKGSFYHYFKSKEQFGQALLEDYFRVYLADMDQRFSAPGLNARERLMSYWQKWLDNACPPCDEQRCLVVKLSAEVADLSESMRITLRDGSDGIIERLVGCLGQGRDDGSLAPCDARHMASALYQLWLGASLLSKLHRSPGPLETAMQTTRSLLEI

SEQ ID NO: 25688 - DNA, 600 bp, Escherichia coli O157:H7 EDL933
  CDS (1)..(600): transl_table=11
atgaacaaacacaccgaacatgatactcgcgaacatctcctggcgacgggcgagcaactttgcctgcaacgtggattcaccgggatggggctaagcgaattactaaaaaccgctgaagtgccgaaagggtccttctatcactactttcgctctaaagaagcgtttggcgttgccatgcttgagcgccattacgccacatatcaccaacgactgactgagttgctgcaatccggcgaaggtaactaccgcgaccgcatactggcttattaccagcaaacactgaaccagttttgccaacatggaaccatcagtggttgcctgacagtaaaactctctgccgaagtgtgcgatctgtcagaagatatgcgtagcgcgatggataaaggcgctcgcggcgtgatcgccctgctctcgcaggctctggaaaatggccgtgatagccattgtttaaccttttgtggcgaaccgctgcaacaggcacaagtgctttacgcactatggctgggtgcgaatctgcaggccaaaatttcgcgcaattccgagccactggaaaacgcgctggcacatgtaaaaaccattattgcgacgcctgccgtttag

SEQ ID NO: 25689 - protein, 199 aa, Escherichia coli O157:H7 EDL933
MNKHTEHDTREHLLATGEQLCLQRGFTGMGLSELLKTAEVPKGSFYHYFRSKEAFGVAMLERHYATYHQRLTELLQSGEGNYRDRILAYYQQTLNQFCQHGTISGCLTVKLSAEVCDLSEDMRSAMDKGARGVIALLSQALENGRDSHCLTFCGEPLQQAQVLYALWLGANLQAKISRNSEPLENALAHVKTIIATPAV

SEQ ID NO: 25690 - DNA, 600 bp, Salmonella typhimurium LT2
  CDS (1)..(600): transl_table=11
atgaataagcaaaccgaacacgatacccgcgaacatctgctggccaccggcgagcagctttgtatgcaacggggttttaccggcatggggcttagcgagttgctcaaaaccgcccaagtgcctaaagggtcgttttatcactactttcgctcgaaagaagccttcggcgtcgccatgcttgagcgacattacgcctgctatcatcagcgtcttacggcgcacttcacctccggtcccggtaatcatcgcgatcgtcttctcgcctggtatcaggaaacgttaaagcagttttgccagcaaggcgccatcagcggttgcctgacggtgaaactgtcagcggaagtctgcgatctgtcggaggatatgcgctctacgatggataaaggggcgcaggagatcatggcactgcttgcacgcgcgctggaagatggccgtaatagccactgtttacatttcaccggccagccgttgccacaggcgcaggtactttatgccctgtggctgggcgccaatttgcaggccaaaatatcccgtagcgccgcgccgctggaaaatgcgttggcgcatgttaagaccatcattgcaacgcctgagcagtaa

SEQ ID NO: 25691 - protein, 199 aa, Salmonella typhimurium LT2
MNKQTEHDTREHLLATGEQLCMQRGFTGMGLSELLKTAQVPKGSFYHYFRSKEAFGVAMLERHYACYHQRLTAHFTSGPGNHRDRLLAWYQETLKQFCQQGAISGCLTVKLSAEVCDLSEDMRSTMDKGAQEIMALLARALEDGRNSHCLHFTGQPLPQAQVLYALWLGANLQAKISRSAAPLENALAHVKTIIATPEQ

SEQ ID NO: 25692 - DNA, 630 bp, Ralstonia solanacearum GMI1000
  CDS (1)..(630): transl_table=11
atgagcaagcaccccgaacccgtcaccgccgagggcaccgaagcccggcacgacacccgcgaccgcatcctggacgcgggggccgagctgatcctcggacggggcttctcggcggtcggcctggccgagatccttggccgcgcgcaggtgcccaagggctcgttctattactacttcgattccaaggaaaacttcggcgtcgcattgctggagcggtattttcaggattacgaggccggcgtcgttagcctgttcaacgacacgcgcatgacggcgcgtgaacggctgattcgctacttcgccgcctggatcgacctgcacgagcgcagcgcctgcgaggttacctgcctggcggtcaagctgtcgggcgaggtctccgatctgtcggagccgatgcgcaaggtgctgtcggccggcatgacgcgcatggtcgagcgtatcgccgcggccgtggaggcgggcgtggcggacggttcgctcgcgccggtggccgatccgcgcgggctggccgaagggctgtacgcgatgtggatgggcggggcgctgctggccaaggcgcaccggtcgaccgcgccgttccacggctgcgtcgcacagaccgaagggttgctggccaagccgaatcattga

SEQ ID NO: 25693 - protein, 209 aa, Ralstonia solanacearum GMI1000
MSKHPEPVTAEGTEARHDTRDRILDAGAELILGRGFSAVGLAEILGRAQVPKGSFYYYFDSKENFGVALLERYFQDYEAGVVSLFNDTRMTARERLIRYFAAWIDLHERSACEVTCLAVKLSGEVSDLSEPMRKVLSAGMTRMVERIAAAVEAGVADGSLAPVADPRGLAEGLYAMWMGGALLAKAHRSTAPFHGCVAQTEGLLAKPNH

SEQ ID NO: 25694 - DNA, 627 bp, Agrobacterium tumefaciens str. C58
  CDS (1)..(627): transl_table=11
atgaatggtcaatctgcgacgcgcacgcgtctcatttcggagggaatgcgccagctgctcgctcacgggtatgagggcgtggggatcggcccgatcctgaaggaagtggatgtcccaaaagggtcgttctattacttctttgcgagcaaggacgacttcgtggtggcggtcatcgaggcctacgagcaaaagtatgcgcatatcagggagcgacttttttcggatacatcgttgcgcgcgttgcagcgcctatcggtatattttgaaacgctggaactggagcttaagcaagacgggccttatgcaggctgcctttacggcgtcattgcgcagacttccgcaggccgtagcgctctggttcgggacgcgcttgctatttcattcgggcgatgggagacgagtattcgcgaactgctcacccaagcccaatatgaagacgatattgccggcgatgaggatgtatcggatctttgcgcttgtatcatcgaggcttacgagggtgcgcttattcgcgtgaaagccacgggcgatatagccgctttcacccggtttcgaatcaaaggcttacaaaggctgatggcgaacatgcatcacaatggccgcgtggtttctgaagacggccgttag

SEQ ID NO: 25695 - protein, 208 aa, Agrobacterium tumefaciens str. C58
MNGQSATRTRLISEGMRQLLAHGYEGVGIGPILKEVDVPKGSFYYFFASKDDFVVAVIEAYEQKYAHIRERLFSDTSLRALQRLSVYFETLELELKQDGPYAGCLYGVIAQTSAGRSALVRDALAISFGRWETSIRELLTQAQYEDDIAGDEDVSDLCACIIEAYEGALIRVKATGDIAAFTRFRIKGLQRLMANMHHNGRVVSEDGR

SEQ ID NO: 25696 - DNA, 600 bp, Shigella flexneri 2a str. 301
  CDS (1)..(600): transl_table=11
atgaacaaacacaccgaacatgatactcgcgaacatctcttggcgacgggcgagcaactttgcctgcaacgtggattcaccgggatggggctaagcgaattactaaaaaccgctgaagtgccgaaagggtccttctatcactactttcgctctaaagaagcgtttggcgttgccatgcttgagcgtcattacgccgcatatcaccagcgactggctgagttgctgcaatccggcgaaggtaactaccgcgaccgcatactggcttattaccagcaaacactgaaccagttttgccaacatggaaccatcagtggttgcctgacagtaaaactctctgccgaagtgtgcgatctgtcagaagatatgcgcagcgcgatggataaaggtgctcgcggcgtgatcgccctgctctcgcaggctctggaaaatggccgtgagaaccattgtttaaccttttgtggcgaaccgctacaacaggcacaagtgctttacgcactatggcttggcgcgaatctgcaggccaaaatttcgcgcagtttcgagccactggaaaacgcgctggcccatgtaaaaaacattattgcgacgcctgccgtttag

SEQ ID NO: 25697 - protein, 199 aa, Shigella flexneri 2a str. 301
MNKHTEHDTREHLLATGEQLCLQRGFTGMGLSELLKTAEVPKGSFYHYFRSKEAFGVAMLERHYAAYHQRLAELLQSGEGNYRDRILAYYQQTLNQFCQHGTISGCLTVKLSAEVCDLSEDMRSAMDKGARGVIALLSQALENGRENHCLTFCGEPLQQAQVLYALWLGANLQAKISRSFEPLENALAHVKNIIATPAV

SEQ ID NO: 25698 - DNA, 597 bp, Shewanella oneidensis MR-1
  CDS (1)..(597): transl_table=11
atgaaaacagaaacccaatctacccgtcagcatattctcgatatcggttactcactgatcattaaacaaggcttttcatgcttggggttagcccaattactcaaggcagctgaagtaccaaaaggctcgttttaccattactttaaatccaaagagcaattcggtgaggcattattaacgggctattttgagcaatatcaagtagagcttgatagcttatttgccaacccacagctctctggctttgatcgccaaatgcaatattggcaaaagtggctgcatgtccaacaagatggctgcatcgaccaaaaatgcttagtggttaaattaagtgccgaggtggctgatctgtctgaggctatgcgccttgttctgttaaagggttctgcaggcattattgaacgcttaacgcactgtattcaagatggtattgaagatagctccatctgtaatcaggatgcccaagcaacggcagagctgctatatcacatgtggctcggcgcaagtttgatgaataaactcggccacagtcatgtggcattaacgcgcgctcttgtaacaactgaatccattttgaagcataaaacggtgtgctag

SEQ ID NO: 25699 - protein, 198 aa, Shewanella oneidensis MR-1
MKTETQSTRQHILDIGYSLIIKQGFSCLGLAQLLKAAEVPKGSFYHYFKSKEQFGEALLTGYFEQYQVELDSLFANPQLSGFDRQMQYWQKWLHVQQDGCIDQKCLVVKLSAEVADLSEAMRLVLLKGSAGIIERLTHCIQDGIEDSSICNQDAQATAELLYHMWLGASLMNKLGHSHVALTRALVTTESILKHKTVC

SEQ ID NO: 25700 - DNA, 585 bp, Vibrio vulnificus CMCP6
  CDS (1)..(585): transl_table=11
atgaatacgaaaaccaatgacactcgccaacacattcttgacgttggctatcaactcgtcgtcaaccagggctttactgccgtgggattgtcgcaattgttgaaagaagcaggcgtgccgaaaggctcgttttatcattacttcaagtcgaaagagcaatttggccaagcattgattgaggaatattttcatcaataccttgctcgcttagaggcgcattttaaccagcaaaatgactctggttttgacaaccttatctcgtatttttctcgttggctttccattgaaaatggtgtgtgtaatgccaatcgctgtcttgtggtgaagctcagtgctgaggtatctgacctatctgaagcgatgcgtcatacactttcgcaaggtgcacaacgcgttattctggcgttggcaagcgcagtacaaactggcattgatgatggttcgatctcggtaaacaatgccacggctaccgcacaacagctttatcaacaatggctaggtgccagcttgttgaataagttaatgcaggatcaaacgcatttagaacagtgcttagccagcaccaaacagatactcaaaaggtaa

SEQ ID NO: 25701 - protein, 194 aa, Vibrio vulnificus CMCP6
MNTKTNDTRQHILDVGYQLVVNQGFTAVGLSQLLKEAGVPKGSFYHYFKSKEQFGQALIEEYFHQYLARLEAHFNQQNDSGFDNLISYFSRWLSIENGVCNANRCLVVKLSAEVSDLSEAMRHTLSQGAQRVILALASAVQTGIDDGSISVNNATATAQQLYQQWLGASLLNKLMQDQTHLEQCLASTKQILKR

SEQ ID NO: 25702 - DNA, 600 bp, Vibrio parahaemolyticus RIMD 2210633
  CDS (1)..(600): transl_table=11
atgaacgcaaaaacaaatgacacacgccaacacattctcgacgtcgggtacgaattgattgttacccgagggtttacgagtgttggactttcagagctattaaaaacggccgaagtgccaaaaggctcgttttatcattacttcaaatctaaagaacagtttggtgaggcaatgattcaagattacttcaacaagtattttgaacaattgactgcccgcttcactaataccgagctcaatggctaccaacgcttaatgagctactttgaagaaatggtaaaagtagaagatgatgtctgtaatgcaaacaaatgcttgttagtgaagctaagcgccgaagtgtcagatttatcggagcctatgcgtatcgcactgcgtcgaggcgctgataagaccattcaagctatggctgagtgtattgatgtcggtattcaagatggctctatcccaagcggtgatagcgcattgttggccagacagatttattatctttggaatggcgcaagcttactgaacaaactgtatcaagatcaggaagcgctcacgcaaagcctgacctatactcaacatctactgcaaaacacgcgtacttgcccataa

SEQ ID NO: 25703 - protein, 199 aa, Vibrio parahaemolyticus RIMD 2210633
MNAKTNDTRQHILDVGYELIVTRGFTSVGLSELLKTAEVPKGSFYHYFKSKEQFGEAMIQDYFNKYFEQLTARFTNTELNGYQRLMSYFEEMVKVEDDVCNANKCLLVKLSAEVSDLSEPMRIALRRGADKTIQAMAECIDVGIQDGSIPSGDSALLARQIYYLWNGASLLNKLYQDQEALTQSLTYTQHLLQNTRTCP

SEQ ID NO: 25704 - DNA, 621 bp, Streptomyces avermitilis MA-4680
  CDS (1)..(621): transl_table=11
atgggacgtaccagtgatgcccgggagaagatcctcaccgccgcgcagtcgctcatcgagctgcggggctactcggcgttgggtacggccgagatctgtaaggtcgcaggcgtgccgaagggcagcttctattacttcttcgagtccaaggaagcgctcgccctcgcggttctcgacgagcactgggccacccagcgccgcgagtggacccgcatcctgagcggcgaggccgagccgctccagcgcctgcggcagctcttcgaggagaccgaggccggccagcgtgccgggcagcagagctgcggcaccgtctccgggtgcatgttcgggaatctgaccctggagatgagcaaccagaccgaagccatccgtgagcgcctgcaacagatcttcgacgcgcaggtcgacatggtggaagaagtcatcatcggagcccgggagcgcggtgaagtcgccgtgagtgatactcgcgagggcgcgcgctccgttgtcgcccagctcgagggccaggtgctcttcgccaagctctacaacgacaccgggcgcctcaagcccctctggacgaactgtctcgccatcctcggtgcccgtatgcctgaggaggtgtcggccgcgaattga

SEQ ID NO: 25705 - protein, 206 aa, Streptomyces avermitilis MA-4680
MGRTSDAREKILTAAQSLIELRGYSALGTAEICKVAGVPKGSFYYFFESKEALALAVLDEHWATQRREWTRILSGEAEPLQRLRQLFEETEAGQRAGQQSCGTVSGCMFGNLTLEMSNQTEAIRERLQQIFDAQVDMVEEVIIGARERGEVAVSDTREGARSVVAQLEGQVLFAKLYNDTGRLKPLWTNCLAILGARMPEEVSAAN

SEQ ID NO: 25706 - DNA, 618 bp, Chromobacterium violaceum ATCC 12472
  CDS (1)..(618): transl_table=11
atgtcacgagccaaccattccacagacacgcgcgaacacctgctggccaccggcgaggaaatcattctcggcaaaggcttcgccgccgtcggactcgcggaaatcctgtccgcggccggcgtgcccaagggttcgttctaccattactttccatccaaggaaggctatggcgtggagatgctgcgccgttacttcctgaattacgacgaaaggctggtgctcctgctgcggccggaagccggcgacgcccgcgaatgcctgatggcctatttcaacggctggctggaccaccacaagtgcaccgagcacagccacacctgcctggctgtgaagctggccgccgaagtgtcagacctgtccgagcctatgcgcgaaacattggccgaaggcatgggcaggctgatcgcccgcctggccgacgccatccgacgcggccagcgggaaggcagcctgtgcacctacctggagccggacgaactggccgccagcctgtacagcctgtgggtgggcagcgcgctgctgtacaaggtgcagcgctcgcagcagccgatgctcaacgcctaccgactgacggaaaccatgctgatcaaacccgatttggccagctgcaagcgataa

SEQ ID NO: 25707 - protein, 205 aa, Chromobacterium violaceum ATCC 12472
MSRANHSTDTREHLLATGEEIILGKGFAAVGLAEILSAAGVPKGSFYHYFPSKEGYGVEMLRRYFLNYDERLVLLLRPEAGDARECLMAYFNGWLDHHKCTEHSHTCLAVKLAAEVSDLSEPMRETLAEGMGRLIARLADAIRRGQREGSLCTYLEPDELAASLYSLWVGSALLYKVQRSQQPMLNAYRLTETMLIKPDLASCKR

SEQ ID NO: 25708 - DNA, 624 bp, Gloeobacter violaceus PCC 7421
  CDS (1)..(624): transl_table=11
atgaccagaagcgtagaaaccaccggaactgcaaaaatcagggaaaccacgcggttgaccctgattcgtacggggctgggcattatccgcgaaaagggtttcaacaattccggccttcaggagattttgcaggcgagcggcgtgcccaagggctcgttttatcacttttttgccagcaaagaagattttggcctggccatcatcgaatacgacgcgggcgagcaccagcgggagatggagcgctttttaggcgatacttcctgtggtgccgtcgagcggttgcgccggtactttgaagccaaatgccgctatttcgagtcgcgccggcaccgcgagggttgtctgctcggcaatctcggccaggagcttgccgatcaaaacgagacctttcgggtgcgcatcgagcggttttttgccgattggtgcgcggctctggccggttgcctcaaagaggcccagaaggcgcgcgagatcccggcgcacctgagccccgacagccttgcggcctttctggtcaatagctgggaaggggcaatcacccagatgaagatcaccaagagcaccgaaccgctgcagttatttatggattttgtcttcggaatgctccttaaaccctcttcctga

SEQ ID NO: 25709 - protein, 207 aa, Gloeobacter violaceus PCC 7421
MTRSVETTGTAKIRETTRLTLIRTGLGIIREKGFNNSGLQEILQASGVPKGSFYHFFASKEDFGLAIIEYDAGEHQREMERFLGDTSCGAVERLRRYFEAKCRYFESRRHREGCLLGNLGQELADQNETFRVRIERFFADWCAALAGCLKEAQKAREIPAHLSPDSLAAFLVNSWEGAITQMKITKSTEPLQLFMDFVFGMLLKPSS

SEQ ID NO: 25710 - DNA, 591 bp, Geobacter sulfurreducens PCA
  CDS (1)..(591): transl_table=11
atggacaagaacgaaacgcgcgccacgatcattcgcatcggcaccgatctcatctcccgccagggattcaacgccaccggcatcgacgcggtgctgaaggaggcgggggtccccaagggttccttttactattatttcaggagcaaggaggagttcggcctggcggtgatcgaccatttcgccgaacgctacgaccagcggctcgacaccttcctgaacgacgaggaggtgacgccgctgaaccgcatccgcaactacctggagagcgcgctggcgcggctggagcagaaccagtgcagcaagggatgcctcatcggcaacctgggccaggaactggccgaccagcacgagcggttccgggggcggctcgacgagatttttcgttcctggaaggatcgtttcgccgcctgcctgcgggaagcccagcgggggggggagctggccccggagctcgatgccggggtggcggcggggttcatcctctcgggcctggagggggcgatcctgcggaccaaggtgatgaagtcgccccagccgctgcgggatttcatcgaaatactcttcgcttcggtgctgcgccgacaggcgtga

SEQ ID NO: 25711 - protein, 196 aa, Geobacter sulfurreducens PCA
MDKNETRATIIRIGTDLISRQGFNATGIDAVLKEAGVPKGSFYYYFRSKEEFGLAVIDHFAERYDQRLDTFLNDEEVTPLNRIRNYLESALARLEQNQCSKGCLIGNLGQELADQHERFRGRLDEIFRSWKDRFAACLREAQRGGELAPELDAGVAAGFILSGLEGAILRTKVMKSPQPLRDFIEILFASVLRRQA

SEQ ID NO: 25712 - DNA, 591 bp, Erwinia carotovora subsp. atroseptica SCRI1043
  CDS (1)..(591): transl_table=11
atggttcgtcgtacccgtgctgaaatggaagaaacacgcgctacattgctggcgaccgctcgtaaggtcttcagcgaacgcggctatgccgatacctcaatggacgatcttactgcgcaggcgagcctgacccgtggggcgctttatcaccacttcggtgacaagaaaggattgctggcggcggtggtggagcagatcgatgctgagatggatgagcgactgcaagcgatctccgataccgccgaagatgactgggaaggtttccggtgtcgctgccgtgcctatctggaaatggcgctggagccggagattcagcgcatcgtgctgcgtgatgcgcgggctgtattgggtggcgcatcgccggattcacaacggcattgcgttgagtcgatgcagcgattgatcgacaatctcatacgccaaggcgtggtggctgaagccgatccacaggcgctggcatcgttgatctacggcagtctggccgaagcggcgttttggatcgcggaaggagaggatggtaatgcgcggctggcacaaggcgttgccgcgctggaattactgctgcgtgggttgttggtcaagccacgatag

SEQ ID NO: 25713 - protein, 196 aa, Erwinia carotovora subsp. atroseptica SCRI1043
MVRRTRAEMEETRATLLATARKVFSERGYADTSMDDLTAQASLTRGALYHHFGDKKGLLAAVVEQIDAEMDERLQAISDTAEDDWEGFRCRCRAYLEMALEPEIQRIVLRDARAVLGGASPDSQRHCVESMQRLIDNLIRQGVVAEADPQALASLIYGSLAEAAFWIAEGEDGNARLAQGVAALELLLRGLLVKPR

SEQ ID NO: 25714 - DNA, 645 bp, Burkholderia pseudomallei K96243
  CDS (1)..(645): transl_table=11
ttgctagacgactggtctaatcccgcgctatcatccaccctcatgaacgccgcaaccaccgccgacgtccggcagcacattctcgacaccgccaagcccatcatgctctgcaagggcttcacgggcgtcggcctgaacgagatcctggcggcggccggcgtcccgaaggggtcgttctaccattatttcgggtcgaaagaggcgttcggcgaatcgattctcgaatcgtatttcgacgattacgtcgcgcatctcgacgaactgctcgtgcgcggccccggcgccgcgatcgatcggctgatgcgctactggacccagtggcagcagatgcagatgggcaacgaccccgaaggcaagtgcctcgtcgtcaagctcggcgccgaggtgtgcgatctgtcggaggcgatgcgcgcggcgctcgagcgcggcacgtcgcagatcgtcgcgcggctcgccgcgtgcatcgcggcggcgctcgacgacggctcgctgaaggtcgatctcgagccgcagcagacggccgcgatgctgtacgagctgtgggtcggcgcgacgctcatcgagaagatccggcgcgacggcgagccgctcgccgtcgcgatggcgagcacgcgccgggtcctcggtctgacgggcgcgcgttga

SEQ ID NO: 25715 - protein, 214 aa, Burkholderia pseudomallei K96243
MLDDWSNPALSSTLMNAATTADVRQHILDTAKPIMLCKGFTGVGLNEILAAAGVPKGSFYHYFGSKEAFGESILESYFDDYVAHLDELLVRGPGAAIDRLMRYWTQWQQMQMGNDPEGKCLVVKLGAEVCDLSEAMRAALERGTSQIVARLAACIAAALDDGSLKVDLEPQQTAAMLYELWVGATLIEKIRRDGEPLAVAMASTRRVLGLTGAR

SEQ ID NO: 25716 - DNA, 660 bp, Pseudomonas syringae pv. syringae B728a
  CDS (1)..(660): transl_table=11
atgactcagccaaccacctcgctacccactccctcactcgccaggccccggcgtcccggccggccgccaaaggttgatcgcgataatctcgagacccgcgaggcgctgctgcgccgcggtctggaagtgctcaccgaacagagtttttcggccacagggcttgattacatcctcaaggaagtcggcattcccaaagggtcgttctatcactacttccccagcaaggaagcctttggccgggcggtgctggatgagtacgcgcgctattttgcgcagcggctggaccgctggctgctggatgaagcgctttcgccactggagcgactggtcggctttgtgcagagcgccaagggcggtatggcgcgacacgactatcgacgcggttgcatggtcggcaatctgggccaggaaatcagtctgttaccggacggatttcgcgaggcactggaacagacgctgctggactggcagtcgaaactggcgggttgtctgagggctgcgcaatcaatgggcgagttggctgcagacgctgattgcgatgagctggccgcgtttttctggatcggctgggagggcgcagtgctgcgtgcccggctggttaaaagcgctacaccattgaacacgttcattgccggctaccttcgcggtttgccgcaatga

SEQ ID NO: 25717 - protein, 219 aa, Pseudomonas syringae pv. syringae B728a
MTQPTTSLPTPSLARPRRPGRPPKVDRDNLETREALLRRGLEVLTEQSFSATGLDYILKEVGIPKGSFYHYFPSKEAFGRAVLDEYARYFAQRLDRWLLDEALSPLERLVGFVQSAKGGMARHDYRRGCMVGNLGQEISLLPDGFREALEQTLLDWQSKLAGCLRAAQSMGELAADADCDELAAFFWIGWEGAVLRARLVKSATPLNTFIAGYLRGLPQ

SEQ ID NO: 25718 - DNA, 564 bp, Pseudomonas fluorescens Pf-5
  CDS (1)..(564): transl_table=11
atgaacgaaatcatgcactctgaaacccgagacatcatcctcgatgtcaccgagaaactgatctaccagaacggcattgccgccaccggcatggatcttctggtgaagaccgccggcgtctcgcgcaagagcgtctaccgctatttcaccaacaaggacgagttggtggtggccgccctggagcgtcgcgatcagcgctggatgcactggttctgcagcgcggtgaaccagaccgcgaccccggccctgcgcctgctggcgctgttcgacgtgctcaaggactggttcgcaacccccggttttcgcggctgcgcctttatcaacaccagtggcgaaaccggcgacccgcaagacccggtgcgccaagtagcaaaacggcacaagcagaacctgctcgactacgtgaccgagctttgccaggaacatggcgtgcaacatcctgaggaactggcagcgcaactgctgatcctgatcgatggcgccattaccgttgcccttgtgatgggcaatcacagtgctgctgataatgcgcaatgcatggcgcgaaagttattggacctctga

SEQ ID NO: 25719 - protein, 187 aa, Pseudomonas fluorescens Pf-5
MNEIMHSETRDIILDVTEKLIYQNGIAATGMDLLVKTAGVSRKSVYRYFTNKDELVVAALERRDQRWMHWFCSAVNQTATPALRLLALFDVLKDWFATPGFRGCAFINTSGETGDPQDPVRQVAKRHKQNLLDYVTELCQEHGVQHPEELAAQLLILIDGAITVALVMGNHSAADNAQCMARKLLDL

SEQ ID NO: 25720 - DNA, 639 bp, Psychrobacter arcticus 273-4
  CDS (1)..(639): transl_table=11
atgtctatacccaatgctataaaacatacccaaaccgatagtgcgctatctaatattgcgttatcaaacaccagagaccatctgttaacgactggctataagctcatcgcacaaaaaggttttactgcggtaggtattaagcaaatattagataccgcgggtgtaccgaaaggttctttttatcattattttgcgtcaaaagaagcctttggtgaggcgattattagtcactactttacccagtataagcagcgcttgaatattattgggtcacaagatgttagcgctcagcaaaaattatatgactattttcaaaactggtatgacacgcagcagagtggctgcgatcatgagaaatgcttggtcgtaaagcttagcgctgaagtttcggatatgtcggagccgatgcgtaaagtattacatactggctaccaacaaacgattacttggcttgcgacccaaatcaaagcaggctgggtggacggttctgtacctcatcccgctaacgtggctgctgagagtatggcaaagcgttggtattttgcatggcttggtgccagtttagttaccaagattagtcaaacggatacgccattagcagaagcatggctgatgactactaccgccatggggcgctag

SEQ ID NO: 25721 - protein, 212 aa, Psychrobacter arcticus 273-4
MSIPNAIKHTQTDSALSNIALSNTRDHLLTTGYKLIAQKGFTAVGIKQILDTAGVPKGSFYHYFASKEAFGEAIISHYFTQYKQRLNIIGSQDVSAQQKLYDYFQNWYDTQQSGCDHEKCLVVKLSAEVSDMSEPMRKVLHTGYQQTITWLATQIKAGWVDGSVPHPANVAAESMAKRWYFAWLGASLVTKISQTDTPLAEAWLMTTTAMGR

SEQ ID NO: 25722 - DNA, 624 bp, Colwellia psychrerythraea 34H
  CDS (1)..(624): transl_table=11
atgcaattagatactattaaaaaacgaagaggcagacctgcaaagtctggccgagataccactaataccaaaactgaactaatcagtagtggcgttgaacacttcacgcaatttggttttgcttcatcgggtttagatcagatattaaaaaaagtgtcggtacctaagggatctttctattattactttgctaataaagaagtttttggtttagcggtaattgactattacgacaactacttcggtcgtaaacttgattcgcacttaaaaaatgaccagttagcgcctgaacaaaggttaataagttttgttgatgatgctaaagcaggtatcgaacgctataattttaatcgtggctgtttagtgggcaacttagaacaagaaattgctgttttacctgagagccaccgagataagttagtgatggtgatgcagggctggcaaaataaaatctttgatcacctcaatgtgctttgccctgatgctgaacaagaagaacatcacttgttagcagagtttttttggattggttgggaaggtgcggtaagccgttgcaagttggttcaaacaactaagccgattgatatttttatcaatcatttcttacagttgttaaaaaaataa

SEQ ID NO: 25723 - protein, 207 aa, Colwellia psychrerythraea 34H
MQLDTIKKRRGRPAKSGRDTTNTKTELISSGVEHFTQFGFASSGLDQILKKVSVPKGSFYYYFANKEVFGLAVIDYYDNYFGRKLDSHLKNDQLAPEQRLISFVDDAKAGIERYNFNRGCLVGNLEQEIAVLPESHRDKLVMVMQGWQNKIFDHLNVLCPDAEQEEHHLLAEFFWIGWEGAVSRCKLVQTTKPIDIFINHFLQLLKK

SEQ ID NO: 25724 - DNA, 636 bp, Pseudomonas syringae pv. phaseolicola 1448A
  CDS (1)..(636): transl_table=11
atgactcaattgccggtaaaaaccagacgccccgggcggccaccgaaagtggatcgcgacaacctcgaaacccgcgaagcactgttgcgccgcggtctggaagtgctcaccgagcaaagcttctcggccaccgggctggattacatcctcaaggaaatcggcattcccaaaggctcgttctatcactacttcaccagcaaggaagccttcggccgggcggtactggatgaatacgctcgctattttgcacagcggttggaccactggctgctggacgaagcgctttcaccactggagcgactggtgggctttgtccaaagcgccaagagcggcatggcgcggcatgattatcgacgcggttgcatggtcggcaatctaggccaggaagtcggtctgttgccggaggggtttcgcggcgtactggagcagacgctgctggactggcagtcaaagcttgcatgctgcctcagggccgcgcaggcgcatggtgagttggccagaagtgcagattgcgatgaactggccgcgtttttctggatcggctgggaaggggcggtgcttcgcgcccggctggtcaaaagcgacataccactgaacacgtttattgccggttaccttcgtggtttgccgcaatga

SEQ ID NO: 25725 - protein, 211 aa, Pseudomonas syringae pv. phaseolicola 1448A
MTQLPVKTRRPGRPPKVDRDNLETREALLRRGLEVLTEQSFSATGLDYILKEIGIPKGSFYHYFTSKEAFGRAVLDEYARYFAQRLDHWLLDEALSPLERLVGFVQSAKSGMARHDYRRGCMVGNLGQEVGLLPEGFRGVLEQTLLDWQSKLACCLRAAQAHGELARSADCDELAAFFWIGWEGAVLRARLVKSDIPLNTFIAGYLRGLPQ

SEQ ID NO: 25726 - DNA, 639 bp, Dechloromonas aromatica RCB
  CDS (1)..(639): transl_table=11
atggaaactcagctttcaactccccgtaggcgtggccgaccacccaaacccagagagtatttggttgaaacacgtgatttgttgctgcgcgccggcttggaagttctgaccgagaaaggtttctcggccacaggcattgacgaaatcttgcaccgtgtcagcgttccgaaagggtctttctatcattactttgaaagcaaagaggcattcggtgcagcgttaattgcgcaatatgctcatttttttgctcgcaagattgaccattatctcagcgacaaaaccatctctccgctcgcgcgtttacgcgctttcgtagccggagctcaagccggcatggctcgtcacgattttcggcgcggctgcctcatcggaaatctgggtcaggaaatgggctccctcccagaaagcttccgcaggcagttgcaagcggttttcgacgattggcagtcaagatttgcgcgttgcctgatggcagctcaagaagctggcgagctttcacggcaagccgattgtgaacaactcgctgcttttttctggattggctgggagggtgcggtgctgagggcgaagttggaacaaagcgcagagccgcttgaagtttttgcacgaggtttttttgctgggttaccccccggctaa

SEQ ID NO: 25727 - protein, 212 aa, Dechloromonas aromatica RCB
METQLSTPRRRGRPPKPREYLVETRDLLLRAGLEVLTEKGFSATGIDEILHRVSVPKGSFYHYFESKEAFGAALIAQYAHFFARKIDHYLSDKTISPLARLRAFVAGAQAGMARHDFRRGCLIGNLGQEMGSLPESFRRQLQAVFDDWQSRFARCLMAAQEAGELSRQADCEQLAAFFWIGWEGAVLRAKLEQSAEPLEVFARGFFAGLPPG

SEQ ID NO: 25728 - DNA, 567 bp, Pseudomonas fluorescens PfO-1
  CDS (1)..(567): transl_table=11
atgaacgaaatcacacgcaacgacacaacccgagacatcattctggatgtcaccgaaaagttgatctacaaaagtggcatcgcggccaccggcatggatcttctggtgaaaaccgccggcgtttccagaaagagtatctaccgctacttcgccaacaaggaggagctgaccgtcgccgccctgcaacgccgcgacgtgcgttggatgcactggtacagaagcaccgtcgatcaggccgaaaccccggccgaccgcctgctcaacctgtttaccgtgctcaagggctggttcgcctcggaaggctttcggggctgtgccttcatcaataccagtggcgaaaccggtgatcccgaggatccggtccgcctggtcgccaaagaccacaaacagaaactgctcgactacctgtgcgagctgtgtaccgaacatggtgccgaggatccgcaactgctggccaaacagctgctgatcctgattgacggcgccattaccgtagcgcttgtgatgggtgatcacagtgccgccgataatgcgcaatgcatggcgcgaaagttattggacctgtaa

SEQ ID NO: 25729 - protein, 188 aa, Pseudomonas fluorescens PfO-1
MNEITRNDTTRDIILDVTEKLIYKSGIAATGMDLLVKTAGVSRKSIYRYFANKEELTVAALQRRDVRWMHWYRSTVDQAETPADRLLNLFTVLKGWFASEGFRGCAFINTSGETGDPEDPVRLVAKDHKQKLLDYLCELCTEHGAEDPQLLAKQLLILIDGAITVALVMGDHSAADNAQCMARKLLDL

SEQ ID NO: 25730 - DNA, 660 bp, Rhodobacter sphaeroides 2.4.1
  CDS (1)..(660): transl_table=11
atgcctctgacagacacccctccatcggttccccagaagccccgccgcggacgtccgcgtggcgctccggatgcgtccctcgctcatcaaagccttattcgcgccggcctcgaacatctgaccgagaagggatattcttcggtcggagtcgatgagatcctgaaggcagcaagagttcccaaggggagcttctatcactactttcgcaacaaggccgatttcggcctggcactcatcgaagcttacgacacctatttcgccaggcttctggatcaggctttcctcgatggaagcctcgcgccgttggcacggctgcgcctcttcaccaggatggccgaagagggcatggcccgccacggcttccggcgcggatgcctcgtcggcaacctgggccaggagatgggggcgctgcccgacgacttccgcgctgcgctcatcggggttctggagacatggcagagacgcacggcgcagctcttccgggaggcgcaggcctgcggagagctgtccgcggatcatgaccccgacgcccttgccgaggcgttctggatcggatgggagggcgcgatcctgcgcgccaagctcgagctgcggcccgacccgctgcacagtttcacccggacgttcggtcgccatttcgtgacccggacacaggaataa

SEQ ID NO: 25731 - protein, 219 aa, Rhodobacter sphaeroides 2.4.1
MPLTDTPPSVPQKPRRGRPRGAPDASLAHQSLIRAGLEHLTEKGYSSVGVDEILKAARVPKGSFYHYFRNKADFGLALIEAYDTYFARLLDQAFLDGSLAPLARLRLFTRMAEEGMARHGFRRGCLVGNLGQEMGALPDDFRAALIGVLETWQRRTAQLFREAQACGELSADHDPDALAEAFWIGWEGAILRAKLELRPDPLHSFTRTFGRHFVTRTQE

SEQ ID NO: 25732 - DNA, 639 bp, Burkholderia sp. 383
  CDS (1)..(639): transl_table=11
atggacgttcgaactgatccgcctcgccgtcgcggcaggccaccgaagcagcacgaggacctcgtcgccacgcgggacatgctgctgcgctccgggctggaagtgctcaccgagaagggcttttcggcgaccgggctcgacgagatcctcgggcgcgccggcgtgccgaagggctccttctatcactacttcgacagcaaggaagcgttcggcctcgaactgatcgaccgctatgccgacttcttcgcgcgcaagctggaccgtcatttcagcgacccggcgcgctcgccgctgcagcgcgtgcgcgcattcgtcgacgatgcccgggacggcatggcccgctacgcgtacagccgcggctgcctgatcggcaacctcgggcaggaaatgggcgcgctgcccgaaagtttccgcgcccgcctgcgcaccacgttcgaagactggcaacgccgcctcgccgaatgcctggccgccgcgcagcaaaccggtgaactgaccgattcggccgatcccgccgaactcgccgcattcttctggatcggctgggaaggcgccgtgctgcgcgcgaagctggagcgcagcgacacgccgttgaccctgttcgcgcagtttttcttcaatggactgccgcgtcgctga

SEQ ID NO: 25733 - protein, 212 aa, Burkholderia sp. 383
MDVRTDPPRRRGRPPKQHEDLVATRDMLLRSGLEVLTEKGFSATGLDEILGRAGVPKGSFYHYFDSKEAFGLELIDRYADFFARKLDRHFSDPARSPLQRVRAFVDDARDGMARYAYSRGCLIGNLGQEMGALPESFRARLRTTFEDWQRRLAECLAAAQQTGELTDSADPAELAAFFWIGWEGAVLRAKLERSDTPLTLFAQFFFNGLPRR

SEQ ID NO: 25734 - DNA, 591 bp, Geobacter metallireducens GS-15
  CDS (1)..(591): transl_table=11
atggataagaacgaaacgagagcaaccatcatccgcatcggcaccgacctcatcggccgtcaggggttcaacgccaccggcattgatgcggtgctgagggaggctggtgtacccaagggctcattctactactatttcaggagcaaggaggagttcggcctggcggtgattgaccactttgccgagcgctacgaccagcggctcgacaccttcctgaacgacgatgaggtgacaccgctgaatcggctccgtaatctgctggagagcggcctggcgcgcctggagcagaaccagtgcgccaagggatgcctcatcggcaacctggggcaggagctggccgaccagaacgaacgcttccgggcgaggctcgaagaggtgtttacctcgtggaagaagcgctacgccgcctgcctgcgggaggcccagcgtgcaggggaactggcaccggagcttgacccgtccgtggtggcgggattcattctctccggctgggaaggggctgtcctccgggccaaggtgatgaagtcgccccagcccctgcgggatttcatcgccacgctttttgcaacggtgctgcgcgagcaggtgtga

SEQ ID NO: 25735 - protein, 196 aa, Geobacter metallireducens GS-15
MDKNETRATIIRIGTDLIGRQGFNATGIDAVLREAGVPKGSFYYYFRSKEEFGLAVIDHFAERYDQRLDTFLNDDEVTPLNRLRNLLESGLARLEQNQCAKGCLIGNLGQELADQNERFRARLEEVFTSWKKRYAACLREAQRAGELAPELDPSVVAGFILSGWEGAVLRAKVMKSPQPLRDFIATLFATVLREQV

SEQ ID NO: 25736 - DNA, 636 bp, Ralstonia metallidurans CH34
  CDS (1)..(636): transl_table=11
atggctcgtacttcagacaagaccgacattccgaaccgcctgaccaaggcgggtcgcgaactgttctcccaccacggctacaacgccaccggcatccagcagatcaccgatcacgctggcgtgccgaagggctcgttttacaaccacttcgaaagcaaggaagcgttcgcggcagcgatcatcgcggaatacgccgattatctgcaccggtcatgggaagccatgatggaggacgccccgcccgagccgatggcggcgatccgctatgtcttcacgcggatgattgcctatcacgaatgctgtcccacgcaggcgggttgcctgatcggcaacttcgctgccgagatcgccttgacgagcgatacctgtcgggccgtgctgcaggacgcccagttcgcctggcgcgaacggctggccggcatgatcagcctcgcccaggcgcatggtgaaatccgtgccgatatcgcgtcagccgagctctcggggctcgtctgggatacgtgggagggcgccttgctacgtatgaagattgaacgctcggttgccccgctgcgccgcagcgtcgacctgatgttcgaccacctgttccagccggccgccgcggccggcatccaccacagtccaaccttggagtaa

SEQ ID NO: 25737 - protein, 211 aa, Ralstonia metallidurans CH34
MARTSDKTDIPNRLTKAGRELFSHHGYNATGIQQITDHAGVPKGSFYNHFESKEAFAAAIIAEYADYLHRSWEAMMEDAPPEPMAAIRYVFTRMIAYHECCPTQAGCLIGNFAAEIALTSDTCRAVLQDAQFAWRERLAGMISLAQAHGEIRADIASAELSGLVWDTWEGALLRMKIERSVAPLRRSVDLMFDHLFQPAAAAGIHHSPTLE

SEQ ID NO: 25738 - DNA, 633 bp, Alkalilimnicola ehrlichei MLHE-1
  CDS (1)..(633): transl_table=11
atgacctcagtcactgacaagccgcgccgcggccggccccccaaggtgccgcgccccgagggtgacacccgggccgcgctgatccggagcggtaccgaggtgctcaccgagcagggcttctccggcgcgggcattgacagcatcctcaggcgtgtgggggtgcccaaaggctccttctactattatttcgacagcaaggaggccttcggccacgccatcctggcgcattacggggcctatttcgcgcacaagctggactgccacctgggtaacaccacgctggcgccgctacggcggattgaggccttcgttgccgacgcccgggcgggcatggcgcgccacggctatcgccgtggctgcctggtgggcaacttggggcaggaggtgggccggctgccggaaagctatcgcgaccggctgcagagcatcctggctgactggcagcagcgactggcccgctgtctggaagaggcccgggcgtcaggcgagctggctccggccgccgactgccagcggctggccgaggccttctggatcggctgggagggtgcggtgatgcgggccagactggaggccgatgcgcggccgctggatgtctttatcaccacctatatggagggcctgccccgctga

SEQ ID NO: 25739 - protein, 210 aa, Alkalilimnicola ehrlichei MLHE-1
MTSVTDKPRRGRPPKVPRPEGDTRAALIRSGTEVLTEQGFSGAGIDSILRRVGVPKGSFYYYFDSKEAFGHAILAHYGAYFAHKLDCHLGNTTLAPLRRIEAFVADARAGMARHGYRRGCLVGNLGQEVGRLPESYRDRLQSILADWQQRLARCLEEARASGELAPAADCQRLAEAFWIGWEGAVMRARLEADARPLDVFITTYMEGLPR

SEQ ID NO: 25740 - DNA, 576 bp, Alkalilimnicola ehrlichei MLHE-1
  CDS (1)..(576): transl_table=11
atgcgcaaggacaccaagcaacgcctgctggaggtcggcctggacctgctgctgcagcacggctacaacgacctgggcgtgcaaacgctgctcaccgccagcggcgttcccaagggctcgttctatcaccatttccgcagcaaacaggactttgccctgcaggtggtggaccgatacatgcgggaggtccacgccggcctggacgcctgcctcagcgccccggagcgcgcgccgctggagcggattcacaccttcttcgcgctgtcgttggagaaatacggtcgcgagggctatcgcggctgcctgctcggcaacctgggccaggaactttccgcggccagcgatgtattccgctacaagatcgagtggtgtttcgccgagatcacggcacgaatcgcggtttgcctggaacaggcgcggctgcgcggcgacctgccgcccgacaccgacgtccaccatatggccgacctgctgctggactgctgggagggggcggcactgcgcagccgcctgcagcgggacccggcaccgttgcgggccatgctcgatttccacttcaaccacagcgccgcctga

SEQ ID NO: 25741 - protein, 191 aa, Alkalilimnicola ehrlichei MLHE-1
MRKDTKQRLLEVGLDLLLQHGYNDLGVQTLLTASGVPKGSFYHHFRSKQDFALQVVDRYMREVHAGLDACLSAPERAPLERIHTFFALSLEKYGREGYRGCLLGNLGQELSAASDVFRYKIEWCFAEITARIAVCLEQARLRGDLPPDTDVHHMADLLLDCWEGAALRSRLQRDPAPLRAMLDFHFNHSAA

SEQ ID NO: 25742 - DNA, 630 bp, Solibacter usitatus Ellin6076
  CDS (1)..(630): transl_table=11
atggccgttcaacccaaacccgaagcgcacggcacccggacccgcctgttggacgcggcgcgctaccttttctgggagaagggctacgcggccaccggcatggcggagttgctggagcgtgcccaggccaacagcggcagtttttaccacttcttcgccagtaaggaggcgctgctgctggcggtgctggagggctacctggagggtcttgacccggtggtggtgcagccggccttcgcgcggcaccgcgaccccatcgagcggattttcggaatcctggaaggctatcgcgagcggctgctctccaccgaatgccgctacggttgcccgctgggacgccttgcattggaaatcgaggccgagaacctgcccgcacaccagctcatcgcacgcaatttttccgcgtggaccggcgccgtccgcggctgcctggaggcggcgcgagatcgcctgccgcgcggcaccgatctggacgcgctcgccaccttcgtcctcaccgccatggaaggcggggtactgcagtcgcgatcgcaccggcgcatcgagcccttcgaccaatcggtggcccagttacgcaaatacttcgcctgcctgctggcgggcggcaagagaaaaggagcaaagaaatga

SEQ ID NO: 25743 - protein, 209 aa, Solibacter usitatus Ellin6076
MAVQPKPEAHGTRTRLLDAARYLFWEKGYAATGMAELLERAQANSGSFYHFFASKEALLLAVLEGYLEGLDPVVVQPAFARHRDPIERIFGILEGYRERLLSTECRYGCPLGRLALEIEAENLPAHQLIARNFSAWTGAVRGCLEAARDRLPRGTDLDALATFVLTAMEGGVLQSRSHRRIEPFDQSVAQLRKYFACLLAGGKRKGAKK

SEQ ID NO: 25744 - DNA, 597 bp, Shewanella sp. ANA-3
  CDS (1)..(597): transl_table=11
atgaaaacagaaacccaatcgacgcgtcagcatattctcgacgttggatactcactgatcctcaaacaaggcttttcgtgcctaggtttagcccaattactcaaggcagcccaagtacctaaaggctcgttttatcactactttaaatccaaagagcaattcggtgaggccttgttagcagggtattttgagcaataccaagcagaactcgatagcctgctcaacgagactcaactctcaggctttgagcgccaaatgcagtactggcaaaaatggttgcacgtgcagcaggacggttgtgtcgatcaaaaatgcctagtcgttaagttaagtgcagaggtagccgatctctctgaggccatgcgccttgtgcttttaaaaggctcggctggcatcatcgagcgcctaacccagtgcattcaggcggggattgccgataaatccatctgtgaacaggatgcccaggcaacggcagagttgctgtatcacatgtggcttggcgccagtttgatgaataaactcggccacagccatgccgctttagcgcgcgcccttgcagtgaccgaatctattttaaagaccaaaaccatgggttaa

SEQ ID NO: 25745 - protein, 198 aa, Shewanella sp. ANA-3
MKTETQSTRQHILDVGYSLILKQGFSCLGLAQLLKAAQVPKGSFYHYFKSKEQFGEALLAGYFEQYQAELDSLLNETQLSGFERQMQYWQKWLHVQQDGCVDQKCLVVKLSAEVADLSEAMRLVLLKGSAGIIERLTQCIQAGIADKSICEQDAQATAELLYHMWLGASLMNKLGHSHAALARALAVTESILKTKTMG

SEQ ID NO: 25746 - DNA, 639 bp, Azoarcus sp. BH72
  CDS (1)..(639): transl_table=11
atggatgcgccgccccttaccccccgtcgccgcggcaggcccccgaagcagcgggaagacctgatcggaacacgtgaattgctgttgcgtgcgggcctggaagtgctcaccgaaaaggggttctccgccaccggcatcgaggaaatcctgggtcgggtaaacgtgcccaagggctcgttctaccattacttcgacagcaaggaatccttcggcctggaactcatccagcgctatggcgagtttttcgcgaggaagctggaccgccacctgctgaacgacgcgctttcgccgctcgatcgcctgcgcgccttcgtcgccgatgcgaaagacggcatggcgcggcacgcctaccgccgcggctgcctgatcggaaacctcgggcaggagatgggcgcgctgcccgaaagcttccgcgccagcctgaaagagaccttcgaagactggcagacccgtttttccacctgtctgatggcagcccagcaggccggagaactgtccccctgcgcgaatccgccacaactcgccgccttcttctggatcggctgggagggtgcggtgctgcgcgccaagctcgagcaatccgccgcgccgctcgacgtttttgccgatttcttctttgcgggtttgccgcccgcctga

SEQ ID NO: 25747 - protein, 212 aa, Azoarcus sp. BH72
MDAPPLTPRRRGRPPKQREDLIGTRELLLRAGLEVLTEKGFSATGIEEILGRVNVPKGSFYHYFDSKESFGLELIQRYGEFFARKLDRHLLNDALSPLDRLRAFVADAKDGMARHAYRRGCLIGNLGQEMGALPESFRASLKETFEDWQTRFSTCLMAAQQAGELSPCANPPQLAAFFWIGWEGAVLRAKLEQSAAPLDVFADFFFAGLPPA

SEQ ID NO: 25748 - DNA, 741 bp, Kineococcus radiotolerans SRS30216
  CDS (1)..(741): transl_table=11
gtgccgaggctagggcatcggccccgcccgcgaggatcacgtccgggccgagcggacgcggcccgccccggggggccgctgtggcacgctgtccccgtgagcgaacacgtggtggaaccaaccgccccgcgccgcggacggcccccggcctcctctcgtgcggagatcgagaccgtggccgtcgaactcttcctgacccggggtttcgaggagaccacgctggcggagatcaccgccgcggccggggtgagcaagacgagcttcttccgctacttcccctccaaggcctccatcgtgtggtggcgcttcgacgagtacaccgcgggtttcgcgcggctgctggaggagtcccgcgaccgcggcgacgccaccatggacctcgtccgcgccgccgtcgtcggcgcggtccagcgggtcatcgacgaccaggggctgtggatgcagcgcttccgcgtcctggaggagtcgagcgaactgcgctcgggggagtcccagcagtgggcggagtggcgcgagcacgtcgccgcgttcgtcgcgcaccgccacggcctcgccgcccccgacgtcgtgccgcaggccgtggccggggccgtgcacgccgcctacctctcggtgctgcgccgctggctgggcgtggagcagcccggcccgcagctcctgccggacctcgaccgggacctgcggtcgctgtgcgacgtcctgcagggctggctgaacaccgcaccccgtcccgagggctga

SEQ ID NO: 25749 - protein, 246 aa, Kineococcus radiotolerans SRS30216
MPRLGHRPRPRGSRPGRADAARPGGPLWHAVPVSEHVVEPTAPRRGRPPASSRAEIETVAVELFLTRGFEETTLAEITAAAGVSKTSFFRYFPSKASIVWWRFDEYTAGFARLLEESRDRGDATMDLVRAAVVGAVQRVIDDQGLWMQRFRVLEESSELRSGESQQWAEWREHVAAFVAHRHGLAAPDVVPQAVAGAVHAAYLSVLRRWLGVEQPGPQLLPDLDRDLRSLCDVLQGWLNTAPRPEG

SEQ ID NO: 25750 - DNA, 594 bp, Sulfitobacter sp. EE-36
  CDS (1)..(594): transl_table=11
atgacagagcaaaagaaatcagatcaaacgcggcaaaagatactgaccgccggacgtgcgctgatcagcaagcacgggtttggcgcggtcgggctggcgcgcatcctgagggaaagtgaagtccccaaggggtcgttctattattactttccgtccaaggatgcctttggtcaggctttgctgcacgactatgtcgacgattatctggcgcgcatggatgcgctgtgcagtgggtcgggttctgcccgtgacaagctgttgtccttctggtcggcgtggcttgcccatgcccattccgaagggatcgccaaccagtgcctcgttgtgaagcttggggccgaggttgccgatctgtccgacgacatgcggcgcatcttggatgatggcgtggctcagttggtcagccgcattgcgcaactgctggttgccggggccgaagaaggctccgtcccgccggtcgatgatccgcgggcagtagcgcagatgctctatgccaagtttctgggggccgcgatcctgtcgaaactgtcgcaggatcaggtcccgttgcagcaggctttgtcagaaaccaccgattttctaaccatacaataa

SEQ ID NO: 25751 - protein, 197 aa, Sulfitobacter sp. EE-36
MTEQKKSDQTRQKILTAGRALISKHGFGAVGLARILRESEVPKGSFYYYFPSKDAFGQALLHDYVDDYLARMDALCSGSGSARDKLLSFWSAWLAHAHSEGIANQCLVVKLGAEVADLSDDMRRILDDGVAQLVSRIAQLLVAGAEEGSVPPVDDPRAVAQMLYAKFLGAAILSKLSQDQVPLQQALSETTDFLTIQ

SEQ ID NO: 25752 - DNA, 594 bp, Roseovarius nubinhibens ISM
  CDS (1)..(594): transl_table=11
gtggcacataccaaaggcgagacggcgcgggaccggctgctgcgggcggcggaagagctgttttaccaagacgggatcgtggcgaccggcattgaccggatcatagagcgtgccggggtcgcaaagcagagcctttacaacaatttcgcctccaaatcggcgctgatcgaggcctatatcgaggcgcgtcatgccgagtggctggggtttcatgcggcgcgggttgaggggctcgatgatccgcaggcgcggatcttggcggtggtcgatgcctatgccgatcacgcgaatttcgcctatgagcgcgggtttcgcggctgtgggctgctcaacgcggcggcggaattgctgcccggggatccggggcgcgcggcagtgcggcggcataaggaagaggtcgaagcgatcctgcggtccgagcttgccgagatctgcggcgaggcggcggcggcgcgctatgcgcggcagttcgcctttctcatcgagggggcgatggtgcgcgcggggcttgagggcagcgatgcctgtctgcgcgagatgcgcgacatgttgagtgtgatgatgccggggcaaggcccagtgggtgaggggtaa

SEQ ID NO: 25753 - protein, 197 aa, Roseovarius nubinhibens ISM
MAHTKGETARDRLLRAAEELFYQDGIVATGIDRIIERAGVAKQSLYNNFASKSALIEAYIEARHAEWLGFHAARVEGLDDPQARILAVVDAYADHANFAYERGFRGCGLLNAAAELLPGDPGRAAVRRHKEEVEAILRSELAEICGEAAAARYARQFAFLIEGAMVRAGLEGSDACLREMRDMLSVMMPGQGPVGEG

SEQ ID NO: 25754 - DNA, 600 bp, Vibrio sp. Ex25
  CDS (1)..(600): transl_table=11
atgaacgcaaagacgaacgacacacgccaacatattctcgacgtcggatacgagttaatcgtaaaccgagggtttacgagtgttggcctttcagagcttttaaaaaaggccgcggtgccgaaaggctcgttttatcattacttcaaatccaaagaacaatttggtgaagcgatgattcaagactactttactaagtattttgagcgtttaaacgcacgctttaccaataccgatctgaatggctaccaacgcctgatgagctactttgaagaaatggtcaaagtagaagacgacgtatgtaatgcgaacaaatgtttgttggtcaagttaagtgcggaagtctccgatctctcagagtccatgcgtctagcgttacgccaaggtgcagacaaaaccattcaagcaatggcggattgcattgacgtaggcattcaagatggctctatcccaaatggtgacagtgctttattggcaaggcagatatactacctttggaacggcgcaagcttgctgaacaaactgtatcaagatcaggcagcattaacgcaaagtctgacctatactcaacatctactgcaaaacacgcgaacttgcccatag

SEQ ID NO: 25755 - protein, 199 aa, Vibrio sp. Ex25
MNAKTNDTRQHILDVGYELIVNRGFTSVGLSELLKKAAVPKGSFYHYFKSKEQFGEAMIQDYFTKYFERLNARFTNTDLNGYQRLMSYFEEMVKVEDDVCNANKCLLVKLSAEVSDLSESMRLALRQGADKTIQAMADCIDVGIQDGSIPNGDSALLARQIYYLWNGASLLNKLYQDQAALTQSLTYTQHLLQNTRTCP

SEQ ID NO: 25756 - DNA, 636 bp, Alteromonadales bacterium TW-7
  CDS (1)..(636): transl_table=11
atgaacaaaaataatacagtatctccacgacgtggccgtcctcctaaaatagccagagataacgccgatactaaagcgttacttatacgtacgggtttagaaacgttaacagagtttggctttagtgccacaggactcgatacaatattaaaaaaagcctcagtacccaaaggctctttttaccattactttaaaagcaaagaagcctatggcattgcgttggttgacgcctacgacagttactttattgcaaagctaaaccattacctcgatcaacaaaatattcccccactggaacgcatagtaaactttacacaaagtgccattaaaggcatgggtaagtacgattacaaacgcggttgcttagtcggtaatttaaaccaagaattaaatcacttgagcgacgaatttaaaaatcgcttaatgcaaagctacacagcttggcaattacaaattgaaaattgtttgaatcaagctaaacagcaaggcactatttctaaaactgtaaatacacgattaatgagcgagtacttttggattggttgggaaggcgcagtaatgcgagcaaaacttactaagtcaagtacaccccttacgttatacactgaaatgtttttgcgtgcattacttacataa

SEQ ID NO: 25757 - protein, 211 aa, Alteromonadales bacterium TW-7
MNKNNTVSPRRGRPPKIARDNADTKALLIRTGLETLTEFGFSATGLDTILKKASVPKGSFYHYFKSKEAYGIALVDAYDSYFIAKLNHYLDQQNIPPLERIVNFTQSAIKGMGKYDYKRGCLVGNLNQELNHLSDEFKNRLMQSYTAWQLQIENCLNQAKQQGTISKTVNTRLMSEYFWIGWEGAVMRAKLTKSSTPLTLYTEMFLRALLT

SEQ ID NO: 25758 - DNA, 645 bp, Escherichia coli B
  CDS (1)..(645): transl_table=11
atgacaggcgaaaatcgtggccggggaaggccgcgaaagacagaaagtacctatgcagatactcgtaatgatctgatccgcagcggccttgaactactgacgcagaatggttttcttgcgacgggagtcgatgccattgttaaaaatgccaatgtccctaaaggctcattttattactactttaagagtaaagaggattatgctcagaccgttctgaacgcctatgacagtttcttcgagcataaactcaaaaaacatctacatgaatcatcctgcacaccgatggtacgtctggaaaatttcatcaatgatgcctgtgaggggattaaaaaatacaattttacccgcggctgcctggttggaaatatgatgcaggagactccggggcttccccaatcctttattaaagtgctacagaatattcttgagagctggcaggcacttgttgcggcctgcctgtccgacgcgttatcttcaggcgaaataagttcaaatatgaataatacacaactggcggctattttctggagtggctgggaaggtgcggtaatgcgttccaaactatattgttctactgagcctgtgtacgacttctggagctatttcaaaactgatcctacccacgtaatatggacacaggcctaa

SEQ ID NO: 25759 - protein, 214 aa, Escherichia coli B
MTGENRGRGRPRKTESTYADTRNDLIRSGLELLTQNGFLATGVDAIVKNANVPKGSFYYYFKSKEDYAQTVLNAYDSFFEHKLKKHLHESSCTPMVRLENFINDACEGIKKYNFTRGCLVGNMMQETPGLPQSFIKVLQNILESWQALVAACLSDALSSGEISSNMNNTQLAAIFWSGWEGAVMRSKLYCSTEPVYDFWSYFKTDPTHVIWTQA

SEQ ID NO: 25760 - DNA, 588 bp, Marinobacter sp. ELB17
  CDS (1)..(588): transl_table=11
atgacgacgaacgacacacgcaatcttattattcaaacaggcgctgaccttatcggcacgaagggctttggtgcaaccggcatcaatggcatcctcacggttgcgggcgtacctaaagggtcgttctatcattattttagcagcaaaaatgacttcggcctcgcgatcattgataccttcgccgacgaatacgatgcgaagctggaccggatgctcaacgacagtagtcgttcctgcgtggatcgcctgcgcgcctacttcgatattggctttgaaaacatgaccaactgcgactgtacccgtggttgcctgattggcaacttaggacaggagcttgcagggcaaaatgagaccttccgcgttcgactggataaggtattcaccggctgggaaaaacgcttcgaacgttgcatagccgaagcacaaaccgccggcgacattgactcctgcattgacccttcagatgctgccagtgttttgttgtctggttgggaaggcgccattctgaggtcaaaagttgtgaaatcaacggatcccatggaacggtttgcacgtgtatttttcactcagtatcttggcattgtctga

SEQ ID NO: 25761 - protein, 195 aa, Marinobacter sp. ELB17
MTTNDTRNLIIQTGADLIGTKGFGATGINGILTVAGVPKGSFYHYFSSKNDFGLAIIDTFADEYDAKLDRMLNDSSRSCVDRLRAYFDIGFENMTNCDCTRGCLIGNLGQELAGQNETFRVRLDKVFTGWEKRFERCIAEAQTAGDIDSCIDPSDAASVLLSGWEGAILRSKVVKSTDPMERFARVFFTQYLGIV

SEQ ID NO: 25762 - DNA, 645 bp, Moritella sp. PE36
  CDS (1)..(645): transl_table=11
atggaaaatatgacaagcaatcagcctaaacctcgccgaggtcggccaccaaaagtagcccgtgaaaacagcgatactcgcgccctgctcattcgcagtggtgtggaagtattaacggaaagtggctttgccgctgctggtatcgatggcattctaaaaaaagtcggtgtaccgaaaggatctttttatcattactttaaaagtaaggaagatttcggtcaggccgtcattgataactacgccaattactttgctgtaaagctagataaatgcttacttgatgagtctatcgcaccgttacagcgtattgtacaatttgcagatggcgccaaacgaggcattgttaaatttgaatttaaacgcggctgtttagtcggtaatttaggtcaagaagtggctattttaccacacagttatcgccgaatactgcaaaacatctttgcagtgtggcagaccaagatgcaagcgtgtttagagacagctcagcaacaaggtgatatcaagcaaaatatcaactgtgcacaacaagcagaatacttttggatcggttgggaaggcgcagtgatgcgggcgcgacttgtacagtcagtgcaaccgttagatttatacatcgcgacctttattgccagtatcgccaccagctaa

SEQ ID NO: 25763 - protein, 214 aa, Moritella sp. PE36
MENMTSNQPKPRRGRPPKVARENSDTRALLIRSGVEVLTESGFAAAGIDGILKKVGVPKGSFYHYFKSKEDFGQAVIDNYANYFAVKLDKCLLDESIAPLQRIVQFADGAKRGIVKFEFKRGCLVGNLGQEVAILPHSYRRILQNIFAVWQTKMQACLETAQQQGDIKQNINCAQQAEYFWIGWEGAVMRARLVQSVQPLDLYIATFIASIATS

SEQ ID NO: 25764 - DNA, 588 bp, Magnetospirillum gryphiswaldense
  CDS (1)..(588): transl_table=11
gtggcgcccgaaaatacggatacacgcacagccctggttcgcgccggagtggaattgctgaccgagcagggattcgtctccaccggcatcgatcaggtgctgaagaaagtgggggtgcccaagggctcgttctatcactacttcgccagcaaggatgatttcggctttgccgtcatccatgcctatggcgcctatttcgccgccaagctggatcgctggctggccaatccggcccgactgccgctgcaaggtctggccgatttcgtcgccgacgccaaggccggcatggcccggttcgattttcgccgaggctgtctggtcggcaatctgggccaggaattgggcggaagccacgatgcattccgctgccgcctcgatgccatcatgatggattggcaggcccgcgtcgccgcctgcctgcggcaggcccgcgccgccggccagatcaagcccgacaccgattgcgagcgcatggccgagttcttctggaccgggtgggaaggcgccattttgcgggccaagctgacccgctcaacccggcccatggacgtgttcgccgaaacatttttcacgcttctaacggagtag

SEQ ID NO: 25765 - protein, 195 aa, Magnetospirillum gryphiswaldense
MAPENTDTRTALVRAGVELLTEQGFVSTGIDQVLKKVGVPKGSFYHYFASKDDFGFAVIHAYGAYFAAKLDRWLANPARLPLQGLADFVADAKAGMARFDFRRGCLVGNLGQELGGSHDAFRCRLDAIMMDWQARVAACLRQARAAGQIKPDTDCERMAEFFWTGWEGAILRAKLTRSTRPMDVFAETFFTLLTE

SEQ ID NO: 25766 - DNA, 633 bp, Morganella morganii
  CDS (1)..(633): transl_table=11
atgacagcaataatgacaaagccgaaacggggacgaccgccgaaaaaccatgatgcaggtaccgatgtaaaagaaatattgatccgcagcggtacggaggtgtttaccgaaacaggatatatgacgtcagatatcagcagaatattaacaaaagccggtattccgaagggatctttttattattactttggcagtaaagaaaatttcggtgtgaaagtgatacgtcattatgaccgctgtttttctcatctgctggataaatgtctgtctgataccacattgccgccaccggaaagattattgacattttgcaggattgccaaatccggaatggaaaaatatcactggcagcgcgggtgtctgatcggcaatctcgggcaggaagttatcagtctgccggccgggtattgtgaattactcaatgacattattaccggctggcaaaagaaagtggagaattgtcttctggaagcacaggcgcaaaattttatttccggaaatactgactgcaggcagatggcggcttttttctgggcgggctgggaaggggcggtcatgcgtgccaaactgacccgtaacggtgaaccgctggatctgtttattacaatttttatgaagcagatactggtataa

SEQ ID NO: 25767 - protein, 210 aa, Morganella morganii
MTAIMTKPKRGRPPKNHDAGTDVKEILIRSGTEVFTETGYMTSDISRILTKAGIPKGSFYYYFGSKENFGVKVIRHYDRCFSHLLDKCLSDTTLPPPERLLTFCRIAKSGMEKYHWQRGCLIGNLGQEVISLPAGYCELLNDIITGWQKKVENCLLEAQAQNFISGNTDCRQMAAFFWAGWEGAVMRAKLTRNGEPLDLFITIFMKQILV

SEQ ID NO: 25768 - DNA, 663 bp, Streptomyces ansochromogenes
  CDS (1)..(663): transl_table=11
gtggctcagcaggaccgagccgtccggacccggcgcgccgtgctgcgggccgcggcagcggtcttcgccgagcgcggatacgcggccgccaccatatccgagatcctcaagcgggccggtgtcaccaagggcgccctgtacttccacttcgactccaaggcggccctcgcccaaggggtgttacaggaacagctgacgcccgagtaccacctgccgcgggagctgaagttacaggagtgggtggacgcggggatggccctggccaggcggctgccccgggaacccttcctgctcgccggcgtccggatctccgccgaccggcccggccgtgacgtgctcggcagcgcctggccggcctgggcgcgactgacctcgcacgcgctcaccgaggccaagaaacggggcgaggtgctgccgcacgtggtgcccgaggagacggcccaggtgttcctcggcgcctgggtgggcgcgcagttcgtctcgcagaccctcgccggctgggcggacctggacgaccgcacggcggcgctgtacggccacctcctcgccgcgatcgcggccccgcccgtcctcacccggctggacaccgcgccggaccgcggcgcccgggtgatcgccgaggcccggcggcggtccgaggacctgtcgggcatcgcctgctga

SEQ ID NO: 25769 - protein, 220 aa, Streptomyces ansochromogenes
MAQQDRAVRTRRAVLRAAAAVFAERGYAAATISEILKRAGVTKGALYFHFDSKAALAQGVLQEQLTPEYHLPRELKLQEWVDAGMALARRLPREPFLLAGVRISADRPGRDVLGSAWPAWARLTSHALTEAKKRGEVLPHVVPEETAQVFLGAWVGAQFVSQTLAGWADLDDRTAALYGHLLAAIAAPPVLTRLDTAPDRGARVIAEARRRSEDLSGIAC

SEQ ID NO: 25770 - DNA, 663 bp, Streptomyces tendae
  CDS (1)..(663): transl_table=11
gtggctcagcaggaccgagccgtccggacccggcgcgccgtgctgcgggccgcggcagcggtcttcgccgagcgcggatacgcggccgccaccatctccgagatcctcaagcgggccggtgtcaccaagggcgccctgtacttccacttcgactccaaggcggccctcgcccaaggggtgttgcaggaacagctgacacccgagtaccacctgccgcgcgagctgaagttacaggagtgggtggacgcggggatgaccctggccagacggctgccccgggaacccttcctgctcgccggcgtccggatctccgccgaccggcccggccgcgaggtgctcggcagcgcctggccggcctggtcacggctgacctcgcacgtgctcaccgaggccaagaagcggggcgaggtgctgccgcacgtggtgcccgaggagacggcccaggtgttcctcggcgcctgggtgggcgcgcagttcgtctcgcagaccctcgccggctgggaagacctggacgaccgcacggcggcgctgtacagccacctcctcggcgcgatcgcggccccgcccgtcctcacccggctggacaccgcgccggaccgcggtgcccgggtgatcgccgaggcccggcggcggtccggggacctgtcgggcatcgcctgctga

SEQ ID NO: 25771 - protein, 220 aa, Streptomyces tendae
MAQQDRAVRTRRAVLRAAAAVFAERGYAAATISEILKRAGVTKGALYFHFDSKAALAQGVLQEQLTPEYHLPRELKLQEWVDAGMTLARRLPREPFLLAGVRISADRPGREVLGSAWPAWSRLTSHVLTEAKKRGEVLPHVVPEETAQVFLGAWVGAQFVSQTLAGWEDLDDRTAALYSHLLGAIAAPPVLTRLDTAPDRGARVIAEARRRSGDLSGIAC

SEQ ID NO: 25772 - DNA, 597 bp, Mycobacterium sp
  CDS (1)..(597): transl_table=11
atggcacgcacaccagttcggcaacacctcgttgagaagggcacgcaggtgttccttgaacgtggttactccgggtcagcggtgcaggacatcacggcagcggccgaagtgcctaaaggctcgttctacaatcacttcgaaagtaaggaagcattcggcggtcaggttttgcaagaatttttttctgacctgcaacgaacgatatcgtcgactttggaagacgctagcgtaccgccggtccggagactgcagaactattttgcagcaattattgaaactctagacgggcaaggctgcctgatcggaaatttcagcgtagaactcagcccgttgagtgatgtcgttagaacagaactcttgcgcatcttcgagcaatgggtgaagccattccaaaaatgtataattgaagggcaggaaacggggtcgatccgccgcgatttggctccagatctgttggccgacttcttgattgcctcctggcaaggtgccatcctgcggatgaagatcgaacgcaaccgcgagccattagatcagttcctgactgtagtgttcgaggcgctcctgccatccacagagaacatttccaacgaatcctga

SEQ ID NO: 25773 - protein, 198 aa, Mycobacterium sp
MARTPVRQHLVEKGTQVFLERGYSGSAVQDITAAAEVPKGSFYNHFESKEAFGGQVLQEFFSDLQRTISSTLEDASVPPVRRLQNYFAAIIETLDGQGCLIGNFSVELSPLSDVVRTELLRIFEQWVKPFQKCIIEGQETGSIRRDLAPDLLADFLIASWQGAILRMKIERNREPLDQFLTVVFEALLPSTENISNES

SEQ ID NO: 25774 - DNA, 600 bp, Escherichia coli O6
  CDS (1)..(600): transl_table=11
atgaacaaacacaccgaacatgatactcgcgaacatctcctggcgacgggcgagcaactttgcctgcaacgtggattcaccgggatggggctaagcgaactcctaaaaaccgctgaagtgccgaaagggtccttctatcactactttcgttctaaagaagcgtttggcgttgctatgcttgagcgccattacgccgcatatcaccagcgactgactgagttgctgcaatccggcgaaggtaactaccgcgaccgcatactggcttattaccagcaaacactgaaccagttttgccaacatggaaccatcagtggttgcctgacagtaaaactctctgccgaagtgtgcgatctgtcagaagatatgcgcagcgcaatggataaaggggctcgcggcgtgatcgccctgctctctcaggcgctggaaaatggccgtgagaaccattgtttaaccttttgtggcgaaccgctgcaacaggcacaagtgctttacgcactgtggcttggcgcgaatctgcaggccaaaatttcgcgcagtttcgagccactggaaaacgcgctggcccatgtaaaaaacattattgcgacgcctgccgtttag

SEQ ID NO: 25775 - protein, 199 aa, Escherichia coli O6
MNKHTEHDTREHLLATGEQLCLQRGFTGMGLSELLKTAEVPKGSFYHYFRSKEAFGVAMLERHYAAYHQRLTELLQSGEGNYRDRILAYYQQTLNQFCQHGTISGCLTVKLSAEVCDLSEDMRSAMDKGARGVIALLSQALENGRENHCLTFCGEPLQQAQVLYALWLGANLQAKISRSFEPLENALAHVKNIIATPAV

SEQ ID NO: 25776 - DNA, 20 bp, Artificial sequence
  primer
atgaacactgacaaacctac

SEQ ID NO: 25777 - DNA, 21 bp, Artificial sequence
  primer
tcagcgttcgatgccagtcag

SEQ ID NO: 25778 - protein, 177 aa, Artificial sequence
  consensus sequence
  Variant (2)..(7): Xaa in position 2 to 7 is any amino acid
  Variant (9)..(15): Xaa in position 9 to 15 is any amino acid
  Variant (17)..(20): Xaa in position 17 to 20 is any amino acid
  Variant (22)..(30): Xaa in position 22 to 30 is any amino acid
  Variant (38)..(39): Xaa in position 38 to 39 is any amino acid
  Variant (41)..(41): Xaa in position 41 is any amino acid
  Variant (44)..(74): Xaa in position 44 to 74 is any amino acid
  Variant (75)..(78): Xaa in position 75 to 78 is any or no amino acid
  Variant (80)..(95): Xaa in position 80 to 95 is any amino acid
  Variant (96)..(103): Xaa in position 96 to 103 is any or no amino acid
  Variant (105)..(108): Xaa in position 105 to 108 is any amino acid
  Variant (110)..(111): Xaa in position 110 to 111 is any amino acid
  Variant (113)..(119): Xaa in position 113 to 119 is any amino acid
  Variant (120)..(120): Xaa in position 120 is any or no amino acid
  Variant (122)..(150): Xaa in position 122 to 150 is any amino acid
  Variant (151)..(166): Xaa in position 151 to 166 is any or no amino acid
  Variant (168)..(175): Xaa in position 168 to 175 is any amino acid
RXXXXXXGXXXXXXXGXXXXGXXXXXXXXXVPKGSFYXXFXSKXXXXXXXXXXXXXXXXXXXXXXXXXXXXXXXXXXXRXXXXXXXXXXXXXXXXXXXXXXXXCXXXXLXXEXXXXXXXXRXXXXXXXXXXXXXXXXXXXXXXXXXXXXXXXXXXXXXXXXXXXXXAXXXXXXXXGA

SEQ ID NO: 25779 - protein, 33 aa, Artificial sequence
  protein pattern
  Variant (2)..(11): Xaa in position 2 to 11 is any amino acid
  Variant (12)..(13): Xaa in position 12 to 13 is any or no amino acid
  Variant (20)..(21): Xaa in position 20 to 21 is any amino acid
  Variant (23)..(23): Xaa in position 23 is any amino acid
  Variant (24)..(24): Xaa in position 24 is Asn or Ser
  Variant (26)..(26): Xaa in position 26 is Ala, Asp, Glu, Asn or Gln
  Variant (27)..(28): Xaa in position 27 to 28 is any amino acid
  Variant (29)..(29): Xaa in position 29 is Ala, Gly or Val
  Variant (30)..(30): Xaa in position 30 is any amino acid
  Variant (31)..(31): Xaa in position 31 is Ala, Glu, Gln, Ser or Thr
  Variant (32)..(32): Xaa in position 32 is any amino acid
  Variant (33)..(33): Xaa in position 33 is Ile, Leu or Val
GXXXXXXXXXXXXPKGSFYXXFXXKXXXXXXXX

SEQ ID NO: 25780 - DNA, 594 bp, Azotobacter vinelandii
  CDS (1)..(594): transl_table=11
atgagtaccaacctgatgtcccaggcgctggctgtggatgccgcgcgaagggcacgggcgaaagggcagaagccagtcgccctgtggctgaccggcctgagtggggcgggtaaatcgaccattgccaatgcgctcgaactggcgctggtcgaacgcggacggcatacctatctgctggacggcgacaatgtgcgcatggggctgtgtcgcgatctcggattcagcgatgccgaccgcgaagaaaacatacgccgtgtcgccgaagtggcccacctgttcgtggatgccggtctgatcgtgatcagcgctttcatttccccgttccggcgggatcgggccatcgcccgggaagtcatcggcaacggagccttcatcgagatcttcgtggacacgccgctggccgagtgcgagcgtcgcgatcccaaggggttgtatggcaaggctcgccaggggttgatcaagaatttcacgggcatcgattcggcctacgagccgccggtcgatccgcacatccgcatcgataccctgaaggacgatttgccgacggcggtggcccggatactggactatctggacaagtgggagagggcatga

SEQ ID NO: 25781 - protein, 197 aa, Azotobacter vinelandii
MSTNLMSQALAVDAARRARAKGQKPVALWLTGLSGAGKSTIANALELALVERGRHTYLLDGDNVRMGLCRDLGFSDADREENIRRVAEVAHLFVDAGLIVISAFISPFRRDRAIAREVIGNGAFIEIFVDTPLAECERRDPKGLYGKARQGLIKNFTGIDSAYEPPVDPHIRIDTLKDDLPTAVARILDYLDKWERA

SEQ ID NO: 25782 - DNA, 1857 bp, Ciona intestinalis
  CDS (1)..(1857)
atggcaagtgcaactgcgaatcatggggatgacattcaagaaaagccacctatgtcgtcaaacatcgtttaccaacagcaccatgtgtctcgggatgagaggggtcaggtcatgggaaaaggtgccttccgtggctgcaccgtttggtttactgggttgtcgggcgctggtaaaagtacgttgtccatgaaattggaagagtatctttgctccaagggtatcccagcttacagtttggatggtgacaacataagacatggcttgaacaaggacctcggtttcgcaccagcagatcgtgaagagaatatccgaagaattggagaagttgcaaagctatttgccgatgctggtgtagtgtgtcttgtctcatttatctctccttacaggaaggacagacaaagtgcacgaagggtgcacaacaaatccaacttaccattcattgaagtctttgtggacacaccactgcaagtgtgtgaggggcgggacgtgaaaggcttgtataagaaagcaaggcagggccaaattaaagggttcactggtatcgattctccttacgaaccaccagaaaatgctgaggttgtcacaaaaacggccgacatgccagttgaagattgtatgatgcttgttgtgaaagaactcatggagaggaacatcatcccatgcgaaaccacactcccagtaatggaactctttacctcacatagtcaggttgggaagaagagagcagaagcagaagctcttccttcaattgacattactaagctggatatgcagtggctacaagttttatccgagggttgggcgactccactcacaggttttatgcgcgaacgtgaattcttacagtgccaacacttcggctgcttgcttaagaatgaaccgattaaccagtctgtcccaatcgtgctacctgtgcacagcgctgacaaagaaagagttgagaatgctgaagcaattgcactcaagtatgatggtcaagtgaaagctattcttcataaaccagaattttatcctcacctgaaagaagaaagatgctccagacagtggggaacatctaataagggacatcctcatattaagatgatcatggaaagtggtgattggttgtgtggaggtgacatcgaagtcttggaaagaatcacatggggcgatggtttagataaatacaggatgacacctcttgagctgcgcgcaaagtttaaatcaatgaacgcagatgcggtgtttgctttccaacttcgtaacccggtccacaacggacatgcactgcttatgcaggacaccaagcgcaaattggtggaacgtggattcaaaaacccagttctgttgttgcacccacttggtggttggacaaagtccgatgacgtgccactcgacgtgcgcatgaagcaacattctgctgtgttggaagaaggtgttcttgacccacagtcaacagtggttgccatcttccctgctccaatgatgtatgccggccccactgaggtacaatggcatgccaaagctcgcctagctactggtgcaaacttttacattgttggtcgcgatccagctggtatgccccatcccgacgaaaagcgtgatctgtacgaccacagccatggacgcaaggtacttacaatggcacctggactcggccgatttgaaattgtcccgttccgagttgctgcttacaacaagacgaccaagaaaatggatttctacgacccagaaaaccatgataatttcgaattcatctccggaaccaggatgagaagagctgcaagagaaggtgaaagccttccagaaggattcatggcacccaaggcatgggacgtgcttgttcagtattaccaatcccttccaaaagctacataa

SEQ ID NO: 25783 - protein, 618 aa, Ciona intestinalis
MASATANHGDDIQEKPPMSSNIVYQQHHVSRDERGQVMGKGAFRGCTVWFTGLSGAGKSTLSMKLEEYLCSKGIPAYSLDGDNIRHGLNKDLGFAPADREENIRRIGEVAKLFADAGVVCLVSFISPYRKDRQSARRVHNKSNLPFIEVFVDTPLQVCEGRDVKGLYKKARQGQIKGFTGIDSPYEPPENAEVVTKTADMPVEDCMMLVVKELMERNIIPCETTLPVMELFTSHSQVGKKRAEAEALPSIDITKLDMQWLQVLSEGWATPLTGFMREREFLQCQHFGCLLKNEPINQSVPIVLPVHSADKERVENAEAIALKYDGQVKAILHKPEFYPHLKEERCSRQWGTSNKGHPHIKMIMESGDWLCGGDIEVLERITWGDGLDKYRMTPLELRAKFKSMNADAVFAFQLRNPVHNGHALLMQDTKRKLVERGFKNPVLLLHPLGGWTKSDDVPLDVRMKQHSAVLEEGVLDPQSTVVAIFPAPMMYAGPTEVQWHAKARLATGANFYIVGRDPAGMPHPDEKRDLYDHSHGRKVLTMAPGLGRFEIVPFRVAAYNKTTKKMDFYDPENHDNFEFISGTRMRRAAREGESLPEGFMAPKAWDVLVQYYQSLPKAT

SEQ ID NO: 25784 - DNA, 1893 bp, Drosophila melanogaster
  CDS (1)..(1893)
atgccgaatccgccaattggattttatccccatatcaaaagaaggtgcctacaggtggcgacgaatgtgaccgagcaaaagcaccatgtcaccagggagacgcgcggcaagaatttgggactctgtcgaggattccgaggatgcacggtgtggctgactggcctcagtggagctggaaagacctcgattgccttcgaactggaggcgtacctggtatcccggggcattccggcctacgggttggacggcgacaacattcgcaccggactgaacaagaacctgggcttcacgcccgccgatcgcgaggaaaacattcgccgcgtgggcgaggtggccaagttgtttgccgacagcggagtggtggccatctgcagcttcgtttcgcccttcgccgacgatcgtgagatggcgcgcaagatccacaaggatgcgggtctgaagttctatgagatattcgtggacacaccgctggatgtgtgcgaaacccgggacgtgaagggtctatacaagaaggcgcgcgagggcgtaatcaaaggattcacgggcattacgcaggagtacgagcgaccccagatgccggagctggtggtcaacacgcacggctacacggtgcgcgagtccactcagaagctggtgacgctgctcgaacaggagggcattattccgcgctcgctgcgcgacgtagacctgctgccggagctttatcccagcgaatccattgccacggaggcactgcgtcacgaggccgagtcgctgcaagccatcgaaatcagcaccgtggagctgcagtgggtgcaagtactggccgagggatgggcatatccactgcgcggcttcatgcgcgaggatgagtacctgcagacgctgcacttcaacacacttcagagcggcatggacggttcctatcgcgagaaccactcggtgcccattgttttgagcgccacgcaggcggacaaggatcgtctggacggctgctcctcgctgactctcaaataccaaggcaaggcggtagccattctgcggcgtcccgagttctactttcagcgtaaggaggagcggctggcccgccagttcggcaccagcaatcccaatcacccgtacagtaagcaggtctacgagtccggggattatttggtcggtggcgatctggcagtgatcgaacgtatccgctgggaggacggactggatcagtacaggctgactcccaacgagttaaggcgccgctttaaggagctgaatgccgacgccatcttcgcctttcagttgcgcaatcccatccacaacggccatgccctgctcatgcaagacactcgccgccagctgctggagcgcggcttcaagcagccagtgctgctgctgcatcctctgggtggctggaccaaggacgacgatgtgccgctggatgtgcgcatgaagcagcaccaggccgtgctcgacgcaggtgtcttgcgacgagaggacacagtgctggccatcttcccctcgccaatgatgtacgccggtcccacggaggtgcagtggcacgcaaaggcgcgcatgaacgccggtgcgaacttctacattgtaggccgtgatccggctggcatgccgcatccggccaaggaaacttatccggatggaaacctatacgatgccacccatggtgcgcgagtgcttaagatggcccagggactagacagcatggagatcctgcccttccgtgttgctgcctatgacaagagcgccagtagaatggccttcttcgagcccaagaggaaggatgagtttgagttcatctcgggaaccaagatgcgcaccctggccaaaacgggagccagtccgccggatggcttcatggaaccggaggcttggcgcatcctggccacctactaccagaacctgccgcagtcgtaa

SEQ ID NO: 25785 - protein, 630 aa, Drosophila melanogaster
MPNPPIGFYPHIKRRCLQVATNVTEQKHHVTRETRGKNLGLCRGFRGCTVWLTGLSGAGKTSIAFELEAYLVSRGIPAYGLDGDNIRTGLNKNLGFTPADREENIRRVGEVAKLFADSGVVAICSFVSPFADDREMARKIHKDAGLKFYEIFVDTPLDVCETRDVKGLYKKAREGVIKGFTGITQEYERPQMPELVVNTHGYTVRESTQKLVTLLEQEGIIPRSLRDVDLLPELYPSESIATEALRHEAESLQAIEISTVELQWVQVLAEGWAYPLRGFMREDEYLQTLHFNTLQSGMDGSYRENHSVPIVLSATQADKDRLDGCSSLTLKYQGKAVAILRRPEFYFQRKEERLARQFGTSNPNHPYSKQVYESGDYLVGGDLAVIERIRWEDGLDQYRLTPNELRRRFKELNADAIFAFQLRNPIHNGHALLMQDTRRQLLERGFKQPVLLLHPLGGWTKDDDVPLDVRMKQHQAVLDAGVLRREDTVLAIFPSPMMYAGPTEVQWHAKARMNAGANFYIVGRDPAGMPHPAKETYPDGNLYDATHGARVLKMAQGLDSMEILPFRVAAYDKSASRMAFFEPKRKDEFEFISGTKMRTLAKTGASPPDGFMEPEAWRILATYYQNLPQS

SEQ ID NO: 25786 - DNA, 636 bp, Agrobacterium tumefaciens
  CDS (1)..(636): transl_table=11
atgatccattcctttgatttaggcccacaaagctctgaaacgcacaatgaaaaattagatcgctctatcagtagaaagggcgcagacccgggcgctgttatttggctgacgggactgtccggatcaggaaagtctactgtggcggtaagcgttgatcgaatattgcatgagagaggcagatcatcggttgtgttggatggtgacatcatccgcaggggccttagcaaagacctggggtttgaacaccgtgaccgttacgagaatgtgcgaaggatcgcggaggtcgctaagctattggcagaagctggtttcactgtactggtatcttgcatctcaccgcttgaaaaagaccgccagtcagcacgaagaataattgcccctgtgagatttctggaggtttttgtggaaacacccattgaggaatgtatccgtcgtgatccaaagggtctgtatcggaaggcactgtcaggagaaatcaagaacttcactggaattagctcaccgtatgaagcacccttgaaacccgacctctgtattcggacggcggacgctgattcagagacactagctgccctcgtcgttagaacagtgtgcgagcgtggcgatgcggccttcgcatttcatcaatcggggtaa

SEQ ID NO: 25787 - protein, 211 aa, Agrobacterium tumefaciens
MIHSFDLGPQSSETHNEKLDRSISRKGADPGAVIWLTGLSGSGKSTVAVSVDRILHERGRSSVVLDGDIIRRGLSKDLGFEHRDRYENVRRIAEVAKLLAEAGFTVLVSCISPLEKDRQSARRIIAPVRFLEVFVETPIEECIRRDPKGLYRKALSGEIKNFTGISSPYEAPLKPDLCIRTADADSETLAALVVRTVCERGDAAFAFHQSG

SEQ ID NO: 25788 - DNA, 1938 bp, Mesorhizobium loti MAFF303099
  CDS (1)..(1938): transl_table=11
atgcgtcacatcatggcaaaaagcctcgcccccaccgacagcgtccgcgactacctggccgcgcaggagaagaagtcgctgctgcgcttcctgacctgcggttcggtcgatgacggcaagtcgaccttgatcggccgcctcttgtccgacaccaagcagattttcgaggatcagcttgccgcgctcgaacgcgattcgcgcaagcatggcaccaccggcgatgacatcgatttcgcgttgctggtcgatggtctcgaggccgagcgcgagcaaggtatcaccatcgacgtcgcctaccgcttcttcgccacgccgaagcgcaagtttatcgtcgccgacacgcccggccacgagcaatacacccgcaacatggcgacaggcgcctcgaccgccgatctggcgatcgtgctgatcgacgcaaggcaaggggtgctgcgccagacaaggcgccattcgatcatcgcctcgctgctcggcatccggcacatcgtgctggccgtcaacaagatcgatctcgtcgatttcgaccaggcggtcttcgaccggatcgtcgaagactacggccaattctcgcgcgatctcggcttccagaccatcgtgccgatcccgatgtcggcccgttacggcgacaatgtcagcggccgctccgacaacatgcaatggtattccggcccgacgctgatcgagcacctcgagaccgtttcggttgaagaggctgccgtcgagcagccgttccgttttccggtgcagtacgtcaatcgccccaatctcgatttccgcggctttgccggtacgatcgcgtcgggcgccatcgcgcaaggcgacgaggtcgttgtcgccaaatccggcaagtcgtcgcatgtcaaacgcatcgtcgctcatggcggcgatctcaaacaggcggtggccggccaggccataacgctcgttcttgacgacgaggtcgaggtctccagaggcaatatgctggtgtcgccggccgctcgaccgcaagtcgccgatcaattcgccgccaacatcgtctggtttgacgagcatgcgctgctgccgggccgctcctatatcctgcgcaccgaaaccgaccagaccagcgccaccgtcaccgacctgaaataccgcatcaacgtcaacgacttcgcccatgaggcggccaagtcgcttgaaatgaatgaagtcggcatctgcaacgtctcgacgcgggcgccgatcgctttcgatcccttcgccgagaaccgcaccaccggcgccttcatcctgatcgaccgcatctcgaacgccaccgtcggcgcgggcatgatcgtgcactcgctgcgtcgtgccgagaacatccactggcaatcgctcgatgtcggcaagcgcgtgcgcgccgacatgaagaaccagcggcccgccgtgttctggttcaccgggctttcaggctccggcaagtcgaccatcgccaacttgttcgagaagaagctgttcgccaccggccgccacacctatattctggacggcgacaatgtccgtcacggtctcaaccgcgatctcggcttcaccgatgctgaccgcgtcgagaacatccgccgggtcgccgaagtggcaaagctgatggccgatgccgggttgatcgtcattgtctcgttcatttcgccgttcagcgccgaacggcgcatggcgcgcgaattgatggccgatggcgagttcatcgaggtgtttgtcgacacgcccttcgaggagtgcgccaggcgtgatccaaaaggtctctacgcgcgcgcgctgaatggcgagatcaagaacttcaccggtgtcgattcgccttaccaagcgccggaacacccggagatccatctgaagacgctcggcaaatcggcggaagagatggtagatgccctggaacattggctgaatgagcgcgacattgccgaagaccaatatgaaagcggcggcggcatctga

SEQ ID NO: 25789 - protein, 645 aa, Mesorhizobium loti MAFF303099
MRHIMAKSLAPTDSVRDYLAAQEKKSLLRFLTCGSVDDGKSTLIGRLLSDTKQIFEDQLAALERDSRKHGTTGDDIDFALLVDGLEAEREQGITIDVAYRFFATPKRKFIVADTPGHEQYTRNMATGASTADLAIVLIDARQGVLRQTRRHSIIASLLGIRHIVLAVNKIDLVDFDQAVFDRIVEDYGQFSRDLGFQTIVPIPMSARYGDNVSGRSDNMQWYSGPTLIEHLETVSVEEAAVEQPFRFPVQYVNRPNLDFRGFAGTIASGAIAQGDEVVVAKSGKSSHVKRIVAHGGDLKQAVAGQAITLVLDDEVEVSRGNMLVSPAARPQVADQFAANIVWFDEHALLPGRSYILRTETDQTSATVTDLKYRINVNDFAHEAAKSLEMNEVGICNVSTRAPIAFDPFAENRTTGAFILIDRISNATVGAGMIVHSLRRAENIHWQSLDVGKRVRADMKNQRPAVFWFTGLSGSGKSTIANLFEKKLFATGRHTYILDGDNVRHGLNRDLGFTDADRVENIRRVAEVAKLMADAGLIVIVSFISPFSAERRMARELMADGEFIEVFVDTPFEECARRDPKGLYARALNGEIKNFTGVDSPYQAPEHPEIHLKTLGKSAEEMVDALEHWLNERDIAEDQYESGGGI

SEQ ID NO: 25790 - DNA, 627 bp, Arabidopsis thaliana
  CDS (1)..(627)
atgtcgacagtgggaaattcaacgaacatattttggcaagaatcccccattgggaaaactgaaaggcagaagttgttaaatcagaagggttgtgtggtgtggatcacagggctcagtggctcagggaaaagcacgttagcttgctcgcttagtagagagctgaacaaccggggaaagctatcatatattcttgatggtgacaatcttcgtcatggtttgaacaaagatcttggtttcaaggcagaggatagagtggaaaatatacgcagggtcggagaagtagccaaactctttgcggatgctggtttaatctgtattgccagcctcatatccccgtatagaaaagaccgtgacgcctgcagggaaatgatacagaattcatcttttattgaggttttcatgaacatgtctctgcaattgtgtgaagcaagggaccctaaaggcctatacaagcttgcacgtgcaggaaagatcaaaggtttcacaggaatagatgatccgtatgagtctcccttgaactgtgagatagagttgaaagagaaagagggagagtgtccttcccctgtagctatggctgaggaagtgatctcttatctagaagacaaaggtttccttcaaaacgagtaa

SEQ ID NO: 25791 - protein, 208 aa, Arabidopsis thaliana
MSTVGNSTNIFWQESPIGKTERQKLLNQKGCVVWITGLSGSGKSTLACSLSRELNNRGKLSYILDGDNLRHGLNKDLGFKAEDRVENIRRVGEVAKLFADAGLICIASLISPYRKDRDACREMIQNSSFIEVFMNMSLQLCEARDPKGLYKLARAGKIKGFTGIDDPYESPLNCEIELKEKEGECPSPVAMAEEVISYLEDKGFLQNE

SEQ ID NO: 25792 - DNA, 1908 bp, Caulobacter crescentus CB15
  CDS (1)..(1908): transl_table=11
atggcccaccagtccgccctgatcgccgaggatatcgaagcctacctgcatcagcaccagcacaagtcgctgctgcgcttcatcacctgcggcagcgtcgacgacggcaagtccaccctgatcggtcgcctgctgtacgacagcaagatgatcttcgaggaccagatggcggccctcgaggtcgactccaggaaggtcggcacccaaggcggcgcgatcgacttcgccttgctggtcgacggtctggccgctgagcgcgagcaaggcatcaccatcgatgtggcctaccgcttcttctcgaccgagaagcgcaagttcatcgtcgccgacacgcccggccacgagcagtacacccgcaacatggtcaccggggcctcgaccgccgacgcggccgtgatcctgatcgatgcgcgcaagggcgtgctgacccagacccgtcgccacagctatctcgtcagcctgctgggcatccgccacgtggtgctggcggtgaacaagatggacctggtcggctgggacaagggcgtgttcgacgccatcgtcgccgactaccgcgccttcgccgaacagatcggcctttcggtgttcaccccgatcccgatctcaggcctcggcggcgacaacatggcgacccgcagcgacgccacgccctggtttgaaggcccgatcctgatggactggctggaagccgtcgaggtcgaggacgaccttcaggccaagcccttccgcatgccggtccagtgggtcaaccgacccaatctcgacttccggggcttctcgggcctgatcgcctcgggttcgatcaagccgggcgaccgtatccgcgccctgccctcgggccgcgaaagccgcgtggcccgcatcgtcaccctgccgggcgatctcgaccaggccgtcgccggccagtcggtcaccctgacgctggaagacgagatcgacatctcgcgcggcgacgtcatcgccgccgctgacgcccccgccccggtggccaaccagttcgaggccaccctcgtctggatggacgacgagccgctgccgccgggccgcacctatctcctgaagctcggcgcgcgcacggtcggcgccagcatcaccgacatcaagcaccgcgtgaacgtcaacacgctggagaagacggccgccaagcgcctcgaactgaacgagatcggggtctgcaatctgtcgctcgaccaagccatcccgttcgaggcctatgccgaaaaccgtcacatgggcgggttcatcctgatcgaccggctgagcaaccgcacggtcggcgcaggtctgatcaacttcgccctgcggcgagccgacaacatccactggcagcacacagatgtgaccaaggtctcgcgggcggcgctgaaacgccagcgcggtcaggtcgtctggctgacgggcctgtcgggcgcggggaagtcgaccatcgccaatctcgtcgaaaagcgcctgcacgccctgggtcgccacacctatctgctggacggcgacaatgtccggcacgggctgaacaaggacctcgggttcaccgaggaggaccgcgtcgagaacatccgccgggtggccgaggtcgccaagctgatggtcgatgcgggcctgatcgtgctgacggccttcatctcgcccttccgggccgagcgccagctggcgcgcgacctgctggagcccggcgagttcatcgaggttttcgtcgacacgccgctggccgtcgccgaggcccgcgacgtcaaggggctctacaagaaggcgcgctcgggccagctcaagaacttcaccggcgtcgatagtccctatgaggcgccggagtcgccagagctgcgcatcgacaccaccgcgatcgatcctgtcgaggcggccgaacggatcgtcgcctggctggagggccaggagatcgactacaccatctaa

SEQ ID NO: 25793 - protein, 635 aa, Caulobacter crescentus CB15
MAHQSALIAEDIEAYLHQHQHKSLLRFITCGSVDDGKSTLIGRLLYDSKMIFEDQMAALEVDSRKVGTQGGAIDFALLVDGLAAEREQGITIDVAYRFFSTEKRKFIVADTPGHEQYTRNMVTGASTADAAVILIDARKGVLTQTRRHSYLVSLLGIRHVVLAVNKMDLVGWDKGVFDAIVADYRAFAEQIGLSVFTPIPISGLGGDNMATRSDATPWFEGPILMDWLEAVEVEDDLQAKPFRMPVQWVNRPNLDFRGFSGLIASGSIKPGDRIRALPSGRESRVARIVTLPGDLDQAVAGQSVTLTLEDEIDISRGDVIAAADAPAPVANQFEATLVWMDDEPLPPGRTYLLKLGARTVGASITDIKHRVNVNTLEKTAAKRLELNEIGVCNLSLDQAIPFEAYAENRHMGGFILIDRLSNRTVGAGLINFALRRADNIHWQHTDVTKVSRAALKRQRGQVVWLTGLSGAGKSTIANLVEKRLHALGRHTYLLDGDNVRHGLNKDLGFTEEDRVENIRRVAEVAKLMVDAGLIVLTAFISPFRAERQLARDLLEPGEFIEVFVDTPLAVAEARDVKGLYKKARSGQLKNFTGVDSPYEAPESPELRIDTTAIDPVEAAERIVAWLEGQEIDYTI

SEQ ID NO: 25794 - DNA, 1902 bp, Sinorhizobium meliloti 1021
  CDS (1)..(1902): transl_table=11
atgtcgtatgttcaatctataccgccgcatgacattgaagcgcatctggccgagcacgacaacaagtcgatcctgagattcatcacttgcggctcggtcgacgacggcaaatcgaccctgatcgggcgactgctttacgatgcgaagctggtcttcgaagaccagctcgcaaacctcgggcgtgtcggctctcccggcgccgccaacggcaaggagatcgatctcgccttgcttctcgacgggcttgaggccgagcgcgagcagggcatcaccatcgacgtcgcctatcgctatttcgccacgtccaaacgcaagttcatcgtcgccgatacgcctggccacgaggaatatacgcgcaacatggtgaccggcgcttcgacggcggatctcgccatcatcctcatcgacagccggcagggcattctccagcagacccggcgccactcctatatagcctcactcctcggcatccgccatgtcgtgctggccgtcaacaagatcgatctcgtcgattttcaacaacaggtgtacgaggaaatcgtcgccgactacatggctttcgccaaagagctcggtttcgccagcatacggccaatcccgatctcggcgcgagacggcgacaatgtcatctcggcttccgccaataccccctggtacagaggggcggcgctgctcgaatatctggaaacggtcgaactcgatccgacggaccaggcaaagcctttccgcttcccggttcagatggtcatgcggccgaacgcggattttcgcggctatgccgggcagatctcctgcgggaggatttccgtgggcgatccggtcgtcgtcgcgaagactgggcagcggacatcggtcaaggcgattgtgacctatgacggggagcttgcgacggcaggggaaggcgaagcggtgacgctggtcctgtctgacgaggtggatgcgtcccgcggcaatatgctcgtcgcccctggtgcccggcccttcgtggcggaccagttccaggcgcatgtgatctggttcgatgcgaacccgatgatgccgggacgaagctacatcctgcgcacggagaccgacagcgtcagcgcgacggtcaccacgctcaagcaccaggtcaacatcaacagcttcatccgtgaggcggcgaagtcgctgcagatgaatgaagtgggtgtctgcaacatctcgacacaggcgccgatcgccttcgacgcctacaaggacaaccgggcgacgggcaatttcatcatcgtcgaccgggtgacgaatgccacggttggtgcggggttgatcgattttccgctccggcgcgcagacaacgtccactggcatgcgctcgaggtgaacaagagcgcgcgcagcgccatgaaaaatcaactccctgccgttctctggttcaccgggctttccggctccggaaaatcgaccatcgctaacgagctcgacaggatcctccacgctcagggcaagcatacctacctgctcgacggcgacaatgtgcgtcacggcctcaaccgggacctcggctttaccgaggaggaccgggtagagaacatccgccgcgtggcggaggtggccaagctcatggccgatgccggtctgatcgttctcgtctccttcatctcgccgttccgcgacgagcggcggatggcgcgggaattgatggaggagggcgagttcatcgagatattcgtcgacacgccgctcgacgaatgcgcgcgccgcgatccgaagggtctctacgagaaggcgctcgccggcaagatcgcgaacttcaccggtgtatcctcgccctatgagcccccggaaaacccggaactccatatacgcaccgtcggccatgaaccgaccgacctggcgctcgcgatcgaggaattccttgaccgcaggatggaggacaaatga

SEQ ID NO: 25795 - protein, 633 aa, Sinorhizobium meliloti 1021
MSYVQSIPPHDIEAHLAEHDNKSILRFITCGSVDDGKSTLIGRLLYDAKLVFEDQLANLGRVGSPGAANGKEIDLALLLDGLEAEREQGITIDVAYRYFATSKRKFIVADTPGHEEYTRNMVTGASTADLAIILIDSRQGILQQTRRHSYIASLLGIRHVVLAVNKIDLVDFQQQVYEEIVADYMAFAKELGFASIRPIPISARDGDNVISASANTPWYRGAALLEYLETVELDPTDQAKPFRFPVQMVMRPNADFRGYAGQISCGRISVGDPVVVAKTGQRTSVKAIVTYDGELATAGEGEAVTLVLSDEVDASRGNMLVAPGARPFVADQFQAHVIWFDANPMMPGRSYILRTETDSVSATVTTLKHQVNINSFIREAAKSLQMNEVGVCNISTQAPIAFDAYKDNRATGNFIIVDRVTNATVGAGLIDFPLRRADNVHWHALEVNKSARSAMKNQLPAVLWFTGLSGSGKSTIANELDRILHAQGKHTYLLDGDNVRHGLNRDLGFTEEDRVENIRRVAEVAKLMADAGLIVLVSFISPFRDERRMARELMEEGEFIEIFVDTPLDECARRDPKGLYEKALAGKIANFTGVSSPYEPPENPELHIRTVGHEPTDLALAIEEFLDRRMEDK

SEQ ID NO: 25796 - DNA, 1935 bp, Brucella melitensis 16M
  CDS (1)..(1935): transl_table=11
atgaatgttgtaatgaagccttcgcagaagaacactgccgttgccgattttctggccgatcaggaacacaaatcccttctgcgctttctcacctgcggttccgtcgatgacggcaaatcgaccctgatcgggcggcttctttatgatacgaagctcatctttgaggaccagcttgcctcgctgaaaaacgacagccggaagtttggcaccaccgatgatgattttgatttcgcacttctggtggacgggctggaggctgagcgtgagcagggcatcaccatcgatgtcgcttatcgtttcttctcgacgccgcgccgcaagttcatcgtggccgatacaccgggccatgcgcaatatacgcgcaatatggcaacgggcgcttccactgccgatctagccgtggttctggtggatgcgcgtcagggcgtgttgacccagacgcgccgccattccttcatcgcggcagcacttggcattcgccatatcgtgctcgcggtcaacaagatcgatcttgttgatttttcgcaagacagattcgatgggatcgtcgcggattatctttcctttgcgcaggatctgggctttacgagtattcagccgatcccgctttcggcccgctttggcgataatgtgacggcttcctcgccacgcatcggctggtatgaggggccgcatctcctggaacatctggaaacggtgcgtatcgatacggaagcggcggcaaaaccgttccgctttcccgtgcaatatgtgaaccgccccaatctggattttcgcggtttttccggcacggtcgcttccggctcgatccatgtcggcgacccggtcgtggtggccaaatccggcaagcaatcgcgcgtgaagcgtatcgccacctatgacggcgatttgcagcgcgcctccgaggggcaggcggtgacgctcgttcttgaagacgagatcgaggtttcacgcggcaatatgcttgccggcgtggaattgcggccggaagttgccgatcgatttgccgccgatatcgtctggtttggagaggatccgttgttgccgggccgctcctatctcctgcgcaccgaaaccgaccagacgccagtgacggtgaatgcgatcaggcatcgcacggacgtcaacactttcatacaggaagaaacagcccggctcgatctcaacgagattggccgctgccatttgcagacggtcgatccgatcgctttcgatccatacggcgaaaatcgtgcgacaggcgctttcgtgctgatcgatcgcctcaccaatgcaaccgttggcgcgggcatgatcgatgctgccttgcggcaggcgaccaatgtgcatttgcaggctttcgaccttaacaagcaggcgcgtgcggcgcagaaattccagaaaccggcggtgctgtggtttaccggcctttccgcatcgggcaagtccaccattgccaataggctggaacagcgcctccatgcgctgggcaagcatacctatctgctcgacggcgataatgtgcgccacggcctcaacagcgatctcggcttttccgatgcggaccgggtggaaaatatccgccgggtgggcgaggtggcgcggctgatggccgatgcggggctgatcacgccggtttcattcatctcgccgttccgcgaggagcgcgatcaggtgcgcgcccggttgccggagggcgagttcattgaaattttcatcgatacgccgattgaggaatgcatggcgcgtgacccgaaggggctttacgcacaggcgcttcgcggcgagatcaaggcctttaccgggatcgattcgccttatgagccgcctgttgcgccggaacttcgcctcaatacggcgggaaggaccgttgacgaactcatcgccgaggtggaaaactaccttgccgaacgtggtgtgatcggcagttatggcagcgattcctggtcgatctga

SEQ ID NO: 25797 - protein, 644 aa, Brucella melitensis 16M
MNVVMKPSQKNTAVADFLADQEHKSLLRFLTCGSVDDGKSTLIGRLLYDTKLIFEDQLASLKNDSRKFGTTDDDFDFALLVDGLEAEREQGITIDVAYRFFSTPRRKFIVADTPGHAQYTRNMATGASTADLAVVLVDARQGVLTQTRRHSFIAAALGIRHIVLAVNKIDLVDFSQDRFDGIVADYLSFAQDLGFTSIQPIPLSARFGDNVTASSPRIGWYEGPHLLEHLETVRIDTEAAAKPFRFPVQYVNRPNLDFRGFSGTVASGSIHVGDPVVVAKSGKQSRVKRIATYDGDLQRASEGQAVTLVLEDEIEVSRGNMLAGVELRPEVADRFAADIVWFGEDPLLPGRSYLLRTETDQTPVTVNAIRHRTDVNTFIQEETARLDLNEIGRCHLQTVDPIAFDPYGENRATGAFVLIDRLTNATVGAGMIDAALRQATNVHLQAFDLNKQARAAQKFQKPAVLWFTGLSASGKSTIANRLEQRLHALGKHTYLLDGDNVRHGLNSDLGFSDADRVENIRRVGEVARLMADAGLITPVSFISPFREERDQVRARLPEGEFIEIFIDTPIEECMARDPKGLYAQALRGEIKAFTGIDSPYEPPVAPELRLNTAGRTVDELIAEVENYLAERGVIGSYGSDSWSI

SEQ ID NO: 25798 - DNA, 933 bp, Arabidopsis thaliana
  CDS (1)..(933)
atggatgttgccgcgatggcgagatgtgtgggaaggtgctacgtttcgccggcgttcggtgagtctgaatcgcaccggttatcggagcggcggtttctgaaattgtctagctccacgaattcggatcccgccggtagtaaaagtttgaagcttcgcgggaaaattcatcggagaatgagctacttccgtccgatcatggcaaaagatgaatccatttcatcgcggtccggtgaaacgaagcaaatcaatggaaagcaaaagaacattgtctggcatgattgtcccgttactaaatccgacaggcaagaattaattaagcaaaagggatgtgtgatttggattactggcttaagtggttcaggtaaaagtagtctggcatgtgctcttagtcgagctttgcacaatcgtggaaagctttcgtatatacttgatggtgacaatgttcgacatggtttaaacagcgatcttagtttcgaagcagatgatcgagctgaaaacattcgaagagttggtgaagtggctaaactgtttgcagattctggtattatctgtattgcaagtttaatatctccttaccggatagaacgagctgcctgccgtgcattattaccacaaggagatttcattgaggtatttatggatgtgccactccatgtttgtgaagctagagatccaaagggcttatacaaacgtgcacgcgctggtaaaatcaaaggttttacaggagtagatgatccatatgaagcgcctttggattgcgagattgtaatacaaaacagtagagacaaggggctttcttcttcatcttcatcttcatcttcaccttcatcttcgtcttcttctctgtgtgaaatggcagatattgttgtgtcgtacttggaccaaaatggatacctgaagaaacactccacaaaatcacgtaattgtatgtaa

SEQ ID NO: 25799 - protein, 310 aa, Arabidopsis thaliana
MDVAAMARCVGRCYVSPAFGESESHRLSERRFLKLSSSTNSDPAGSKSLKLRGKIHRRMSYFRPIMAKDESISSRSGETKQINGKQKNIVWHDCPVTKSDRQELIKQKGCVIWITGLSGSGKSSLACALSRALHNRGKLSYILDGDNVRHGLNSDLSFEADDRAENIRRVGEVAKLFADSGIICIASLISPYRIERAACRALLPQGDFIEVFMDVPLHVCEARDPKGLYKRARAGKIKGFTGVDDPYEAPLDCEIVIQNSRDKGLSSSSSSSSSPSSSSSSLCEMADIVVSYLDQNGYLKKHSTKSRNCM

SEQ ID NO: 25800 - DNA, 537 bp, Streptomyces coelicolor A3(2)
  CDS (1)..(537): transl_table=11
gtgacgaccggagccaccgtctggctcacggggctgcccagcgccggcaagaccaccatcgcccgcgagctggccgaccgcctccgtgaggagggccggcccgtcgaactgctcgacggcgacgagatccgcgagttcctctccgcgggcctcggcttcgaccgcgcggaccggcacaccaacgtgcagcgcatcggcttcgtcgccgaactgctcgcccgcaacggcgtcacggccctggtcccggtgatcgcgccgtacgcggacagccgcgacgcggtgcgcgagcgtcacggggcgaacggcacggcgtacgtcgaggtgcacgtggccacgcccgtcgaggtgtgctcggtgcgcgacgtgaagggcctgtacgccaagcaggccgcgggtgagctgacggggctcaccggggtggacgacccgtacgaggagcccgtcgcacccgacctgcgcatcgagtcgcaggaccagaccgtgcaggagtccgccgcggcggtccacgcgctgctcaccgaaaggggactggcatga

SEQ ID NO: 25801 - protein, 178 aa, Streptomyces coelicolor A3(2)
MTTGATVWLTGLPSAGKTTIARELADRLREEGRPVELLDGDEIREFLSAGLGFDRADRHTNVQRIGFVAELLARNGVTALVPVIAPYADSRDAVRERHGANGTAYVEVHVATPVEVCSVRDVKGLYAKQAAGELTGLTGVDDPYEEPVAPDLRIESQDQTVQESAAAVHALLTERGLA

SEQ ID NO: 25802 - DNA, 1977 bp, Xanthomonas campestris pv. campestris str. ATCC 33913
  CDS (1)..(1977): transl_table=11
atgggcagtgaatcgggaatcgggaatggggaatcgcaacagcagttcgccgggaacgagatgagggaggagaccgcttttgcgattcccgattccccactccccaatcccagcgccatcagcacctacctccagcagcacgaatccaaaccgttgctgcgcttcatcacctgcggcagcgtggacgatggcaagagcacgcttatcgggcggttgttgtacgacagcaagcggctgttcgatgaccagctggccgcgctggaaagcgacagcaagcgccatggcacgcagggcgaaggcatcgattacgccttgctggtggatgggctggccgccgagcgtgagcagggcatcaccatcgatgtggcgtaccgctacttcgataccgaccaacgcaagttcatcgttgccgattgccccgggcatgagcagtacacgcgcaatatggccaccggcgcctccaccgccgatgtggcggtggtgctggtggatgcgcgcaagggcgtgctggtgcagacgcggcggcacagctacatcgtctcgttgctgggcattcgccacgtggtgctggcggtcaacaagatggacctggtggactacgacgcgcaggtgttcgccaccatcgtcgacagctaccgcgccctggcggcgcagttgggcattgccgatgtgcagtgcattccgctgtctgcactggccggcgacaacctgtccagcgcgtccacgcgcatgccgtggtaccaggggccgcatctgctgcagcacctggacagcgtgcagctggagacgcccgacgcagtgagtggattgcgcctgccggtgcagtgggtcaatcggcccaacgcgcagttccgtggctatgccggcaccattgctgccggccaggtacgcagcggcgatgtggtggtggtggtgccgtccgggcgccgcgcgcatgtggcgagcgtgctggatgccaatggcgtggtcgacagcgcacgcgccgggcaggccgtgacgctgaccttgcgcgaagagatcgacatcagccgcggcgacatcatcgccgccgtggacgacccgccggaagtggccgaccagttcgccgcgcacgtgctgtggatggacgatgccgcgttgctgccgggccgcccgtactggctcaagatcggcacccgcaccgtcgccgccagcatcagcgagatcaagcacaaggtcgatgtgaacacgcaggagcggctggccgccaagcggctggagctcaacgaggtgggctactgcaacctgtcgctggacgagccgatcgcgtttgccccgtatgcgcgcaaccgggtgttgggcggcttcatcctgatcgaccggcagaccaatgccacggtcgcggccggtgcgctggagttcgcgttgcgccgcgccggcaatgtgcattggcagcacctggatgtggaccgcgccgcgcgtgcgcgcatcaagggccaggcgccacgtgtgctgtggttcacaggcctgtccggtgcgggcaagtccacggtggccaacctggtggacaagcgcctgcatgcgctgggctatcacaccttcatcctggacggcgacaacgtgcgccacgggctcaaccgcgatctgggcttcaccgacgaggaccgcgtggagaacatccgccgcgtggccgaggtcgcacggctgatggccgatgccgggctgatcgtgctggtgagcttcatttccccgttccgtgccgaacgccagctggcacgcgagcgttttgactcgggtgaattcgtcgaagtgtttgtggacgtgcctctggcggtcgccgaggcacgcgacgtgaaaggcctctaccgcaaggcccgcgccgggcagattcccaatttcaccgggatcgattcgccgtacgaggcgcccgagcgcccggaaatccatcttcacgccgatggtgagaacgtagaggcgctggcgcggcatgtcctggaatacctgggcctggagcgctga

SEQ ID NO: 25803 - protein, 658 aa, Xanthomonas campestris pv. campestris str. ATCC 33913
MGSESGIGNGESQQQFAGNEMREETAFAIPDSPLPNPSAISTYLQQHESKPLLRFITCGSVDDGKSTLIGRLLYDSKRLFDDQLAALESDSKRHGTQGEGIDYALLVDGLAAEREQGITIDVAYRYFDTDQRKFIVADCPGHEQYTRNMATGASTADVAVVLVDARKGVLVQTRRHSYIVSLLGIRHVVLAVNKMDLVDYDAQVFATIVDSYRALAAQLGIADVQCIPLSALAGDNLSSASTRMPWYQGPHLLQHLDSVQLETPDAVSGLRLPVQWVNRPNAQFRGYAGTIAAGQVRSGDVVVVVPSGRRAHVASVLDANGVVDSARAGQAVTLTLREEIDISRGDIIAAVDDPPEVADQFAAHVLWMDDAALLPGRPYWLKIGTRTVAASISEIKHKVDVNTQERLAAKRLELNEVGYCNLSLDEPIAFAPYARNRVLGGFILIDRQTNATVAAGALEFALRRAGNVHWQHLDVDRAARARIKGQAPRVLWFTGLSGAGKSTVANLVDKRLHALGYHTFILDGDNVRHGLNRDLGFTDEDRVENIRRVAEVARLMADAGLIVLVSFISPFRAERQLARERFDSGEFVEVFVDVPLAVAEARDVKGLYRKARAGQIPNFTGIDSPYEAPERPEIHLHADGENVEALARHVLEYLGLER

SEQ ID NO: 25804 - DNA, 1977 bp, Xanthomonas axonopodis pv. citri str. 306
  CDS (1)..(1977): transl_table=11
atgggcagcgaatggggaatcgggaatggagaatcggaacagcagattgccgcggatgcagtgagggagggcaccaccgttgcgattcccgattcccgattcccgattcccggcaccatcggtgcctacctccatcaacacgaatccaagccgctgctgcgcttcatcacctgcggcagtgtggacgacggcaagagcacgctgatcgggcggttgctgtacgacagcaagcgcctgttcgacgatcaacttgccgcgctggaaagcgacagccgacggcatggcacccagggcgggcgcatcgactatgcactgctgatggatgggctggcggccgaacgcgagcagggcatcaccatcgatgtggcctaccgctatttcgatacagaccggcggaaattcatcgtggccgattgccccgggcacgagcagtacacgcgcaacatggccaccggcgcgtcgactgccgatgtggcggtggtgctggtggatgcgcgcaagggcctgctgacgcagacccgcaggcatagctacatcgtgtcgttgctgggcatcgggcatgtggtgctggcggtcaacaagatggacctggtggactacgacgcgcaggtgttcgccgacatcgcagaaggctacgccgcgctcgccgcgcagctgggcatcggccaggtgcagtgcattccgctgtcggcgctggcgggcgaaaatctgtccagcgcttcgatgcggatgccgtggtacagcggcccgcatctgctgcagcacctggacaccgtgcagttggagccgccggacgccgccagcggcctgcgcctgccggtgcaatgggtcaaccgccccaacgcgcagttccgtggctatgcgggcacgattgccgccggccaggtgcgtgcgggcgatgcggtggtggtggtgccgtccggacgccgcacgcaggtggcaagcgtgcgcgatgccaatggcgaggtcgacagcgcgcgcgccgggcaggcggtgacgctgaccttgcgcgatgagatcgacatcagccgtggcgacatcattgccgccatcgacgacccgccggaagtggccgaccagttcgccgcgcatctgctgtggatggacgatgctgcgtcgctgcccggccgtccgtactggctcaagatcggcacccgcacggtcgccgtaagcgtcagcgacatcaagcacaaggtcgatgtgaacacgcaggagcggctggccgccaaacggctggagctcaacgaagtgggctactgcaacctggcgctggacgagcccatcgcgttctcgccctatgcgcgcaaccgcgtgctcggcggtttcatcctgatcgaccggcagagcaatgccacggtggccgccggcacgctggaattcgcgttgcgccgcgccggcaacgtgcactggcagcatctggacgtggatcgcggcgcgcgtgcgcgcatcaagggccaggcgccacgcgtgttgtggtttaccgggctgtcgggtgccggcaagtccactgtcgccaacctggtggacaagcgcctgcacgcgctgggctatcacaccttcatcctggacggcgacaacgtgcgccacgggctcaaccgcgatctgggcttcaccgacgaagaccgcgtggaaaacatccgtcgcgtggccgaagtggcccgcctgatggccgatgccggcctgatcgtgctggtgagtttcatttcgccgttccgcgccgagcggcaactggcacgcgagcgcttcgaccagggcgagtttatcgaggtcttcgtggacgtgccgctggcggtcgccgaggcgcgcgacgtgaaagggctgtaccgcaaggcgcgtgccggccagattcccaatttcaccgggatcgactcgccgtacgaggcaccccagacgccggagatccatcttcacgccgatggtgagaatgtagaggcgctggcgcaccatgtgctcgaatatctggggctggaacgctaa

SEQ ID NO: 25805 - protein, 658 aa, Xanthomonas axonopodis pv. citri str. 306
MGSEWGIGNGESEQQIAADAVREGTTVAIPDSRFPIPGTIGAYLHQHESKPLLRFITCGSVDDGKSTLIGRLLYDSKRLFDDQLAALESDSRRHGTQGGRIDYALLMDGLAAEREQGITIDVAYRYFDTDRRKFIVADCPGHEQYTRNMATGASTADVAVVLVDARKGLLTQTRRHSYIVSLLGIGHVVLAVNKMDLVDYDAQVFADIAEGYAALAAQLGIGQVQCIPLSALAGENLSSASMRMPWYSGPHLLQHLDTVQLEPPDAASGLRLPVQWVNRPNAQFRGYAGTIAAGQVRAGDAVVVVPSGRRTQVASVRDANGEVDSARAGQAVTLTLRDEIDISRGDIIAAIDDPPEVADQFAAHLLWMDDAASLPGRPYWLKIGTRTVAVSVSDIKHKVDVNTQERLAAKRLELNEVGYCNLALDEPIAFSPYARNRVLGGFILIDRQSNATVAAGTLEFALRRAGNVHWQHLDVDRGARARIKGQAPRVLWFTGLSGAGKSTVANLVDKRLHALGYHTFILDGDNVRHGLNRDLGFTDEDRVENIRRVAEVARLMADAGLIVLVSFISPFRAERQLARERFDQGEFIEVFVDVPLAVAEARDVKGLYRKARAGQIPNFTGIDSPYEAPQTPEIHLHADGENVEALAHHVLEYLGLER

SEQ ID NO: 25806 - DNA, 606 bp, Thermosynechococcus elongatus BP-1
  CDS (1)..(606): transl_table=11
atgagtaatccccgtgaaaacatcatctggcaccaggccacggtgactcgtgctcgccgcgaacaactgaacggccacaaatcctgtgtcctgtggtttaccggtttgtccggcgccggcaaatcgacactcgcccatgcggtggaggaacgattacatcagctcggctaccgcaccttcgttctggatggtgacaacgtccgacacggcctttgttccgatctgggtttcaccgaatccgaccgcaaggaaaatatccgccgtatcggcgaagtcgctaagttgatgatggaagcggggttgattgtcatgaccgctttcatcagcccctttcgggccgaccgcgaggctgtccgcaaccggatgccacacggggattttctggaaatctattgccaggccagcctggaagtctgcgaggcgcgcgatgtcaaaggcctctacaaaagggcccgagccggagaaatcaagaattacactggcatcgattccccctatgaaccgccgctgaaacccgagctgattgtcaatacagaatgtctgacgctggaagaatcggtaggcgccgtcctgcgcatgctccaggagcgaggggtggtgcaatga

SEQ ID NO: 25807 - protein, 201 aa, Thermosynechococcus elongatus BP-1
MSNPRENIIWHQATVTRARREQLNGHKSCVLWFTGLSGAGKSTLAHAVEERLHQLGYRTFVLDGDNVRHGLCSDLGFTESDRKENIRRIGEVAKLMMEAGLIVMTAFISPFRADREAVRNRMPHGDFLEIYCQASLEVCEARDVKGLYKRARAGEIKNYTGIDSPYEPPLKPELIVNTECLTLEESVGAVLRMLQERGVVQ

SEQ ID NO: 25808 - DNA, 1935 bp, Brucella suis 1330
  CDS (1)..(1935): transl_table=11
atgaatgttgtaatgaagccttcgcagaagaacactgccgttgccgattttctggccgatcaggaacacaaatcccttctgcgctttctcacctgcggttccgtcgatgacggcaaatcgaccctgatcgggcggcttctttatgatacgaagctcatctttgaggaccagcttgcctcgctgaaaaacgacagccggaagtttggcaccaccgatgatgattttgatttcgcacttctggtggacgggctggaggctgagcgtgagcagggcatcaccatcgatgtcgcttatcgtttcttctcgacgccgcgccgcaagttcatcgtggccgatacaccgggccatgcgcaatatacgcgcaatatggcaacgggcgcttccactgccgatctagccgtggttctggtggatgcgcgccagggcgtgttgacccagacgcgccgccattccttcatcgcggcagcacttggcattcgccatatcgtgctcgcggtcaacaagatcgatcttgttgatttttcgcaagacagattcgatgggatcgtcgcggattatctttcctttgcgcaggatctgggctttacgagtattcagccgatcccgctttcggcccgctttggcgataatgtgacggcttcctcgccacgcatcggctggtatgaggggccgcatctcctggaacatctggaaacggtgcgtatcgatacggaagcggcggcaaaaccgttccgctttcccgtgcaatatgtgaaccgccccaatctggattttcgcggtttttccggcacggtcgcttccggctcgatccatgtcggcgacccggtcgtggtggccaaatccggcaagcaatcgcgcgtgaagcgtatcgccacctatgacggcgatttgcagcgcgcctccgagcggcaggcggtgacgctcgttcttgaagacgagatcgaggtttcacgcggcaatatgcttgccggcgtggaattgcggccggaagttgccgatcgatttgccgccgatatcgtctggtttggagaggatccgttgttgccgggccgctcctatctcctgcgcaccgaaaccgaccagacgccagtgacggtgaatgcgatcaggcatcgcacggacgtcaacactttcatacaggaagaaacagcccggctcgatctcaacgagattggccgctgccatttgcagacggtcgatccgatcgctttcgatccatacggcgaaaatcgtgcgacaggcgctttcgtgctgatcgatcgcctcaccaatgcaaccgttggcgcgggcatgatcgatgctgccttgcggcaggcgaccaatgtgcatttgcaggctttcgaccttaacaagcaggcgcgtgcggcgcagaaattccagaaaccggcggtgctgtggtttaccggcctttccgcatcgggcaagtccaccattgccaataggctggaacagcgcctccatgcgctgggcaagcatacctatctgctcgacggcgataatgtgcgccacggcctcaacagcgatctcggcttttccgatgcggaccgggtggaaaatatccgccgggtgggcgaggtggcgcggctgatggccgatgcggggctgatcacgctggtttcattcatctcgccgttccgcgaggagcgcgatcaggtgcgcgcccggttgccggagggcgagttcattgaaattttcatcgatacgccgattgaggaatgcatggcgcgtgacccgaaggggctttacgcacaggcgcttcgcggcgagatcaaggcctttaccgggatcgattcgccttatgagccgcctgttgcgccggaacttcgcctcaatacggcgggaaggaccgttgacgaactcatcgccgaggtggaaaactaccttgccgaacgtggtgtgatcggcagttatggcagcgattcctggtcgatctga

SEQ ID NO: 25809 - protein, 644 aa, Brucella suis 1330
MNVVMKPSQKNTAVADFLADQEHKSLLRFLTCGSVDDGKSTLIGRLLYDTKLIFEDQLASLKNDSRKFGTTDDDFDFALLVDGLEAEREQGITIDVAYRFFSTPRRKFIVADTPGHAQYTRNMATGASTADLAVVLVDARQGVLTQTRRHSFIAAALGIRHIVLAVNKIDLVDFSQDRFDGIVADYLSFAQDLGFTSIQPIPLSARFGDNVTASSPRIGWYEGPHLLEHLETVRIDTEAAAKPFRFPVQYVNRPNLDFRGFSGTVASGSIHVGDPVVVAKSGKQSRVKRIATYDGDLQRASERQAVTLVLEDEIEVSRGNMLAGVELRPEVADRFAADIVWFGEDPLLPGRSYLLRTETDQTPVTVNAIRHRTDVNTFIQEETARLDLNEIGRCHLQTVDPIAFDPYGENRATGAFVLIDRLTNATVGAGMIDAALRQATNVHLQAFDLNKQARAAQKFQKPAVLWFTGLSASGKSTIANRLEQRLHALGKHTYLLDGDNVRHGLNSDLGFSDADRVENIRRVGEVARLMADAGLITLVSFISPFREERDQVRARLPEGEFIEIFIDTPIEECMARDPKGLYAQALRGEIKAFTGIDSPYEPPVAPELRLNTAGRTVDELIAEVENYLAERGVIGSYGSDSWSI

SEQ ID NO: 25810 - DNA, 606 bp, Shigella flexneri 2a str. 301
  CDS (1)..(606): transl_table=11
atggcgctgcatgacgaaaacgtcgtctggcatagtcatccggtcactgtgcaacaacgcgaactacaccacggtcatcgtggtgtagtgctgtggtttaccggcctctccgggtccggtaaatcaacggtcgccggggcgctggaggaggcgttacataaactcagcgtcagtacgtatctgctggatggcgacaatgttcgccacggattatgcagcgatctcggttttagcgatgccgatcgtaaagagaatatccgtcgcgtcggtgaagtggcgaatttgatggttgaagccggactggtggtgctgaccgcatttatctcgccacaccgcgccgaacgccagatggttcgcgaacgcgtaggagaagggcgctttattgaagtgtttgtcgatacgccgctggcgatttgcgaagcccgcgatccaaaaggcttatataagaaagcgcgtgccggtgaactgcgcaactttacgggaatagattccgtttacgaagcgcctgaatcggcagaaattcatctcaatggtgaacaattagtaacaaatttggtacagcaattattagatctgttgagacagaacgatattatcagatcctga

SEQ ID NO: 25811 - protein, 201 aa, Shigella flexneri 2a str. 301
MALHDENVVWHSHPVTVQQRELHHGHRGVVLWFTGLSGSGKSTVAGALEEALHKLSVSTYLLDGDNVRHGLCSDLGFSDADRKENIRRVGEVANLMVEAGLVVLTAFISPHRAERQMVRERVGEGRFIEVFVDTPLAICEARDPKGLYKKARAGELRNFTGIDSVYEAPESAEIHLNGEQLVTNLVQQLLDLLRQNDIIRS

SEQ ID NO: 25812 - DNA, 1890 bp, Drosophila melanogaster
  CDS (1)..(1890)
atgagtgaagttccggagagcagcaaaaagcgtcaaaagacgtgcctacaggtggcgacgaatgtgaccgagcaaaagcaccatgtcaccagggagacgcgcggcaagaatttgggactctgtcgaggattccgaggatgcacggtgtggctgactggcctcagtggagctggaaagacctcgattgccttcgaactggaggcgtacctggtatcccggggcattccggcctacgggttggacggcgacaacattcgcaccggactgaacaagaacctgggcttcacgcccgccgatcgcgaggaaaacattcgccgcgtgggcgaggtggccaagttgtttgccgacagcggagtggtggccatctgcagcttcgtttcgcccttcgccgacgatcgtgagatggcgcgcaagatccacaaggatgcgggtctgaagttctatgagatattcgtggacacaccgctggatgtgtgcgaaacccgggacgtgaagggtctatacaagaaggcgcgcgagggcgtaatcaaaggattcacgggcattacgcaggagtacgagcgaccccagatgccggagctggtggtcaacacgcacggctacacggtgcgcgagtccactcagaagctggtgacgctgctcgaacaggagggcattattccgcgctcgctgcgcgacgtagacctgctgccggagctttatcccagcgaatccattgccacggaggcactgcgtcacgaggccgagtcgctgcaagccatcgaaatcagcaccgtggagctgcagtgggtgcaagtactggccgagggatgggcatatccactgcgcggcttcatgcgcgaggatgagtacctgcagacgctgcacttcaacacacttcagagcggcatggacggttcctatcgcgagaaccactcggtgcccattgttttgagcgccacgcaggcggacaaggatcgtctggacggctgctcctcgctgactctcaaataccaaggcaaggcggtagccattctgcggcgtcccgagttctactttcagcgtaaggaggagcggctggcccgccagttcggcaccagcaatcccaatcacccgtacagtaagcaggtctacgagtccggggattatttggtcggtggcgatctggcagtgatcgaacgtatccgctgggaggacggactggatcagtacaggctgactcccaacgagttaaggcgccgctttaaggagctgaatgccgacgccatcttcgcctttcagttgcgcaatcccatccacaacggccatgccctgctcatgcaagacactcgccgccagctgctggagcgcggcttcaagcagccagtgctgctgctgcatcctctgggtggctggaccaaggacgacgatgtgccgctggatgtgcgcatgaagcagcaccaggccgtgctcgacgcaggtgtcttgcgacgagaggacacagtgctggccatcttcccctcgccaatgatgtacgccggtcccacggaggtgcagtggcacgcaaaggcgcgcatgaacgccggtgcgaacttctacattgtaggccgtgatccggctggcatgccgcatccggccaaggaaacttatccggatggaaacctatacgatgccacccatggtgcgcgagtgcttaagatggcccagggactagacagcatggagatcctgcccttccgtgttgctgcctatgacaagagcgccagtagaatggccttcttcgagcccaagaggaaggatgagtttgagttcatctcgggaaccaagatgcgcaccctggccaaaacgggagccagtccgccggatggcttcatggaaccggaggcttggcgcatcctggccacctactaccagaacctgccgcagtcgtaa

SEQ ID NO: 25813 - protein, 629 aa, Drosophila melanogaster
MSEVPESSKKRQKTCLQVATNVTEQKHHVTRETRGKNLGLCRGFRGCTVWLTGLSGAGKTSIAFELEAYLVSRGIPAYGLDGDNIRTGLNKNLGFTPADREENIRRVGEVAKLFADSGVVAICSFVSPFADDREMARKIHKDAGLKFYEIFVDTPLDVCETRDVKGLYKKAREGVIKGFTGITQEYERPQMPELVVNTHGYTVRESTQKLVTLLEQEGIIPRSLRDVDLLPELYPSESIATEALRHEAESLQAIEISTVELQWVQVLAEGWAYPLRGFMREDEYLQTLHFNTLQSGMDGSYRENHSVPIVLSATQADKDRLDGCSSLTLKYQGKAVAILRRPEFYFQRKEERLARQFGTSNPNHPYSKQVYESGDYLVGGDLAVIERIRWEDGLDQYRLTPNELRRRFKELNADAIFAFQLRNPIHNGHALLMQDTRRQLLERGFKQPVLLLHPLGGWTKDDDVPLDVRMKQHQAVLDAGVLRREDTVLAIFPSPMMYAGPTEVQWHAKARMNAGANFYIVGRDPAGMPHPAKETYPDGNLYDATHGARVLKMAQGLDSMEILPFRVAAYDKSASRMAFFEPKRKDEFEFISGTKMRTLAKTGASPPDGFMEPEAWRILATYYQNLPQS

SEQ ID NO: 25814 - DNA, 1974 bp, Drosophila melanogaster
  CDS (1)..(1974)
atgtttacccgatgtgccaattcgcttggcctctaccataataatattaacaataacaacagcgcttgctgtgccgcttccccgaaaagaagctgccttccgagtgtggaaaagcctgaagatgcgtgcctacaggtggcgacgaatgtgaccgagcaaaagcaccatgtcaccagggagacgcgcggcaagaatttgggactctgtcgaggattccgaggatgcacggtgtggctgactggcctcagtggagctggaaagacctcgattgccttcgaactggaggcgtacctggtatcccggggcattccggcctacgggttggacggcgacaacattcgcaccggactgaacaagaacctgggcttcacgcccgccgatcgcgaggaaaacattcgccgcgtgggcgaggtggccaagttgtttgccgacagcggagtggtggccatctgcagcttcgtttcgcccttcgccgacgatcgtgagatggcgcgcaagatccacaaggatgcgggtctgaagttctatgagatattcgtggacacaccgctggatgtgtgcgaaacccgggacgtgaagggtctatacaagaaggcgcgcgagggcgtaatcaaaggattcacgggcattacgcaggagtacgagcgaccccagatgccggagctggtggtcaacacgcacggctacacggtgcgcgagtccactcagaagctggtgacgctgctcgaacaggagggcattattccgcgctcgctgcgcgacgtagacctgctgccggagctttatcccagcgaatccattgccacggaggcactgcgtcacgaggccgagtcgctgcaagccatcgaaatcagcaccgtggagctgcagtgggtgcaagtactggccgagggatgggcatatccactgcgcggcttcatgcgcgaggatgagtacctgcagacgctgcacttcaacacacttcagagcggcatggacggttcctatcgcgagaaccactcggtgcccattgttttgagcgccacgcaggcggacaaggatcgtctggacggctgctcctcgctgactctcaaataccaaggcaaggcggtagccattctgcggcgtcccgagttctactttcagcgtaaggaggagcggctggcccgccagttcggcaccagcaatcccaatcacccgtacagtaagcaggtctacgagtccggggattatttggtcggtggcgatctggcagtgatcgaacgtatccgctgggaggacggactggatcagtacaggctgactcccaacgagttaaggcgccgctttaaggagctgaatgccgacgccatcttcgcctttcagttgcgcaatcccatccacaacggccatgccctgctcatgcaagacactcgccgccagctgctggagcgcggcttcaagcagccagtgctgctgctgcatcctctgggtggctggaccaaggacgacgatgtgccgctggatgtgcgcatgaagcagcaccaggccgtgctcgacgcaggtgtcttgcgacgagaggacacagtgctggccatcttcccctcgccaatgatgtacgccggtcccacggaggtgcagtggcacgcaaaggcgcgcatgaacgccggtgcgaacttctacattgtaggccgtgatccggctggcatgccgcatccggccaaggaaacttatccggatggaaacctatacgatgccacccatggtgcgcgagtgcttaagatggcccagggactagacagcatggagatcctgcccttccgtgttgctgcctatgacaagagcgccagtagaatggccttcttcgagcccaagaggaaggatgagtttgagttcatctcgggaaccaagatgcgcaccctggccaaaacgggagccagtccgccggatggcttcatggaaccggaggcttggcgcatcctggccacctactaccagaacctgccgcagtcgtaa

SEQ ID NO: 25815 - protein, 657 aa, Drosophila melanogaster
MFTRCANSLGLYHNNINNNNSACCAASPKRSCLPSVEKPEDACLQVATNVTEQKHHVTRETRGKNLGLCRGFRGCTVWLTGLSGAGKTSIAFELEAYLVSRGIPAYGLDGDNIRTGLNKNLGFTPADREENIRRVGEVAKLFADSGVVAICSFVSPFADDREMARKIHKDAGLKFYEIFVDTPLDVCETRDVKGLYKKAREGVIKGFTGITQEYERPQMPELVVNTHGYTVRESTQKLVTLLEQEGIIPRSLRDVDLLPELYPSESIATEALRHEAESLQAIEISTVELQWVQVLAEGWAYPLRGFMREDEYLQTLHFNTLQSGMDGSYRENHSVPIVLSATQADKDRLDGCSSLTLKYQGKAVAILRRPEFYFQRKEERLARQFGTSNPNHPYSKQVYESGDYLVGGDLAVIERIRWEDGLDQYRLTPNELRRRFKELNADAIFAFQLRNPIHNGHALLMQDTRRQLLERGFKQPVLLLHPLGGWTKDDDVPLDVRMKQHQAVLDAGVLRREDTVLAIFPSPMMYAGPTEVQWHAKARMNAGANFYIVGRDPAGMPHPAKETYPDGNLYDATHGARVLKMAQGLDSMEILPFRVAAYDKSASRMAFFEPKRKDEFEFISGTKMRTLAKTGASPPDGFMEPEAWRILATYYQNLPQS

SEQ ID NO: 25816 - DNA, 1902 bp, Pseudomonas putida KT2440
  CDS (1)..(1902): transl_table=11
atgtcgcaccaatccgatttgatcagcgaagatatcctcgcttatctggctcagcacgagcgtaaagaactgctgcgttttctcacctgcggcaacgtggatgacggcaagagcaccctgatcgggcgcctgctgcacgactcgaagatgatctacgaggaccacctcgaggccatcacccgcgattcgaagaaagtcggcaccaccggcgaagaagtcgacctggcgctgctggtagatggcctgcaggccgagcgcgagcagggcatcaccatcgatgtcgcctaccgctacttctccaccgccaagcgcaagttcatcatcgccgacaccccgggccatgagcagtacacccgcaacatggccaccggtgcgtccacctgcgacctggcgatcatcctggtcgatgcccgctacggcgtgcagacccagacccgtcgccacagctacatcgcgtcgttgctgggtatcaagcacatcgtggtcgcggtcaacaagatggacctgaagggcttcgatgaaggcgtcttcgagtcgatcaaggccgactacctgaagttcgccgaagccatcaacctgaccccgagcagcctgcacttcgtgccgatgtcggcgctcaagggtgacaacgtggtcaaccacagcgagcaatcgccgtggtacgccggcccgacgctgatggaaatcctcgaaaccgtcgaggtttcggctgaccgcaacttcaccgacctgcgtttcccggtgcagtacgtcaaccgtcccaacctgaacttccgcggcttcgcgggcaccatcgccagtggcgtggtgcacaaaggtgacgagattgtcgtgctgccgtcgggcaagagcagccgggtcaagtccatcgtcacctacgaaggtgaactggaaaacgctggcccaggccaggccgtgaccctgaccatggaagacgagatcgacatctcccgtggcgacctgctggtacatgccgacaacgtcccgccggtcaccgaccagttcgacgccatgctggtgtggatggccgaggagccgatgctcccgggcaagaaatacgacatcaagcgtgccaccagctacgtgccaggttcgattgccagcatcacccacaaggtcgatgtgaacaccctggagcagggcgctgccagtgcgctgcagctgaacgagatcggccgcgtcaaggtagccctggacacctcgatcgccctcgacggttacgacagcaaccgcaccaccggtgcgttcatcgtcatcgaccgcctgaccaacggcaccgttggcgccggcatgatcatcgccccgccagtgttgccacacggcagcaccggccatcatggcaagcaggcccacgtgtccaccgaagagcgcgccctgcgcttcggccagcagccagccaccgtgctgttcagcggcctgtcgggtgctggcaagagcactttggcctatgccgttgagcgcaagctgttcgacatgggccgtgcggtgtacgtgctcgatggccagaacctgcgtcacgacctgaacaagggcctgccacaggaccgcgctggccgtaccgagaactggcgccgcgccgcccatgtggcgcgccagttcaacgaagccggcatgctgaccctggctgcgttcgtggccccggatgccgaaggccgcgaacaggccaaggcgctgatcggcaaggaacgcctggtgaccgtttacgtccaggcctcgccgctggtttgccgcgagcgtgacccgcaaggcctgtacgctgccggtggcgacaacatcccgggtgaaagcttcccgttcgatgtgccgctggatgctgatcttgtgatcgacacccaggccaccagcgtggacgaaggcgtgaaacaggtgctggacgtgctgcgtcagcgtggcgcgatctaa

SEQ ID NO: 25817 - protein, 633 aa, Pseudomonas putida KT2440
MSHQSDLISEDILAYLAQHERKELLRFLTCGNVDDGKSTLIGRLLHDSKMIYEDHLEAITRDSKKVGTTGEEVDLALLVDGLQAEREQGITIDVAYRYFSTAKRKFIIADTPGHEQYTRNMATGASTCDLAIILVDARYGVQTQTRRHSYIASLLGIKHIVVAVNKMDLKGFDEGVFESIKADYLKFAEAINLTPSSLHFVPMSALKGDNVVNHSEQSPWYAGPTLMEILETVEVSADRNFTDLRFPVQYVNRPNLNFRGFAGTIASGVVHKGDEIVVLPSGKSSRVKSIVTYEGELENAGPGQAVTLTMEDEIDISRGDLLVHADNVPPVTDQFDAMLVWMAEEPMLPGKKYDIKRATSYVPGSIASITHKVDVNTLEQGAASALQLNEIGRVKVALDTSIALDGYDSNRTTGAFIVIDRLTNGTVGAGMIIAPPVLPHGSTGHHGKQAHVSTEERALRFGQQPATVLFSGLSGAGKSTLAYAVERKLFDMGRAVYVLDGQNLRHDLNKGLPQDRAGRTENWRRAAHVARQFNEAGMLTLAAFVAPDAEGREQAKALIGKERLVTVYVQASPLVCRERDPQGLYAAGGDNIPGESFPFDVPLDADLVIDTQATSVDEGVKQVLDVLRQRGAI

SEQ ID NO: 25818 - DNA, 1662 bp, Coxiella burnetii RSA 493
  CDS (1)..(1662): transl_table=11
atgcgttcattgattttgaacccgtggcaactttgcgatctcgaaatgctttttaatggtggttttgcgccactgaatggcttcttgtcaaaagcggactattattgcgtaatagaaacaatgcgacttgttgatgggagtttatggcccatcccaatcacgttggatgtgaaaagcgaatttgcaacaaagttgattattggtgaaccccttgctttacgtgatgaccaaggtagtttattgggaattctggaagttgaagaaatatgggaaccggacaaatacaaagaagcgcactgtgtatttggcacgcttgatgaagcacaccccggagtgaaacagcttttacgtcataagggttccttttatttgaacggcaaattgacaaaaattaacgctcctaaacattacgatttcattcaatatcgactttctccccaacagctgaaagataagttgaaaggattacataaaaatttagttggttttcaaaccagaaatcccatgcaccgtgcccattttgaattaacgcggtgcgctgcagaaatatgcaatgcaaatttgctgattcagcctgtagttggcataactaagcttggtgatatggattatgtcacacgtgcgcgttgttacgagataatgctctcttattatcctcccggaacaacatttttaaattttttgccactggcaatgcgtatgggaggaccgcgtgaagcgctgtggcatatgttaatacgtaaaaactacggatgtacacactttatcattgggcgcgatcatgcaagccctggtgttgatagtcgaggaaaacctttttatgagccatatgcagcacaggcattggcacaaaaataccaaacggaagcaggtattcagattgtcccttttcacgagatggtttatagccaagcgaagcagaaatacattcctgtgaaccagatacaacaaaacgaaacaactctaaaaatatcgggtacagaaattcgtcggcgtctgcgagaaggactcgagattccagaatggttttcctatcctgaagttatcgctgaattgcgcaaatcttttcctcccaaaaacaaacaaggtataactctgtttctaaccggattgtcgggagccggaaaatctaccatctcaaaagcactaattgccaaattacaagaaatggatgagcgtaaaatcactcttttagatggagacgttgttcgcaaaaacctctctcacggtttaggtttttcgcgcgaagatcgcgatgccaatgttgcacgtattgcgtttgttgcttctgaagtaacaaaacatggtggcatggcaatatgtgctcaaattgctccctatgcagacaccaggaaaagggcaagagaaattgtggaaagccaaggaatctttatcgaggtttatatttctgcacctcttgaaatttgcgaacaaagagatcctaaaggactttacggaaaagctcgaatgggtataatcaaaatttttacaggcattagcgatccctacgaaccacctgcctcaccagaaattataattgaaacgaatcaaataactattgaggaatcagttgccaaaattatcttttacttatttgagaagggatatttgacgcctaaagtagacagggtgaggaattcagttctgagcgtcaatgcctaa

SEQ ID NO: 25819 - protein, 553 aa, Coxiella burnetii RSA 493
MRSLILNPWQLCDLEMLFNGGFAPLNGFLSKADYYCVIETMRLVDGSLWPIPITLDVKSEFATKLIIGEPLALRDDQGSLLGILEVEEIWEPDKYKEAHCVFGTLDEAHPGVKQLLRHKGSFYLNGKLTKINAPKHYDFIQYRLSPQQLKDKLKGLHKNLVGFQTRNPMHRAHFELTRCAAEICNANLLIQPVVGITKLGDMDYVTRARCYEIMLSYYPPGTTFLNFLPLAMRMGGPREALWHMLIRKNYGCTHFIIGRDHASPGVDSRGKPFYEPYAAQALAQKYQTEAGIQIVPFHEMVYSQAKQKYIPVNQIQQNETTLKISGTEIRRRLREGLEIPEWFSYPEVIAELRKSFPPKNKQGITLFLTGLSGAGKSTISKALIAKLQEMDERKITLLDGDVVRKNLSHGLGFSREDRDANVARIAFVASEVTKHGGMAICAQIAPYADTRKRAREIVESQGIFIEVYISAPLEICEQRDPKGLYGKARMGIIKIFTGISDPYEPPASPEIIIETNQITIEESVAKIIFYLFEKGYLTPKVDRVRNSVLSVNA

SEQ ID NO: 25820 - DNA, 606 bp, Helicobacter hepaticus ATCC 51449
  CDS (1)..(606): transl_table=11
atgcaaaatcaatccatacaatcaaaacaaacttcacaacaagacaatcaacaaacaagcacaatgtgttcaaagcaacaaggcgcagttatttggatttgtggattggcaggagcagggaaaacgactattgccaaagaaatttttacgcttttagagcaaaaatactctaatgtaatatttttagatggcgatgagtttagagagatttttggacgcagtggctttagcaaagaggagcgcttagaagtcgcaagattgattgcaaaattatgtgtttttctctcaaagagtggtttaatcgtagtgtgcgcaaccatttcgctttttgatgagatttatgctttcaatcgctcgcatatcgcgcgttattttgaagtttttgtagagtgttctatggaggagttattaagacgagataaaaaagccttgtattctcaagctctcaagggagatataaaagatgttataggcatagatttaacctatgatacgcctaaagcgcattatgtgcttcaaaacaacaccgccgataagttagattctaaagtgaaggaactttataacgcagtagaaaagtttttaatacaaaaaggagcaaaataa

SEQ ID NO: 25821 - protein, 201 aa, Helicobacter hepaticus ATCC 51449
MQNQSIQSKQTSQQDNQQTSTMCSKQQGAVIWICGLAGAGKTTIAKEIFTLLEQKYSNVIFLDGDEFREIFGRSGFSKEERLEVARLIAKLCVFLSKSGLIVVCATISLFDEIYAFNRSHIARYFEVFVECSMEELLRRDKKALYSQALKGDIKDVIGIDLTYDTPKAHYVLQNNTADKLDSKVKELYNAVEKFLIQKGAK

SEQ ID NO: 25822 - DNA, 810 bp, Rhodopirellula baltica SH 1
  CDS (1)..(810): transl_table=11
atggaagccgtcaacgctgatgtggccaatgaacactcacccagtcattcccgatcaatcgaaaacatgagccagtccaactctgacgactccgcgtctagcagcacccaacaggccggcgacggccaagacgatgtgcagcaaaatattgtttggcacgcccacacggtttctcgtgaagaccgcgaaagcaagttggggcaacgcggtgttgtcgtttggttcactgggttgagcggatgcggcaagagcacgatcgcgaatgagttggatcggttgctgattgatcgtggagcgacgtgcacgttgctggatggcgacaatgtgcgtcacggtttgtgtgctcctccctcggtgttgaaagaagaacatggcgaagatttcgccgggcggtttggattggggtttggtccgaccgatcgcgaagaaaacatccgccggatcggcgcggtcaccgagttgttcgcatcggccggcgtgatcgttttggccgctttcgtcagtccctatcagcgggatcgagatcgggtgcgaaatacgattgagagcagcggccgggcaggtgatttcctggaagtttttgtcgacacacctttggaaatctgcaagcagcgagatcccaaggggctgtatcaaaaggcgatcgcgggagaaatcaaaaacttcaccggaatcagcgatccctacgacgcgccgccctcgcctgagattcacttgaagtggcgtgagggccagacgcctcatgatcaggcatcggaaatcatccgtgaaatggagaaacgtggcgttctcgggcccgcgaagggctga

SEQ ID NO: 25823 - protein, 269 aa, Rhodopirellula baltica SH 1
MEAVNADVANEHSPSHSRSIENMSQSNSDDSASSSTQQAGDGQDDVQQNIVWHAHTVSREDRESKLGQRGVVVWFTGLSGCGKSTIANELDRLLIDRGATCTLLDGDNVRHGLCAPPSVLKEEHGEDFAGRFGLGFGPTDREENIRRIGAVTELFASAGVIVLAAFVSPYQRDRDRVRNTIESSGRAGDFLEVFVDTPLEICKQRDPKGLYQKAIAGEIKNFTGISDPYDAPPSPEIHLKWREGQTPHDQASEIIREMEKRGVLGPAKG

SEQ ID NO: 25824 - DNA, 633 bp, Candidatus Blochmannia floridanus
  CDS (1)..(633): transl_table=11
ttgttatttcattattatatgattaaacatatcaataaatataatgataaaaatgttatgtggcatttttatcgaattaatagagaggatagagaaagattacatcaacatcgatctatgatattatggtttacaggattgtcaggttctggaaaatcaactttagcatcaattttggaagagaaattatattgccgaggtgtgagtacttattctttagatggagataatattcggcatgggttgtgtaaagatttatcatttaatagtaatgatcgatctgaaaatatacgtagagtgggagaggtagctagattgatggttgatgctggtttggtagtgttagttgcattaatttctccatatcgaattgatcgtcagataatacgggatatgtgtattaaagattcttttttggagatatttgttgatactcctatgctaatttgtaaacaaagagatccaaaaggtttatatcatcaagttgattgtaaaaaaatcaagaattttaccggtattgattctatttatgaaagaccaaaacagccggatatttatttggatggacgtaaaactatatctgagttaatgaatcaattgttggatttagtacttgtaaagatttttaagtga

SEQ ID NO: 25825 - protein, 210 aa, Candidatus Blochmannia floridanus
MLFHYYMIKHINKYNDKNVMWHFYRINREDRERLHQHRSMILWFTGLSGSGKSTLASILEEKLYCRGVSTYSLDGDNIRHGLCKDLSFNSNDRSENIRRVGEVARLMVDAGLVVLVALISPYRIDRQIIRDMCIKDSFLEIFVDTPMLICKQRDPKGLYHQVDCKKIKNFTGIDSIYERPKQPDIYLDGRKTISELMNQLLDLVLVKIFK

SEQ ID NO: 25826 - DNA, 660 bp, Chromobacterium violaceum ATCC 12472
  CDS (1)..(660): transl_table=11
atgggcgaggtttccattcaggcgggcgtgcccgccaatgtttttcgcaccggagggcggatccgcctggtggaccggcagcggcttttcggccatgcggcggtgaccatctggctgaccgggctgagcggcgcgggcaagtccaccatcgcctatgaactggaggcgaggctggtgcgcggcggtttctccgccgtggtgctggacggggacaatctgcgccacggcatcaaccgcaacctgggtttcaccgatgccgaccgccgggaaaatctgcgccgggtggccgaggtggcgaggctgatgaacgatgccgggctgatcgtgatctgttcctgcatttctccgctgcgcatcgaccgcgaaatggcgcgcgacatcgtcggcgaacgccatttcgccgaggtttacgtcagcacgccgctggcggtgtgcgagcagcgcgattgcaagggtctgtacgcgaaggcgcgctcgggacagatcgcccatttcaccggcgtgtcctcgccgtacgaagcgcccgagcaggccgcgctggcgctggacaccagcgcgctgagcgtggatgaatgcgtggacaggctgttcggcatggtgctgcgctgttgcagcccggcggcgatggagggaggcatcggccatgaataccatatctga

SEQ ID NO: 25827 - protein, 219 aa, Chromobacterium violaceum ATCC 12472
MGEVSIQAGVPANVFRTGGRIRLVDRQRLFGHAAVTIWLTGLSGAGKSTIAYELEARLVRGGFSAVVLDGDNLRHGINRNLGFTDADRRENLRRVAEVARLMNDAGLIVICSCISPLRIDREMARDIVGERHFAEVYVSTPLAVCEQRDCKGLYAKARSGQIAHFTGVSSPYEAPEQAALALDTSALSVDECVDRLFGMVLRCCSPAAMEGGIGHEYHI

SEQ ID NO: 25828 - DNA, 693 bp, Mycobacterium avium subsp. paratuberculosis K-10
  CDS (1)..(693): transl_table=11
atgtcgaacaacatcacctggcacgaacacaagatcagccgcggcgaacgcgagcaactcaacggccacaagggctgcgtcatctggttcaccgggctcagcggcagcggcaagagcacggtcgccaacgtggtcgagcagaagctctacgagcggggcatccgcagctacctgctggacggcgacaacgtccgctacgggctcaacgccggcccggatctgctcgaggagcggcacggacccgagttcgcccagcggttcggactgggattctccgcccaggaccgcgaggagaacatccgccggatcggcgcggtggcgaagttgttctgcgaggccggcatcatcgcgctgacggccttcatcagcccctacgtccgcgaccgggacgcgattcgggccaccctcgacgacggcgatttccaggagatcttcatcgacaccccgatcgagatctgcgaaaagcgggatcccaaagggctttacaagaaggcgcgggccggtgagatcaagggattcaccgggatcgacgacccctacgaggccccgccgcggcccgaattgcggctcgacggcgccgccaaggacgccgagacgctggccgaggaggtgatcgcccacctggagcgggtcggcgtgatcgccaccgacggtcttgcgcacacccggggacgcgacgaggtgaccgcatga

SEQ ID NO: 25829 - protein, 230 aa, Mycobacterium avium subsp. paratuberculosis K-10
MSNNITWHEHKISRGEREQLNGHKGCVIWFTGLSGSGKSTVANVVEQKLYERGIRSYLLDGDNVRYGLNAGPDLLEERHGPEFAQRFGLGFSAQDREENIRRIGAVAKLFCEAGIIALTAFISPYVRDRDAIRATLDDGDFQEIFIDTPIEICEKRDPKGLYKKARAGEIKGFTGIDDPYEAPPRPELRLDGAAKDAETLAEEVIAHLERVGVIATDGLAHTRGRDEVTA

SEQ ID NO: 25830 - DNA, 705 bp, Yersinia pestis biovar Microtus str. 91001
  CDS (1)..(705): transl_table=11
atgccttggttcgccgtcatttcccacattggggtgcgcgtgatctgctggggggtaaatagcgtgccagcccatcagttagatgaccataaccaagaaacgcggtcagacgatgagaatatcgtctggcacccccatgcgatcacccgacaggatcgcgaacaacagcacggtcatcagggcgtagttctttggtttaccggcctgtcgggttccgggaaatccactctggccggtgcgctggaacaagcgttgttcgctcgcggtgtcagtacttacttactggatggtgataacgtgcgccatggcctctgccgcgatttgggcttttctgacgctgatcgtcgtgaaaatatccggcgggttggcgaggtggctaaactgatggttgatgccggtctggtggtcttgacggcgtttatttcccctcatcgggctgaacggaaaatggtacaagatatgctggcatcgggtcagtttattgaggtatttgtcgatacgccgttagcaatttgtgaggcccgtgacccgaaaggcttatacaaaaaagcccgtgccggagagcttaaaaattttacagggatcgattcagtttatgaatcgcctgcgtctcctgatatccatttgcagggtgaacaattagtaacaaatttgattgaacaattgttagacgtactgcgtggtagagctattatcaaatcctaa

SEQ ID NO: 25831 - protein, 234 aa, Yersinia pestis biovar Microtus str. 91001
MPWFAVISHIGVRVICWGVNSVPAHQLDDHNQETRSDDENIVWHPHAITRQDREQQHGHQGVVLWFTGLSGSGKSTLAGALEQALFARGVSTYLLDGDNVRHGLCRDLGFSDADRRENIRRVGEVAKLMVDAGLVVLTAFISPHRAERKMVQDMLASGQFIEVFVDTPLAICEARDPKGLYKKARAGELKNFTGIDSVYESPASPDIHLQGEQLVTNLIEQLLDVLRGRAIIKS

SEQ ID NO: 25832 - DNA, 1920 bp, Strongylocentrotus purpuratus
  CDS (1)..(1920)
atgacggatccatcggcaggcaagataatcaacaacaacaacccggacccctatggcatcagagtgtcaaagaagcaaggttccaccaacgtgacggagcaaacccatcatgtctccagggacaagcgtgggcaggtcatgggcatgcgcgggggcttccgtggatgtactatctggttcaccggtttgtctggagccggtaagacgactgtgtccttcgcccttgaggaatacctgtgtcaccacggcatcccggcctacggtctggacggagacaacgtgagaaccggtctcaacaagaacctgagcttcacccccgaggaccgtgaagagaacattcgtcgtgtcgccgaggtcgccaggctcttcgccgatggtggtatcgtctgtctgtcctcattcatcagtccctacgcaaaggaccgtgatgttgcacgacaattgcatcagaagactggccttccgttctacgagatcttcgtcaacactccattggagatctgtgaggagcgtgacgtgaagggactgtacaagaaggctagggctggccttatcaagggcttcactggtatcgaccaggcctatgaggcacctgagaacccagacctggtgcttatgtctggcagggacagcgtcaaggatgtagtccagcagttggtcaagttcctcagggcagagaacattcttcccgactctgttgtggatagcgtgaaggagctgctcgtccccgcagaggcagtagcagaggccttgaaggaggcagagagccttccatccctcaacatcaacaagcttgatatgcagtggacccaggtattagccgaggggtgggcgtcgcccatgatgggcttcatgcgggagagggagttcctacaatgtcagcatttcaactgccttctcgatggtgagcctttaaaagatcttccctttctttccccaggcggtgctataaaccagtccgtcccgattgttcttcccgttgaaaccgaggacaaggagcgtttggagaagttggaggcgttcacactcaagtacgagggtcgctgtatagccatcctgcgaacgccagagttctacctacacaggaaggaggagagatgctgccgtcagtggggaacgtcccatcctgatcatccctatatcaagatggtgatggagagtggtgattggctagttggtggcgacctggaggtcttggagcgtatacgttggaacgacgggctggaccagtaccgcctcactcccaacgagctccgcacccgcttccgagagatcggctccgacgccgtctttgcattccagctgcgtaaccccgtccacaacggccacgccctgctcatgaacgacaccaagcgcaggctgaaggaacgcggctacaagaagccatgtctgcttcttcatcccctgggtggttggaccaaagctgatgatgtgcctctcgatgtgcgcatgcgccagcactcagctatcctagatgaaggcattttggatccaaatagtacagtagtggccatcttcccatcacccatgatgtatgcaggaccaacagaggtacaatggcacgccaaagctcgtatggccacaggagcaaacttctacatcgtgggtcgtgaccccgccggtatgccacacccagacaagtcaggtgacctctacgatcattcccacggccgacgtgtcctcaccatggcgcccggtctcactcaactagaaatcatcccattccgcgtcgctgcctacaacctcaagaagaaagccatggacttcttcgatccggagaagaaggaggactttgacttcatctcgggcacccgcatgcgcaagctggctcgcgagggacacacccctcccgacggcttcatggcgcccaaggcatgggggatcctctccgattactacatgtctttgtccaagaagtaa

SEQ ID NO: 25833 - protein, 639 aa, Strongylocentrotus purpuratus
MTDPSAGKIINNNNPDPYGIRVSKKQGSTNVTEQTHHVSRDKRGQVMGMRGGFRGCTIWFTGLSGAGKTTVSFALEEYLCHHGIPAYGLDGDNVRTGLNKNLSFTPEDREENIRRVAEVARLFADGGIVCLSSFISPYAKDRDVARQLHQKTGLPFYEIFVNTPLEICEERDVKGLYKKARAGLIKGFTGIDQAYEAPENPDLVLMSGRDSVKDVVQQLVKFLRAENILPDSVVDSVKELLVPAEAVAEALKEAESLPSLNINKLDMQWTQVLAEGWASPMMGFMREREFLQCQHFNCLLDGEPLKDLPFLSPGGAINQSVPIVLPVETEDKERLEKLEAFTLKYEGRCIAILRTPEFYLHRKEERCCRQWGTSHPDHPYIKMVMESGDWLVGGDLEVLERIRWNDGLDQYRLTPNELRTRFREIGSDAVFAFQLRNPVHNGHALLMNDTKRRLKERGYKKPCLLLHPLGGWTKADDVPLDVRMRQHSAILDEGILDPNSTVVAIFPSPMMYAGPTEVQWHAKARMATGANFYIVGRDPAGMPHPDKSGDLYDHSHGRRVLTMAPGLTQLEIIPFRVAAYNLKKKAMDFFDPEKKEDFDFISGTRMRKLAREGHTPPDGFMAPKAWGILSDYYMSLSKK

SEQ ID NO: 25834 - DNA, 1872 bp, Strongylocentrotus purpuratus
  CDS (1)..(1872)
atgagtttaagtccagagcataagaaggccaagttgtcggatgtggcatcttcgtcaaagaagcaaggttccaccaacgtgacggagcaaacccatcatgtctccagggacaagcgtgggcaggtcatgggcatgcgcgggggcttccgtggatgtactatctggttcaccggtttgtctggagccggtaagacgactgtgtccttcgcccttgaggaatacctgtgtcaccacggcatcccggcctacggtctggacggagacaacgtgagaaccggtctcaacaagaacctgagcttcacccccgaggaccgtgaagagaacattcgtcgtgtcgccgaggtcgccaggctcttcgccgatggtggtatcgtctgtctgtcctcattcatcagtccctacgcaaaggaccgtgatgttgcacgacaattgcatcagaagactggccttccgttctacgagatcttcgtcaacactccattggagatctgtgaggagcgtgacgtgaagggactgtacaagaaggctagggctggccttatcaagggcttcactggtatcgaccaggcctatgaggcacctgagaacccagacctggtgcttatgtctggcagggacagcgtcaaggatgtagtccagcagttggtcaagttcctcagggcagagaacattcttcccgactctgttgtggatagcgtgaaggagctgctcgtccccgcagaggcagtagcagaggccttgaaggaggcagagagccttccatccctcaacatcaacaagcttgatatgcagtggacccaggtattagccgaggggtgggcgtcgcccatgatgggcttcatgcgggagagggagttcctacaatgtcagcatttcaactgccttctcgatggcggtgctataaaccagtccgtcccgattgttcttcccgttgaaaccgaggacaaggagcgtttggagaagttggaggcgttcacactcaagtacgagggtcgctgtatagccatcctgcgaacgccagagttctacctacacaggaaggaggagagatgctgccgtcagtggggaacgtcccatcctgatcatccctatatcaagatggtgatggagagtggtgattggctagttggtggcgacctggaggtcttggagcgtatacgttggaacgacgggctggaccagtaccgcctcactcccaacgagctccgcacccgcttccgagagatcggctccgacgccgtctttgcattccagctgcgtaaccccgtccacaacggccacgccctgctcatgaacgacaccaagcgcaggctgaaggaacgcggctacaagaagccatgtctgcttcttcatcccctgggtggttggaccaaagctgatgatgtgcctctcgatgtgcgcatgcgccagcactcagctatcctagatgaaggcattttggatccaaatagtacagtagtggccatcttcccatcacccatgatgtatgcaggaccaacagaggtacaatggcacgccaaagctcgtatggccacaggagcaaacttctacatcgtgggtcgtgaccccgccggtatgccacacccagacaagtcaggtgacctctacgatcattcccacggccgacgtgtcctcaccatggcgcccggtctcactcaactagaaatcatcccattccgcgtcgctgcctacaacctcaagaagaaagccatggacttcttcgatccggagaagaaggaggactttgacttcatctcgggcacccgcatgcgcaagctggctcgcgagggacacacccctcccgacggcttcatggcgcccaaggcatgggggatcctctccgattactacatgtctttgtccaagaagtaa

SEQ ID NO: 25835 - protein, 623 aa, Strongylocentrotus purpuratus
MSLSPEHKKAKLSDVASSSKKQGSTNVTEQTHHVSRDKRGQVMGMRGGFRGCTIWFTGLSGAGKTTVSFALEEYLCHHGIPAYGLDGDNVRTGLNKNLSFTPEDREENIRRVAEVARLFADGGIVCLSSFISPYAKDRDVARQLHQKTGLPFYEIFVNTPLEICEERDVKGLYKKARAGLIKGFTGIDQAYEAPENPDLVLMSGRDSVKDVVQQLVKFLRAENILPDSVVDSVKELLVPAEAVAEALKEAESLPSLNINKLDMQWTQVLAEGWASPMMGFMREREFLQCQHFNCLLDGGAINQSVPIVLPVETEDKERLEKLEAFTLKYEGRCIAILRTPEFYLHRKEERCCRQWGTSHPDHPYIKMVMESGDWLVGGDLEVLERIRWNDGLDQYRLTPNELRTRFREIGSDAVFAFQLRNPVHNGHALLMNDTKRRLKERGYKKPCLLLHPLGGWTKADDVPLDVRMRQHSAILDEGILDPNSTVVAIFPSPMMYAGPTEVQWHAKARMATGANFYIVGRDPAGMPHPDKSGDLYDHSHGRRVLTMAPGLTQLEIIPFRVAAYNLKKKAMDFFDPEKKEDFDFISGTRMRKLAREGHTPPDGFMAPKAWGILSDYYMSLSKK

SEQ ID NO: 25836 - DNA, 1959 bp, Strongylocentrotus purpuratus
  CDS (1)..(1959)
atgagtacgagtactaatgatggacttgcggtcagtgagaagtgttcggcaagtgaccaaggaacttcttccgaaatgacggatccatcggcaggcaagataatcaacaacaacaacccggacccctatggcatcagagtgtcaaagaagcaaggttccaccaacgtgacggagcaaacccatcatgtctccagggacaagcgtgggcaggtcatgggcatgcgcgggggcttccgtggatgtactatctggttcaccggtttgtctggagccggtaagacgactgtgtccttcgcccttgaggaatacctgtgtcaccacggcatcccggcctacggtctggacggagacaacgtgagaaccggtctcaacaagaacctgagcttcacccccgaggaccgtgaagagaacattcgtcgtgtcgccgaggtcgccaggctcttcgccgatggtggtatcgtctgtctgtcctcattcatcagtccctacgcaaaggaccgtgatgttgcacgacaattgcatcagaagactggccttccgttctacgagatcttcgtcaacactccattggagatctgtgaggagcgtgacgtgaagggactgtacaagaaggctagggctggccttatcaagggcttcactggtatcgaccaggcctatgaggcacctgagaacccagacctggtgcttatgtctggcagggacagcgtcaaggatgtagtccagcagttggtcaagttcctcagggcagagaacattcttcccgactctgttgtggatagcgtgaaggagctgctcgtccccgcagaggcagtagcagaggccttgaaggaggcagagagccttccatccctcaacatcaacaagcttgatatgcagtggacccaggtattagccgaggggtgggcgtcgcccatgatgggcttcatgcgggagagggagttcctacaatgtcagcatttcaactgccttctcgatggcggtgctataaaccagtccgtcccgattgttcttcccgttgaaaccgaggacaaggagcgtttggagaagttggaggcgttcacactcaagtacgagggtcgctgtatagccatcctgcgaacgccagagttctacctacacaggaaggaggagagatgctgccgtcagtggggaacgtcccatcctgatcatccctatatcaagatggtgatggagagtggtgattggctagttggtggcgacctggaggtcttggagcgtatacgttggaacgacgggctggaccagtaccgcctcactcccaacgagctccgcacccgcttccgagagatcggctccgacgccgtctttgcattccagctgcgtaaccccgtccacaacggccacgccctgctcatgaacgacaccaagcgcaggctgaaggaacgcggctacaagaagccatgtctgcttcttcatcccctgggtggttggaccaaagctgatgatgtgcctctcgatgtgcgcatgcgccagcactcagctatcctagatgaaggcattttggatccaaatagtacagtagtggccatcttcccatcacccatgatgtatgcaggaccaacagaggtacaatggcacgccaaagctcgtatggccacaggagcaaacttctacatcgtgggtcgtgaccccgccggtatgccacacccagacaagtcaggtgacctctacgatcattcccacggccgacgtgtcctcaccatggcgcccggtctcactcaactagaaatcatcccattccgcgtcgctgcctacaacctcaagaagaaagccatggacttcttcgatccggagaagaaggaggactttgacttcatctcgggcacccgcatgcgcaagctggctcgcgagggacacacccctcccgacggcttcatggcgcccaaggcatgggggatcctctccgattactacatgtctttgtccaagaagtaa

SEQ ID NO: 25837 - protein, 652 aa, Strongylocentrotus purpuratus
MSTSTNDGLAVSEKCSASDQGTSSEMTDPSAGKIINNNNPDPYGIRVSKKQGSTNVTEQTHHVSRDKRGQVMGMRGGFRGCTIWFTGLSGAGKTTVSFALEEYLCHHGIPAYGLDGDNVRTGLNKNLSFTPEDREENIRRVAEVARLFADGGIVCLSSFISPYAKDRDVARQLHQKTGLPFYEIFVNTPLEICEERDVKGLYKKARAGLIKGFTGIDQAYEAPENPDLVLMSGRDSVKDVVQQLVKFLRAENILPDSVVDSVKELLVPAEAVAEALKEAESLPSLNINKLDMQWTQVLAEGWASPMMGFMREREFLQCQHFNCLLDGGAINQSVPIVLPVETEDKERLEKLEAFTLKYEGRCIAILRTPEFYLHRKEERCCRQWGTSHPDHPYIKMVMESGDWLVGGDLEVLERIRWNDGLDQYRLTPNELRTRFREIGSDAVFAFQLRNPVHNGHALLMNDTKRRLKERGYKKPCLLLHPLGGWTKADDVPLDVRMRQHSAILDEGILDPNSTVVAIFPSPMMYAGPTEVQWHAKARMATGANFYIVGRDPAGMPHPDKSGDLYDHSHGRRVLTMAPGLTQLEIIPFRVAAYNLKKKAMDFFDPEKKEDFDFISGTRMRKLAREGHTPPDGFMAPKAWGILSDYYMSLSKK

SEQ ID NO: 25838 - DNA, 1884 bp, Strongylocentrotus purpuratus
  CDS (1)..(1884)
atgacggatccatcggcaggcaagataatcaacaacaacaacccggacccctatggcatcagagtgtcaaagaagcaaggttccaccaacgtgacggagcaaacccatcatgtctccagggacaagcgtgggcaggtcatgggcatgcgcgggggcttccgtggatgtactatctggttcaccggtttgtctggagccggtaagacgactgtgtccttcgcccttgaggaatacctgtgtcaccacggcatcccggcctacggtctggacggagacaacgtgagaaccggtctcaacaagaacctgagcttcacccccgaggaccgtgaagagaacattcgtcgtgtcgccgaggtcgccaggctcttcgccgatggtggtatcgtctgtctgtcctcattcatcagtccctacgcaaaggaccgtgatgttgcacgacaattgcatcagaagactggccttccgttctacgagatcttcgtcaacactccattggagatctgtgaggagcgtgacgtgaagggactgtacaagaaggctagggctggccttatcaagggcttcactggtatcgaccaggcctatgaggcacctgagaacccagacctggtgcttatgtctggcagggacagcgtcaaggatgtagtccagcagttggtcaagttcctcagggcagagaacattcttcccgactctgttgtggatagcgtgaaggagctgctcgtccccgcagaggcagtagcagaggccttgaaggaggcagagagccttccatccctcaacatcaacaagcttgatatgcagtggacccaggtattagccgaggggtgggcgtcgcccatgatgggcttcatgcgggagagggagttcctacaatgtcagcatttcaactgccttctcgatggcggtgctataaaccagtccgtcccgattgttcttcccgttgaaaccgaggacaaggagcgtttggagaagttggaggcgttcacactcaagtacgagggtcgctgtatagccatcctgcgaacgccagagttctacctacacaggaaggaggagagatgctgccgtcagtggggaacgtcccatcctgatcatccctatatcaagatggtgatggagagtggtgattggctagttggtggcgacctggaggtcttggagcgtatacgttggaacgacgggctggaccagtaccgcctcactcccaacgagctccgcacccgcttccgagagatcggctccgacgccgtctttgcattccagctgcgtaaccccgtccacaacggccacgccctgctcatgaacgacaccaagcgcaggctgaaggaacgcggctacaagaagccatgtctgcttcttcatcccctgggtggttggaccaaagctgatgatgtgcctctcgatgtgcgcatgcgccagcactcagctatcctagatgaaggcattttggatccaaatagtacagtagtggccatcttcccatcacccatgatgtatgcaggaccaacagaggtacaatggcacgccaaagctcgtatggccacaggagcaaacttctacatcgtgggtcgtgaccccgccggtatgccacacccagacaagtcaggtgacctctacgatcattcccacggccgacgtgtcctcaccatggcgcccggtctcactcaactagaaatcatcccattccgcgtcgctgcctacaacctcaagaagaaagccatggacttcttcgatccggagaagaaggaggactttgacttcatctcgggcacccgcatgcgcaagctggctcgcgagggacacacccctcccgacggcttcatggcgcccaaggcatgggggatcctctccgattactacatgtctttgtccaagaagtaa

SEQ ID NO: 25839 - protein, 627 aa, Strongylocentrotus purpuratus
MTDPSAGKIINNNNPDPYGIRVSKKQGSTNVTEQTHHVSRDKRGQVMGMRGGFRGCTIWFTGLSGAGKTTVSFALEEYLCHHGIPAYGLDGDNVRTGLNKNLSFTPEDREENIRRVAEVARLFADGGIVCLSSFISPYAKDRDVARQLHQKTGLPFYEIFVNTPLEICEERDVKGLYKKARAGLIKGFTGIDQAYEAPENPDLVLMSGRDSVKDVVQQLVKFLRAENILPDSVVDSVKELLVPAEAVAEALKEAESLPSLNINKLDMQWTQVLAEGWASPMMGFMREREFLQCQHFNCLLDGGAINQSVPIVLPVETEDKERLEKLEAFTLKYEGRCIAILRTPEFYLHRKEERCCRQWGTSHPDHPYIKMVMESGDWLVGGDLEVLERIRWNDGLDQYRLTPNELRTRFREIGSDAVFAFQLRNPVHNGHALLMNDTKRRLKERGYKKPCLLLHPLGGWTKADDVPLDVRMRQHSAILDEGILDPNSTVVAIFPSPMMYAGPTEVQWHAKARMATGANFYIVGRDPAGMPHPDKSGDLYDHSHGRRVLTMAPGLTQLEIIPFRVAAYNLKKKAMDFFDPEKKEDFDFISGTRMRKLAREGHTPPDGFMAPKAWGILSDYYMSLSKK

SEQ ID NO: 25840 - DNA, 924 bp, Magnaporthe grisea 70-15
  CDS (1)..(924)
atgggtggaccccgcgaggccatctggcacgccatcatccgcaagaaccacggtgccacgcacttcatcgtgggcagggaccacgccggaccgggcaagaacagcgccggcgtcgacttttacggcccgtacgacgcccagtacgccgtcgagaagtacaaggacgagcttggcatcgaggtcgtgcccttccagatgatgacctacctgcccgacagcgacgagtacgctcccgtcgacacgatcgagaagggcgtcaggacgctcaatatcagcggaaccgagcttcgctccaggctgcgcagcggcagggacattcctgagtggttctcgtatcccgaggtggtcaaggttctccgcgagagccacccgcctcgatcgcagcagggtttcaccatcttcctgacgggttaccaaaacagcggcaaggaccagatcgcgcgtgcgctccaggtgacgctgaaccagcagggcggccggtccgtgtcaatgctgctcggtgagacggtgcgcagtgagctctcgtcggagctgggcttctcgcgcgaggatcgcgacaagaacattggccgcatcgcctttgttgcatccgagctgacccgctccggagcggccgtcatcgccgccccgatcgcaccctttgaggcctccaggcagcacgccagggagctcgtggaaaagcacggcgacttctacctcgtctgggtcaacacaccgctcgagcactgcgagaagacggacaagcgcggcatctacaagcgcgcccgcgccggcgagatcaagggcttcacaggagtcgacgacccctacgagaaccccgtcaaaccggacctgacggtcgacgtttccaagcagtctgtgcggtccattgttcaccagatcgtgctgacgttggagagcaaggggctgcttgatcgtttgtaa

SEQ ID NO: 25841 - protein, 307 aa, Magnaporthe grisea 70-15
MGGPREAIWHAIIRKNHGATHFIVGRDHAGPGKNSAGVDFYGPYDAQYAVEKYKDELGIEVVPFQMMTYLPDSDEYAPVDTIEKGVRTLNISGTELRSRLRSGRDIPEWFSYPEVVKVLRESHPPRSQQGFTIFLTGYQNSGKDQIARALQVTLNQQGGRSVSMLLGETVRSELSSELGFSREDRDKNIGRIAFVASELTRSGAAVIAAPIAPFEASRQHARELVEKHGDFYLVWVNTPLEHCEKTDKRGIYKRARAGEIKGFTGVDDPYENPVKPDLTVDVSKQSVRSIVHQIVLTLESKGLLDRL

SEQ ID NO: 25842 - DNA, 1644 bp, Magnaporthe grisea 70-15
  CDS (1)..(1644)
atggccaaccctccccacggcggtgtcctcaaggacctgttggcccgcgatgctccccgcaatgctgagctggccgccgaggcagagacgctgcccgcactcctgctgaccgagcgtcagctttgtgatctggagctgatcatcactggtggcttttcccctctggagggcttcatgactgagaaggactacaatggcgtcgtcaaggagaaccgtttgaccgacggtgccctcttcagcatgcccataaccctcgacctgtcgcaacagaccattgacgagaatggtgtcaagcccggtgcccgcatcactctgcgcgacttccgtgacgaccgcaacctgaccattctcacagttgaggatgtctaccgcccggacaagcagctcgaggccaaggaggtctttggcggcgatcccgagcaccctgccgtcaactacctcttcaacacggctggtgagttctacgtcggcggtaagctcgaggctgtcaaccgcctgcagcactacgactttacccgcaaccccatgcaccgcgcccaccgtgaactgacggtccgcgctgcccgctcgcaccacgccaacgtcctcatccaccccgtcgtcggcctgaccaagcccggcgacattgaccactttacgcgcgtgcgcgtctacaaggccctcctccctcgctaccccaacggcatggcggtcctgggtctgctgccgctggccatgcgcatgggtggaccccgcgaggccatctggcacgccatcatccgcaagaaccacggtgccacgcacttcatcgtgggcagggaccacgccggaccgggcaagaacagcgccggcgtcgacttttacggcccgtacgacgcccagtacgccgtcgagaagtacaaggacgagcttggcatcgaggtcgtgcccttccagatgatgacctacctgcccgacagcgacgagtacgctcccgtcgacacgatcgagaagggcgtcaggacgctcaatatcagcggaaccgagcttcgctccaggctgcgcagcggcagggacattcctgagtggttctcgtatcccgaggtggtcaaggttctccgcgagagccacccgcctcgatcgcagcagggtttcaccatcttcctgacgggttaccaaaacagcggcaaggaccagatcgcgcgtgcgctccaggtgacgctgaaccagcagggcggccggtccgtgtcaatgctgctcggtgagacggtgcgcagtgagctctcgtcggagctgggcttctcgcgcgaggatcgcgacaagaacattggccgcatcgcctttgttgcatccgagctgacccgctccggagcggccgtcatcgccgccccgatcgcaccctttgaggcctccaggcagcacgccagggagctcgtggaaaagcacggcgacttctacctcgtctgggtcaacacaccgctcgagcactgcgagaagacggacaagcgcggcatctacaagcgcgcccgcgccggcgagatcaagggcttcacaggagtcgacgacccctacgagaaccccgtcaaaccggacctgacggtcgacgtttccaagcagtctgtgcggtccattgttcaccagatcgtgctgacgttggagagcaaggggctgcttgatcgtttgtaa

SEQ ID NO: 25843 - protein, 547 aa, Magnaporthe grisea 70-15
MANPPHGGVLKDLLARDAPRNAELAAEAETLPALLLTERQLCDLELIITGGFSPLEGFMTEKDYNGVVKENRLTDGALFSMPITLDLSQQTIDENGVKPGARITLRDFRDDRNLTILTVEDVYRPDKQLEAKEVFGGDPEHPAVNYLFNTAGEFYVGGKLEAVNRLQHYDFTRNPMHRAHRELTVRAARSHHANVLIHPVVGLTKPGDIDHFTRVRVYKALLPRYPNGMAVLGLLPLAMRMGGPREAIWHAIIRKNHGATHFIVGRDHAGPGKNSAGVDFYGPYDAQYAVEKYKDELGIEVVPFQMMTYLPDSDEYAPVDTIEKGVRTLNISGTELRSRLRSGRDIPEWFSYPEVVKVLRESHPPRSQQGFTIFLTGYQNSGKDQIARALQVTLNQQGGRSVSMLLGETVRSELSSELGFSREDRDKNIGRIAFVASELTRSGAAVIAAPIAPFEASRQHARELVEKHGDFYLVWVNTPLEHCEKTDKRGIYKRARAGEIKGFTGVDDPYENPVKPDLTVDVSKQSVRSIVHQIVLTLESKGLLDRL

SEQ ID NO: 25844 - DNA, 2061 bp, Nasonia vitripennis
  CDS (1)..(2061)
atgtcgtcgcagcttttggagccgccagcgtcgctacgccagtcgccactttcgcagtcgtcagctgccgagactccgagcgagtgccacgttatacgacgagcatcacaagccgagtgtcagccgacaactgcatcagcaagaaagcgcgctggtcgcagacggccgcttatcatgtcgagcaacgggccgatcgcacctgaggcaccgaacaagcgcatcatgacgacctgcacgaacgtctcattccaagcgcaccacgtgtcgcgcctgaaacgcggccgagcccttggcacagtccgcggtttccggggctgcaccgtgtggttgacgggtctgtcgggtgccggcaagacctcgatcgccttccagctcgaggctttcctcgtcgacctgggcatcgccgcctacggcctcgacggcgacaacgtccgcaccggcctcaacaacaacctcggcttcaccccagaggacagaaaggagaacatccgcagagtagccgaggtcgccaagctctttgccgacagcggtcagatctgcctctgcagcttcgtctcgcccttcgaggaggacaggcaaatggccagggagattcacaaggagttcgacctgcccttcttcgaggtcttcgtcgacacgccgctgaacgtttgcgaggctagggatgtcaaaggactctacaaaaaggcccgccaaggtgccatcaagggcttcacgggcatcgaccagatgtacgagcggccctcgaacccggacctcgtcgttaccacggaaaactgtaccctcgaggagtccgccttgacggtcatccgcttcctccaggagaagcacataattccggacacccaggagccaggcgcaccgctgcgcgagctcttcgtacctccgacgagagtcgagactgccaaggccgaagccgagacgctgcagagcgtcgaaatcggcgaagtcgacgtccagtggctgcaggttctggccgaaggctgggctgcgccgctcaccgggtttatgagggaggaccagtacctgcaggtccaacacttgaagtgcctgattcacgacggcaaggaggtaaaccaatctgtcccaatcgttctggcggtgagcagctcggataagagtcgactggagggtctgtcagcgatctgtctgaaatatcagggccggtccctggctatcctcagacgtcccgagttctactttcaccgaaaggaggaacgatgtagctggcaattcggtaccaacaataccggccatccaaccgtcaaaatgattcacgaatcaggcgactggctcgtgggtggagacgtcgaggttctcgagcgcatcaggtggaacgacggcctcgacgagtacagactgacgcccaacgagatccgggagagatgcaggaaaatgaacgccgatgccgtctttgcgttccagctgagaaatcccattcacaatggacacgctctactcatgcaggacacgagaagacgtttgctggaagagcgaggtttcaaaaatccagttctattgttgcatccgttgggaggatggacgaaagacgacgacgtgcctctcaaaattcgcatgctgcagcacaaagctgtgctcgacgaaggcgtcttagattccaattcgacacttttagccattttccccagtccaatgatgtatgccggtccagtcgaggtgcaatggcacgcgaaagcgaggatgaacgccggtgcgaacttctacatcgtgggcagagatccagccggaatcccccatccagacaaaaatgcaacgcccgacggcaatctctacgatcctacgcacggggctagagttttgtctatcgctcgaggcttgcagaaattagaaataattccgttcaaagtggctgcatacgacaccgtgaacaagagaatggcctttttcgattcgagtcggaagcaggactttgacttcatatcggggactaggatgagaaatttcgccaaaactggagagctaccacctccgggtttcatggctccaaaagcctgggacgtattggcaacgtattataaacaattgaactccaaaatgtaa

SEQ ID NO: 25845 - protein, 686 aa, Nasonia vitripennis
MSSQLLEPPASLRQSPLSQSSAAETPSECHVIRRASQAECQPTTASARKRAGRRRPLIMSSNGPIAPEAPNKRIMTTCTNVSFQAHHVSRLKRGRALGTVRGFRGCTVWLTGLSGAGKTSIAFQLEAFLVDLGIAAYGLDGDNVRTGLNNNLGFTPEDRKENIRRVAEVAKLFADSGQICLCSFVSPFEEDRQMAREIHKEFDLPFFEVFVDTPLNVCEARDVKGLYKKARQGAIKGFTGIDQMYERPSNPDLVVTTENCTLEESALTVIRFLQEKHIIPDTQEPGAPLRELFVPPTRVETAKAEAETLQSVEIGEVDVQWLQVLAEGWAAPLTGFMREDQYLQVQHLKCLIHDGKEVNQSVPIVLAVSSSDKSRLEGLSAICLKYQGRSLAILRRPEFYFHRKEERCSWQFGTNNTGHPTVKMIHESGDWLVGGDVEVLERIRWNDGLDEYRLTPNEIRERCRKMNADAVFAFQLRNPIHNGHALLMQDTRRRLLEERGFKNPVLLLHPLGGWTKDDDVPLKIRMLQHKAVLDEGVLDSNSTLLAIFPSPMMYAGPVEVQWHAKARMNAGANFYIVGRDPAGIPHPDKNATPDGNLYDPTHGARVLSIARGLQKLEIIPFKVAAYDTVNKRMAFFDSSRKQDFDFISGTRMRNFAKTGELPPPGFMAPKAWDVLATYYKQLNSKM

SEQ ID NO: 25846 - DNA, 627 bp, Magnaporthe grisea 70-15
  CDS (1)..(627)
atggcaaccaacatcacctggcacgacggcctgacccgccgcgagcgcaaccagctgcgcggccagcgcggcttcacaatctggttcacgggtctgtcggcgtcgggcaagtcgacggtggcgacggcgctggagcagcaccttttgcacctgggcttggccgcgtaccggctggacggcgacaacgtccggttcgggctcaataaggacctgggcttttcggaaaaggaccgcaacgaaaacatccgccgcattgccgaggtggccaagctgtttgccgacagctccgtcgtggcgctgacgtctttcatctcgccgtaccgcgccgacaggcagacggctagagagctgcacgcgcaggccgcgcaaaagggcgacgagccgctcgagttcgtcgaggtctacgtcgacatacccatcgaggtcgccgagcagcgcgaccccaagggtctgtacaagaaggcccgcgccggagagatcaaggagtttaccggcatctcggccccgtacgaggcacccgagaaccccgagatcaccatcaagacccacgagaactcggtcgaggagtgtgtcgctcaaattgtcaagtggctgcaggacaagggtcttgtcaaggctaccccttga

SEQ ID NO: 25847 - protein, 208 aa, Magnaporthe grisea 70-15
MATNITWHDGLTRRERNQLRGQRGFTIWFTGLSASGKSTVATALEQHLLHLGLAAYRLDGDNVRFGLNKDLGFSEKDRNENIRRIAEVAKLFADSSVVALTSFISPYRADRQTARELHAQAAQKGDEPLEFVEVYVDIPIEVAEQRDPKGLYKKARAGEIKEFTGISAPYEAPENPEITIKTHENSVEECVAQIVKWLQDKGLVKATP

SEQ ID NO: 25848 - DNA, 624 bp, Gibberella zeae PH-1
  CDS (1)..(624)
atggctaccaacattacctggcacccctctctatcgcgcaaggagcgcgaagagacccgcggccagcgcggtctcaccatctggctgaccggtctctctgcctctggcaagtccaccgtcgccactgctcttgagcagcacctccttcacctgggcgtcgccgcctaccgcctggatggtgacaacgttcgcttcggcctcaacaaggaccttggcttctccgaggtcgaccgaaacgaaaacatccgccgcatctccgaggttgctaagctgtttgccgattcttccaccatcgctattacctccttcatctctccctaccgagcggatcgccaggtcgcccgtcagctacacgagcaggccactcaaggcggcgacgcgcctatccccttcgtcgaggtctacgtcgatgtgcccctcgaggttgctgagcagcgcgaccccaagggtctttacaagaaggctcgcgccggtgaaatcaaggatttcactggcatctctgctccttacgaggagcccgagaaggctgagatcaccatcaagactcacgagaactctgttgaggaatgtgtcgctcagatcgttgagtggctcaacgagaagggctacctcaacaagaaataa

SEQ ID NO: 25849 - protein, 207 aa, Gibberella zeae PH-1
MATNITWHPSLSRKEREETRGQRGLTIWLTGLSASGKSTVATALEQHLLHLGVAAYRLDGDNVRFGLNKDLGFSEVDRNENIRRISEVAKLFADSSTIAITSFISPYRADRQVARQLHEQATQGGDAPIPFVEVYVDVPLEVAEQRDPKGLYKKARAGEIKDFTGISAPYEEPEKAEITIKTHENSVEECVAQIVEWLNEKGYLNKK

SEQ ID NO: 25850 - DNA, 1845 bp, Gibberella zeae PH-1
  CDS (1)..(1845)
atggccaacactcctcatggtggtgtcctaaaggacctcttcgctcgcgatctcccccgtcaatccgagcttgaggccgaggctcagaagctccctgctcttacactcagcgagcgacacctttgcgatcttgagctgatcctcaacggtggtttctctcctctcgaaggtttcttgactgagaaggactacaatggcgttgttgagaacaaccgtctcgccgatggcgctctcttctccatgcccatcaacctcgatgtcaaccaggctgagatcgaccagctcggcctcaaagctggtgctcgcgtcaccctccgcgacttccgtgacgaccgaaacctcgctatcctgaccgttgaggacatctaccgacctgacaaggtcaacgaggccaagaaggtctttggcagcgacgacgacacccaccccggtgtcaagtacctcttcgataccgccaaggagttctacgttggtggtaagcttgaggctatcaaccgcctagagcactacgacttcctcgaccttcgattcaccccctctgagctccgcgctcacttcaacaagctcggctggcaaaaggtcgtcgctttccagacccgaaaccccatgcaccgtgctcaccgtgagttgacggtccgcgctgcccgctcccagcaggccaacgtcctcatccagcccgtcgttggtcttaccaagcccggtgacatcgaccacttcacccgtgtccgtgtctacaaggctctcctgccccgttaccccaacggtatggccgccctcgctcttctgcccctcgccatgcgaatgggtggtccccgtgaggctctctggcacgctatcatccgcaagaaccacggtgctacccacttcatcgttggccgtgaccacgccggtcccggtaagaacaagcagggcaaggaccactacggtccttatgatgctcaggttctcgtccaggagcaccaggaggagcttggtatcaagatggtcgagttccaggccatgatctacctgcccgactctgatgagtacctccccatcaacgagatccctgagggtacccgtaccctcaacatctccggtactgagctccgacaccgtctccgaaccggcaaggacatccccgagtggttctcctaccccgaggttgtcaaggttcttcgcgaggagaaccccctccctgccgagaagggttttactgtcttcatgaccggttaccagaacagcggaaaggaccagattgcccgtgctctccaggccactctcaaccagggtggtggtcgtcccgtctccatgttgctcggtgagaacgtgcgacacgagctctctcccgagcttggcttcactcgcaaggaccgcgacctcaacatccagcgcattgctttcgtcgcctctgagctgaccaaggccggtgccgctgtcatcgccgcccctatcgctccctttgaggatgctcgcaaggctgcccgtgacctcgttgagaagtccggtcccttcttccttgtccacgttgctactccccttgagtactgtgagaagactgaccgcaagggtgtctacgctgccgctcgcaacggcgagattaagaacttcaccggtgtcgatgacccctacgaggctcctgccaagcctgacctcgttgtcgacctcgagaagcagaacgtccgctccattgtgcaccagattgttctgctcctcgagagcaacggtcttctcgaccgcctcgcaaggataaacggaattggcgttactttgaatgagatggataaggaaaagatgggcaaatgtgatgaactgcattgcattgcgttgctggtatacttagacgacgaagccgtgtcgggatag

SEQ ID NO: 25851 - protein, 614 aa, Gibberella zeae PH-1
MANTPHGGVLKDLFARDLPRQSELEAEAQKLPALTLSERHLCDLELILNGGFSPLEGFLTEKDYNGVVENNRLADGALFSMPINLDVNQAEIDQLGLKAGARVTLRDFRDDRNLAILTVEDIYRPDKVNEAKKVFGSDDDTHPGVKYLFDTAKEFYVGGKLEAINRLEHYDFLDLRFTPSELRAHFNKLGWQKVVAFQTRNPMHRAHRELTVRAARSQQANVLIQPVVGLTKPGDIDHFTRVRVYKALLPRYPNGMAALALLPLAMRMGGPREALWHAIIRKNHGATHFIVGRDHAGPGKNKQGKDHYGPYDAQVLVQEHQEELGIKMVEFQAMIYLPDSDEYLPINEIPEGTRTLNISGTELRHRLRTGKDIPEWFSYPEVVKVLREENPLPAEKGFTVFMTGYQNSGKDQIARALQATLNQGGGRPVSMLLGENVRHELSPELGFTRKDRDLNIQRIAFVASELTKAGAAVIAAPIAPFEDARKAARDLVEKSGPFFLVHVATPLEYCEKTDRKGVYAAARNGEIKNFTGVDDPYEAPAKPDLVVDLEKQNVRSIVHQIVLLLESNGLLDRLARINGIGVTLNEMDKEKMGKCDELHCIALLVYLDDEAVSG

SEQ ID NO: 25852 - DNA, 1830 bp, Apis mellifera
  CDS (1)..(1830)
atgtcaaacgaaactccaaataaacgtatgatgacgacttgtagcaatgtatcagagcaagcacatcatgtatcaagagcaaaacgtggacaagcaataggcagtataagaggttttcgaggatgtacagtttggttaacaggcctttctggtgcaggaaaaacttccatagcttttcaagttgaagctattttagttaatcatggaattgctgcttatggacttgatggagataatgtaagaagtggtttaaactgcaatcttggttttagcaaagaagatagaaaagaaaatataagaagagttgcagaagtagcaaaattatttgccgatagtggtcaaatttgtttatgtagttttgtatcaccatttgaagaagatagacaaatggcaagacaaattcataaaatgtcggatcttccattttttgaaatttttgttgatacacctcttaatgtgtgtgaagctagggatacgaaaggattatataaaaaagcacgtgaaggcacaatcaaaggttttactggaatagatcagatgtatgaaagaccaacaaatcctgatttagtggtaatcactgaaaactgtactccagaagaatcagctgcaactgttattgatcttctggagaaacattgtattataccaatacttcaaaaaccttctataccaatacgggagttgttcattccagaatcacgaatatcttctgccaaaacagaagcagctactcttcagagtttagaaattagtgaaatagatgtacaatggctccaagttttagcagaaggttgggcagcacctcttaccggttttatgagagaacatcaatatcttcagactcaacatttaaaatgtcttcttgaagatgataaagaaattaaccaatcaattcccatagtccttgctgtacatgcagaggataagcaacgtttgaatgggctttcagcttttacattgaaatataaatataaacctcttgcaatattacgtaggcctgaattttattttcacagaaaagaagaaagatgtggttggcaatttggtactaacaatttaggacatccatatgtaaaaataattcatgaatctggcgattggttagtaggtggtgatgtagaagttattcaaaggattagatggcatgatggtctagataaatatagacttactccaaatgaaattagagcaaaatgtagaaaaatgaaagctgatgctgtatttgcatttcaacttagaaatcctatacataatggtcatgcattattaatgcaagatacaaaaaaacgcttattagaagatagaggatttaaaaatcctgttttattgttacatcctctgggtggttggacaaaagatgatgatgtaccattacatacaagaattctacaacatgaagctgtacttaatgaaggagtattggatgctagttctacattattagcaatttttccaagtccaatgatgtatgcaggaccaattgaggtacaatggcacgcaaaggccagaatgaatgctggtgctaacttttatattgttggaagagatcctgctggtataccacatcctaataaaaatgcaacaccagatggaaatctttatgatcctactcatggagccagagttctctcaatagctcgaggtttacaatcactagaaatcataccatttaaagttgcagcatatgataaaaaatataaaaaaatgtctttctttgatgagaaacgaaaagaagattttgaatttatatcagggacaaaaatgcgttgtttagcaaaagcaggtaaaaatccacctgatggctttatttacgtgttattatgttactaa

SEQ ID NO: 25853 - protein, 609 aa, Apis mellifera
MSNETPNKRMMTTCSNVSEQAHHVSRAKRGQAIGSIRGFRGCTVWLTGLSGAGKTSIAFQVEAILVNHGIAAYGLDGDNVRSGLNCNLGFSKEDRKENIRRVAEVAKLFADSGQICLCSFVSPFEEDRQMARQIHKMSDLPFFEIFVDTPLNVCEARDTKGLYKKAREGTIKGFTGIDQMYERPTNPDLVVITENCTPEESAATVIDLLEKHCIIPILQKPSIPIRELFIPESRISSAKTEAATLQSLEISEIDVQWLQVLAEGWAAPLTGFMREHQYLQTQHLKCLLEDDKEINQSIPIVLAVHAEDKQRLNGLSAFTLKYKYKPLAILRRPEFYFHRKEERCGWQFGTNNLGHPYVKIIHESGDWLVGGDVEVIQRIRWHDGLDKYRLTPNEIRAKCRKMKADAVFAFQLRNPIHNGHALLMQDTKKRLLEDRGFKNPVLLLHPLGGWTKDDDVPLHTRILQHEAVLNEGVLDASSTLLAIFPSPMMYAGPIEVQWHAKARMNAGANFYIVGRDPAGIPHPNKNATPDGNLYDPTHGARVLSIARGLQSLEIIPFKVAAYDKKYKKMSFFDEKRKEDFEFISGTKMRCLAKAGKNPPDGFIYVLLCY

SEQ ID NO: 25854 - DNA, 2211 bp, Apis mellifera
  CDS (1)..(2211)
atggggatatacacaaagtccttgttcgagaatcaaagtacgcagaggaaaagtaatcagatactttcgacgaatgtgatacaacagatgcatcacgtgtcgagggagagacgaggcgaaacgtacggaaaattcaaagaatttcgcggttgtaccatttggctgacaggattgtccggggctggaaagacttccatatcgtttcaacttgaaaattacctcgtctctcaaggtataccagcgtacagcatcgacggagacaacgtgcggcatgggttgaaccggaacctcggtttcaccaaggaagatcgcgaggagaacgttcgaagggcggcggaagtggcgaaattattttccgactgcgggataataacaatctgcagcttcgtttcgccgttcgaagcggacaggagatcggcaaggaagatccacgagaattttaacctgagattcttcgagatattcgtgcaagcgtcgatgcagacctgcgaggcgagagacgtgaaaggcctttacgagaaagctaggaaagggatgatcaagagcttcacggggataggacaggattacgaggtgccgatgaacgcggatctcgtcgtgaacacggagattcacgatttggaaacgtccacgagattagtgatcgagttcctgagaaagaagggagtggttccgcctataagagagaaagttgaggaattatttgtggacgagaagaggatggaagaggcgagaagagaagcggacagtcttcctagtatcgaaatcaccgatgtcgatttgcaatgggtccaagtgttggccgagggatgggcaaccccgcttagaggtttcatgagggaggaccaatatttgcagtgtcaacattttaagatcatcgaacaaaatggggagagtgtcaatcaatccgtgcccattgtgcttcctgtcgacacgaatcgaaaggagaggcacgccaacgcgtcggccctcgctttgaggcacgaaggcagagctgtggcgattttaaggagaccagaattctttgcccatcgaaaggaagaaagatgttgcagagaattcgggacgaacgatccgggtcatcctcacgtgaaaatgatccacgagtcgggtgattggctcgttgggggggaattggaggttttggggaggatcagatggaacgacgggcttgacgggttcaggctcacccctaacgagatcagggaaaagtgcggagagatgggcgccgacgctgtcttcgcatttcagttgagaaacccgatacacaatggccacgcacttttgatgcaggatacaagaagatatctggtcgaggagcgaggtttcaagaaaccagttcttttattacatcctctgggaggatggacaaaagaggacgatgtgccattaccggtaaggataaaccaacaccaaagtgttctcgaggaaggcgtgttacacgaggacaccatcctcgccatatttccaagcccgatgctttatgctggacccacagaggtgcaatggcacgcaaaagcaagaatgatggcgggcgcgaacttttacatcgttggccgtgatcctgctggtttaccgcatccagacaagtcaaaaactccggacggaaacttatacgatggaacgcacggctccagagtactgtcgatcgcgcctggtcttcaaaatctcgaaataattccattcagagtggcagcttacgacaatagaataaaaaaaatggcgttctatcagccagaaagatctcaagattttagttttatatcgggaactaaaatgagaaatctagcaaaatctggtgaaaatccgccacaaggattcatggcgccaaaagcgtggcaaattattgcagattattataagaaacaactaaataaagaatcgagtttgtctctgaagacgattccagaaggatcaggaatgcatcatatatgcggatctatcgcgagttcactcaagggcccgcccttaagtttctggagggtggaagcatttgccgctccagtggctttgaaagaaacagaaacgaccaacgtaataggggcgcaaaggaagaaggagcatcagatagatgttcctcaagtacttacatctttttacttctacagccctggaagctataggatcgaaaacgaggtgctcgcggacaccagcatacctgaaacatttttaaaattcccgccactattcgccaatacgatagatcaatga

SEQ ID NO: 25855 - protein, 736 aa, Apis mellifera
MGIYTKSLFENQSTQRKSNQILSTNVIQQMHHVSRERRGETYGKFKEFRGCTIWLTGLSGAGKTSISFQLENYLVSQGIPAYSIDGDNVRHGLNRNLGFTKEDREENVRRAAEVAKLFSDCGIITICSFVSPFEADRRSARKIHENFNLRFFEIFVQASMQTCEARDVKGLYEKARKGMIKSFTGIGQDYEVPMNADLVVNTEIHDLETSTRLVIEFLRKKGVVPPIREKVEELFVDEKRMEEARREADSLPSIEITDVDLQWVQVLAEGWATPLRGFMREDQYLQCQHFKIIEQNGESVNQSVPIVLPVDTNRKERHANASALALRHEGRAVAILRRPEFFAHRKEERCCREFGTNDPGHPHVKMIHESGDWLVGGELEVLGRIRWNDGLDGFRLTPNEIREKCGEMGADAVFAFQLRNPIHNGHALLMQDTRRYLVEERGFKKPVLLLHPLGGWTKEDDVPLPVRINQHQSVLEEGVLHEDTILAIFPSPMLYAGPTEVQWHAKARMMAGANFYIVGRDPAGLPHPDKSKTPDGNLYDGTHGSRVLSIAPGLQNLEIIPFRVAAYDNRIKKMAFYQPERSQDFSFISGTKMRNLAKSGENPPQGFMAPKAWQIIADYYKKQLNKESSLSLKTIPEGSGMHHICGSIASSLKGPPLSFWRVEAFAAPVALKETETTNVIGAQRKKEHQIDVPQVLTSFYFYSPGSYRIENEVLADTSIPETFLKFPPLFANTIDQ

SEQ ID NO: 25856 - DNA, 624 bp, Candida glabrata CBS 138
  CDS (1)..(624)
atgactgttactaaggctacgaatattacttggcatgctaacttgagttacgacgagcggaaggcgttgaggaagcaggacgggtgtaccgtttggctgactggtctgagtgcgtccggtaagagtaccatagcgtgtgctctggagcaattgcttttgcagaaagggttgtctgcgtacaggctggacggtgacaatatcaggtttggcttgaacaaggacctggggttctctgaggcggaccgtaacgagaacatcaggagaatcagcgaggtgtccaagttgtttgctgactcatgcaccatatcgatcacatctttcatctcgccataccgcacagacagagacaaagcaagagaactgcacaaagaggcgggtctcagattcatcgaagtgtttgtagacgtcccattggaagtcgccgagcaaagagacccaaagggcctgtacaagaaggccagacagggcatcatcaaggatttcaccggtatctctgcgccatatgaggagccggcctcaccagaactgcacttgagaaccaacgagaagtccatcgaggaatgcgctgccatcatttatgattacttgacaaaggaaaaagtcatcccagacaacaccatataa

SEQ ID NO: 25857 - protein, 207 aa, Candida glabrata CBS 138
MTVTKATNITWHANLSYDERKALRKQDGCTVWLTGLSASGKSTIACALEQLLLQKGLSAYRLDGDNIRFGLNKDLGFSEADRNENIRRISEVSKLFADSCTISITSFISPYRTDRDKARELHKEAGLRFIEVFVDVPLEVAEQRDPKGLYKKARQGIIKDFTGISAPYEEPASPELHLRTNEKSIEECAAIIYDYLTKEKVIPDNTI

SEQ ID NO: 25858 - DNA, 597 bp, Kluyveromyces lactis NRRL Y-1140
  CDS (1)..(597)
atggctaccaacatcacttggcatcaaaatttgacttacgatgaacgtaaggaattgagaaagcaatcaggatgcactatttggttaaccggcctaagtgcttcaggtaaaagcaccattgcttgcgctttggaacaattactgttgaacaaaggtctatcagcttacagattggatggtgacaatataagatttggactaaataaggatctgggtttctctgaacaagatagaaacgagaatatccgtagaatttcagaagtttctaagttattcgctgacagttgttcaattgccattacttcattcatttctccatacagaattgaccgtgacaaagccagagagttgcataaagaaggtgctttaaagttcattgaagtatttgtcgatgttccattagaagttgcagaacaaagagatcctaaaggtttatacaaaaaggctagggaaggcattatcaaagaattcactggtatctccgctccttacgagactccgctctcaccagaattacatcttagaactgatcaacagtcagttgaagaatgtgctcttaaaatctatgaatatctagtcaaggaaaagctaatttag

SEQ ID NO: 25859 - protein, 198 aa, Kluyveromyces lactis NRRL Y-1140
MATNITWHQNLTYDERKELRKQSGCTIWLTGLSASGKSTIACALEQLLLNKGLSAYRLDGDNIRFGLNKDLGFSEQDRNENIRRISEVSKLFADSCSIAITSFISPYRIDRDKARELHKEGALKFIEVFVDVPLEVAEQRDPKGLYKKAREGIIKEFTGISAPYETPLSPELHLRTDQQSVEECALKIYEYLVKEKLI

SEQ ID NO: 25860 - DNA, 600 bp, Debaryomyces hansenii CBS767
  CDS (1)..(600)
atggcttcaaatattacatggcatccaaatttaacgcatgttgagcgttcagagttgagaaaccaaaaaggtgtcactgtctggcttacaggattatcggccagtggaaaatcaaccattgcatgtgccttggaacaatctattttaggtagaggattaaactgttatagattagatggtgataatgttagattcggattaaataaggatttggggttcagtgaaaacgacagaaatgagaatattagaagaatctcagaagttgccaaattattcaatgactcttgttgtattacattgacttcattcatttcgccataccaaaaggacagacaattagccagagaattgcacgaaaaggacaatttgccatttgttgaggtttatgttgatgttccagttgaggttgctgaaaccagagatccaaaaggattgtacaagaaggccagagaaggtatcattaaggaatttaccggtattagtgcaccatacgaagcaccagataagccagaaatccacttgaagaactatgaaggtgtctctattgaagatgctgcccaacaaattattgactatttaattaagaacaattatgtttaa

SEQ ID NO: 25861 - protein, 199 aa, Debaryomyces hansenii CBS767
MASNITWHPNLTHVERSELRNQKGVTVWLTGLSASGKSTIACALEQSILGRGLNCYRLDGDNVRFGLNKDLGFSENDRNENIRRISEVAKLFNDSCCITLTSFISPYQKDRQLARELHEKDNLPFVEVYVDVPVEVAETRDPKGLYKKAREGIIKEFTGISAPYEAPDKPEIHLKNYEGVSIEDAAQQIIDYLIKNNYV

SEQ ID NO: 25862 - DNA, 597 bp, Yarrowia lipolytica CLIB122
  CDS (1)..(597)
atggctaccaacatcacctggcacgagggacttacccacgatgagcgagccaagcttgtgggacagaagggagtcaccctgtggttcaccggcctgtctgcctcgggcaagtccacaattgctactgccctcgagcagttccttctccaaaacaagatcaactcctaccgactggacggagacaatgtgcgattcggcctcaacaaggacctgggcttctccgaggccgatcgaaacgaaaacatccgacgaatctccgaggtggccaagctcttcaccgattccacctgtgtgactctcacttctttcatctctccttacaagaaggaccgacagagcgcacgagagctccacgaggcctccaacctgcccttcgttgaggtctacgttgatgtccccatcgaggttgctgagcaacgagaccccaagggtctgtataagaaggctcgagctggaactatccccgagttcaccggaatctctgctccctacgaggctcccgagaagcccgagatccacatcaagagccacgagacctccattgaggacgccgtcaagcagatctaccagtacctgcaggacaagaagtacgtttag

SEQ ID NO: 25863 - protein, 198 aa, Yarrowia lipolytica CLIB122
MATNITWHEGLTHDERAKLVGQKGVTLWFTGLSASGKSTIATALEQFLLQNKINSYRLDGDNVRFGLNKDLGFSEADRNENIRRISEVAKLFTDSTCVTLTSFISPYKKDRQSARELHEASNLPFVEVYVDVPIEVAEQRDPKGLYKKARAGTIPEFTGISAPYEAPEKPEIHIKSHETSIEDAVKQIYQYLQDKKYV

SEQ ID NO: 25864 - DNA, 603 bp, Candida albicans SC5314
  CDS (1)..(603): transl_table=12
atggcaactaatatcacttggcatgcaaacttgactcaccaagaacgtgctgaattaagaaaacaaaaaggggttactgtgtggttgactggtttatcagctagtggtaaatcaactattgcttgtgcattagaacaatcaattttagccagaggattaaattcatatagattagatggtgataatattagatttggattgaataaagatttaggatttagtgaagctgatagaaatgaaaatattagaagaatttctgaagttgccaaattattcagtgattcatgttgtatcactgtcacttcatttattagtccctatagagctgatagaagattagctagagaattgcatgaaaaagataatttaccattcgtcgaagtatatattgatgttccattggaagttgctgaacaaagagatccaaaaggattatataaaaaggcaagagaaggtatcattaaggaattcaccggtattagtgctccttatgaagctcccgaaaaggcagaaatacacgttaagaaccattcaggactttctgttgaacaagctgctgaacaaattatagattatcttttagaaaaaggttatataaattaa

SEQ ID NO: 25865 - protein, 200 aa, Candida albicans SC5314
MATNITWHANLTHQERAELRKQKGVTVWLTGLSASGKSTIACALEQSILARGLNSYRLDGDNIRFGLNKDLGFSEADRNENIRRISEVAKLFSDSCCITVTSFISPYRADRRLARELHEKDNLPFVEVYIDVPLEVAEQRDPKGLYKKAREGIIKEFTGISAPYEAPEKAEIHVKNHSGLSVEQAAEQIIDYLLEKGYIN

SEQ ID NO: 25866 - DNA, 612 bp, Ustilago maydis 521
  CDS (1)..(612)
atggctaccaacatcaccttccaccctggtcacgtttcgtacgatgagcgagccgaactgctctcccagcagggactcacgatctggctcactggtctctcggcttcgggcaagtcgaccattgcaactgccctcgagcagcacctcctctcgctcaagaagtctgcttaccgtctggatggtgacaacatccgctttggtctgaacaaggaccttggcttctctccccaggaccgcgaggagaacatccgacgtatctctgaagtctcgttgctctttgcctcgtcgactaccatcaccatcacgtcattcatctcgccctacaaggccgaccgtgagattgcaaggaagcttcacgaagctcacgttccaaagctgcccttcgttgaggtatttgttgatgctagcatcgaaacctgcgaaagcagggatcccaagggtctctacaagaaggccaaggctggggagatcaaagagttcaccggcatctcggcgccatacgagaagcccgaacaaccagagatccacatcgacgccgacaagacctccatcgaggatgcggttcgaatcatcaccgagtatctcatcaacaagggctacctcaagctctag

SEQ ID NO: 25867 - protein, 203 aa, Ustilago maydis 521
MATNITFHPGHVSYDERAELLSQQGLTIWLTGLSASGKSTIATALEQHLLSLKKSAYRLDGDNIRFGLNKDLGFSPQDREENIRRISEVSLLFASSTTITITSFISPYKADREIARKLHEAHVPKLPFVEVFVDASIETCESRDPKGLYKKAKAGEIKEFTGISAPYEKPEQPEIHIDADKTSIEDAVRIITEYLINKGYLKL

SEQ ID NO: 25868 - DNA, 1884 bp, Tribolium castaneum
  CDS (1)..(1884)
atgtcgagccaagaagacatcattaagaagcagaagacgtgcatgcaagtggccaccaacgtcacggagcagcggcaccacgtctcccgagccaagcgcggccagattttggggcacctgcggggcttccggggctgcactgtctggttcacggggctgtctggcgcaggtaaaacctccatagccttcgaactggaggcctacctcatccagcacggcatccccgcctacggcctggacggcgacaacatgcgcacggggctcaacaaggacctggggttcagcaaacaggaccgggaggagaacataagacgcgtggcggaagtggcgcgacttttcgcagacgctggccagatctgtctttgtagcttcgtgtccccatttgcagaagacagggagctggcccggaggatacaccgcgataacgacctcccgttcttcgaagtgtttgtcgattgtccgctgccggtgtgcgagcagagggacaccaaggggctgtaccacaaggccaggcagggggctatcaaggggttcacggggattgaccagccgtacgagaagccagagcatcccgatttggtcgtgaagacgattgagtcgtcggtggaggagtcgatgttccacgttgtggagatgttgcaagaaaatgggattattcccctggtggaggaggattacgagaaggtgctggagctgtttgtgcccaaggaccggcttgctgccgccaatgaggaggcggcgactttgcccaagttgaatttgactgtcctggatttgcagtggctgcaggttttgagcgaaggctgggcctcccccttaaaaggcttcatgcgcgaagaccaattcctgcaaaccctccacttcaactgcctcctcgacgaagtgaaaaacactaaccaatcaatccccatcgtcttgcccgtctcatccgccgacaaagagcgcctcgacggcgcctcggccctatctctctaccacaacggcatctgctacgccattctgcgcaaacccgaattctactaccaccgcaaggaagaacgcgtcgcccgccaattcggcatcaccaacaaagaccacccttacataaaaatggtctacgaatcgggcgactggctcgtggggggcgaactcgaagtcctgaaacgcgtgcaatggggcgacgaactcgaccactaccgactcacccccaacgaactccgccgaaagttcaagttaatgggggctgacgcagttttcgccttccaactgcgcaaccccatccacaacggtcacgcgctgctgatgcaagacacgcggaaacagctgaaagaaaggggctaccgcaagccggtgctgcttttgcaccctctgggtggttggacgaaagacgacgatgttccccttcacactagattgctccaacaccaagctgtgctagatgagggcttgcttgatcggttctcgaccgttctggccattttcccgagtcccatgatgtacgcgggacccactgaagtgcagtggcatgccaaggcgcggatgaacgcgggcgcgaatttctatatcgttgggagagatcccgcaggagtgccgcacccacgggggaaggacgcgactccagatgggaacttgtacgatgtcacccatggggctcgtgtgctgaagatggcacctgggttaacctcgcttgagatcattcccttccgggtggccgcctacgattgcaagaacaagaaaatggccttctttgatccggccaggaaggaggagtttgagttcatttcggggacgaagatgaggacgcttgcgcgtaatggggataacccaccggatgggtttatggcgcccaaggcctggagggtgcttgccgattactaccagtctttgattaaagataaatattag

SEQ ID NO: 25869 - protein, 627 aa, Tribolium castaneum
MSSQEDIIKKQKTCMQVATNVTEQRHHVSRAKRGQILGHLRGFRGCTVWFTGLSGAGKTSIAFELEAYLIQHGIPAYGLDGDNMRTGLNKDLGFSKQDREENIRRVAEVARLFADAGQICLCSFVSPFAEDRELARRIHRDNDLPFFEVFVDCPLPVCEQRDTKGLYHKARQGAIKGFTGIDQPYEKPEHPDLVVKTIESSVEESMFHVVEMLQENGIIPLVEEDYEKVLELFVPKDRLAAANEEAATLPKLNLTVLDLQWLQVLSEGWASPLKGFMREDQFLQTLHFNCLLDEVKNTNQSIPIVLPVSSADKERLDGASALSLYHNGICYAILRKPEFYYHRKEERVARQFGITNKDHPYIKMVYESGDWLVGGELEVLKRVQWGDELDHYRLTPNELRRKFKLMGADAVFAFQLRNPIHNGHALLMQDTRKQLKERGYRKPVLLLHPLGGWTKDDDVPLHTRLLQHQAVLDEGLLDRFSTVLAIFPSPMMYAGPTEVQWHAKARMNAGANFYIVGRDPAGVPHPRGKDATPDGNLYDVTHGARVLKMAPGLTSLEIIPFRVAAYDCKNKKMAFFDPARKEEFEFISGTKMRTLARNGDNPPDGFMAPKAWRVLADYYQSLIKDKY

SEQ ID NO: 25870 - DNA, 684 bp, Prochlorococcus marinus str. MIT 9303
  CDS (1)..(684): transl_table=11
atggagaatggcagcccaatcaacatcaagaccatgagctctgccccgcaaggagacacaaaccccaagggcacgaacattgtctggcatgaagcctcggtagaccgtcaatcgcgagcacaacaacgcggccaccgcagtgcaatcctctggttcactggcctatccggttctggaaaaagcacccttgccaatgcagtgaatgcggcactgtttgagcaaggtcttgccacctatgtcttagatggcgacaacattcgccatagcctttgcaaagacctcggcttctccgactcagatcgagaggagaacattcgccgcatcggcgaggtcgccaagctcttcctcgatgctggtgtcatcgtgctcaccgctttcgtctccccctttcgagctgaccgtgacaaagcccgcaagcttgtagatgttgatgatttcatcgaaatccactgtgcagcggacctaagcatttgcgaagagcgagacaccaaagggctttatgccaaagccagggcaggcgaaatcaaagatttcaccggtatttccagtccctatgaagaccctgcgtcacccgaactaaagatcaataccggtgagcaaagtctggaaacgtgcgttgagatcgtgctcaagactctgctggatcgaaaggtaattcccgccaagcatcaaccagtgtcttaa

SEQ ID NO: 25871 - protein, 227 aa, Prochlorococcus marinus str. MIT 9303
MENGSPINIKTMSSAPQGDTNPKGTNIVWHEASVDRQSRAQQRGHRSAILWFTGLSGSGKSTLANAVNAALFEQGLATYVLDGDNIRHSLCKDLGFSDSDREENIRRIGEVAKLFLDAGVIVLTAFVSPFRADRDKARKLVDVDDFIEIHCAADLSICEERDTKGLYAKARAGEIKDFTGISSPYEDPASPELKINTGEQSLETCVEIVLKTLLDRKVIPAKHQPVS

SEQ ID NO: 25872 - DNA, 1926 bp, Burkholderia vietnamiensis G4
  CDS (1)..(1926): transl_table=11
atgactcctcgaaactcaaacaccatggatcaagcgaaaccatccagtggccgagcacgaaagctcaacgagaccaccccgaaagttaccaccgttcaccagtggatggcgcagcaagctcaacaagatctgctgcgtttcatcacttgcggcagcgtagatgacggaaagagcacgctcatcggtcgcctgctctgggaagcccagcaggtgtttgatgatcagttgagggcattgcaagccgactccagacgccacggcacgcaggggcaggacatcgactttgcgctcctggtggatggtctcgcggctgagcgggagcagggcatcaccatcgacgtggcctatcgcttcttcagcacaccccgtcgcaagttcatcgtggccgacacgcctggacacgagcagtacacccggaacatggtcaccggagcctcaacggctgacgtcgccgtgttgctgatggatgcccgacaaggcgtgctcagccagacccgtcgccacgcctacctggtgtcattggtgggcattcggcatgtggtgctcgccatcaacaagatggacctggtgggttaccagcagacagtgtttgacgccatcgtggccgacttccatgcaatggccaacacccttggtttgaaaagcgtcacgcccatcccgctgtccgccttgaagggcgacaacatcaccaagcgctcgatccacacgccctggtactcaggcccgaccctgatggggtgcctggaaacgataaaggttgagcgcccaacgcacaccaaggcagtcttcccggtgcaatgggtcaatcgccccaatgccgagtttcgcggattcagtggcacgctggcgtcgggccgaattgcggttggcgactccctgcgtatcacctcgtcaggccagacagccttgctcagcagaattgtgaccgccgatggtgatgtgaaagccgcacacgcaggggaggccgtgacgctggtactggacagagaagcggatgcatcccgaggggacgtgatttccctggcagatcaaccgttggagatgtcagaccagttcgaggcacgaatggtctggatgcatgacgaaccaggtcatgtggggcgcacttacgacttgaagctggccaaccaatgggccagcgccagcatcacgagcctcaagtacagggttgaggtgaatacgcaggcccacgaatcgtgcaagcagttggagctgaacgacatcgcggcggccaacctggccttgagcaaaccggtcgtgtttgctgcctatgccgaaaaccccactctgggcggcttcatccttgttgacaaattcacccacgccaccgtggccgcgggaatgatccgccacaacctgcgtcgtgcccagaacgttcaccgccaggcactcagcatcacccgagaggaccgcgagcgcctcaacggccacaaaggcaaggtgatctggttcaccggcctttcaggctctggcaaatccactatcgccaacgccctggaaaaggaacttcatgctcagggcaagcgcacctatatcttggacggtgacaacgtccgccaaggcctcaacaaagaccttggcttcaccgacgcagatcgggtagaaaacatccgccgagtggccgaagtggccaagctgatgatggacgcagggctaatcgttatgacggcgttcatcagcccatttagggcagagcgggagatggcgcgggaactgattggcgaagagaactttattgaggtgtttgtcaatacaccgttagaagtgtgtgagcagcgggatcccaaaggcctatataagaaggcacgggcaggtcagctacccaacatgacgggtatcaacagcgcctacgaatgccccgaacaccccgaactgatatttgaccaaaatacgaatcttcaagaacttataggcctactgaaatag

SEQ ID NO: 25873 - protein, 641 aa, Burkholderia vietnamiensis G4
MTPRNSNTMDQAKPSSGRARKLNETTPKVTTVHQWMAQQAQQDLLRFITCGSVDDGKSTLIGRLLWEAQQVFDDQLRALQADSRRHGTQGQDIDFALLVDGLAAEREQGITIDVAYRFFSTPRRKFIVADTPGHEQYTRNMVTGASTADVAVLLMDARQGVLSQTRRHAYLVSLVGIRHVVLAINKMDLVGYQQTVFDAIVADFHAMANTLGLKSVTPIPLSALKGDNITKRSIHTPWYSGPTLMGCLETIKVERPTHTKAVFPVQWVNRPNAEFRGFSGTLASGRIAVGDSLRITSSGQTALLSRIVTADGDVKAAHAGEAVTLVLDREADASRGDVISLADQPLEMSDQFEARMVWMHDEPGHVGRTYDLKLANQWASASITSLKYRVEVNTQAHESCKQLELNDIAAANLALSKPVVFAAYAENPTLGGFILVDKFTHATVAAGMIRHNLRRAQNVHRQALSITREDRERLNGHKGKVIWFTGLSGSGKSTIANALEKELHAQGKRTYILDGDNVRQGLNKDLGFTDADRVENIRRVAEVAKLMMDAGLIVMTAFISPFRAEREMARELIGEENFIEVFVNTPLEVCEQRDPKGLYKKARAGQLPNMTGINSAYECPEHPELIFDQNTNLQELIGLLK

SEQ ID NO: 25874 - DNA, 1863 bp, Bradyrhizobium sp. ORS278
  CDS (1)..(1863): transl_table=11
atggctgcagctcaggcaccaggggcgccgtccagagaccttctgcgcttcatcacctgcggttcggtcgatgacggaaaatcgacactcatcggacgcctcctgcacgattctcacgtcatctttgaggaccagctgcgcagccttgcctccgactcgcagaagttcggcaccacaggggaagagatcgatctggcgctgctcgtggacggattagaagccgaacgggagcagggaattacgatcgacgtcgcctaccgcttcttcagtacgccgctgcggtcgtttatcgtggccgatactccggggcacgagcaatacacccgcaacatggccactggcgcttcattagccagtttggccatcatcctgattgatgcacgcaagggcgtcctgctgcagacgcgccggcattcgctgatttgctcgctgcttggcattcgccacatcgttcttgccatcaataaaatggacctggtcgacttcgacaaagcgaccttcgacgcgatcgtcaatgattatacggctttcgctgcacacctcgccttcgctacgatcgtccccatccctctttcggcccgctacggccataatgtaacgacccgctccgatcgaacaccatggttctcggggcctgtactgatcgattgcctcgagaatgtcgatgtcgcatccgatctcaacaagctgccattccgatttccagtccaacgggtgaaccgtcccaatctggactttcggggctattcggggacggtcgcgtcgggtgatatccgggtgggggaccgggtcacgacaacccctgccgggcagaccacttcggttcgggaaattgtcacagctgacgggatgctcgaagtagcccgggccggagaagccgttaccttgacactggtggacgagatagacgtttcgcgcggcgacctccttgcgtcgcccgatcaccttccagaaatcaatgatcagttcgccgcgcacatcatctggatgagcgaccggccactgatcagcggccggtcttatctcgcccgtatcggtacgcgcacgatatccatgagcgtcactgccataagacacaaaatggacgtcaacaccggtgagcgcttggctgcaagcgtcctggctctgaacgagatcggtttgtgcaacgtcgcgacggtcagaccgatcgcgttcgacccctacgcagccaaccgcgcgactggcagcttcatcgtcattgatcgcctcacgaacgagacggtcggagcgggcatgatcctcttcgggttgcggcggggttccaatgtgcaatcgcagccgctcctcgttaatcgagaggcacgcgcggcgatcaagcgccaagtcccagcagtcgtatggttcactggcctctctggcgcgggcaaatcgaccattgcaaactgccttgagaagaagctgcacaccgccggcttccatacgatgctgctggacggagacaacatcaggcagggcctaaatcgtgatctcggcttcactgaagccgatcgtgtcgagaacattcgaagggtcggtgaagtcgccaagctcttcgtcgatgccggactgatcgtgatatgttcctttatttctccctaccgctcggaccgagacatggtgcgggagctcatgcctccggcgactttcttcgaggtgttcgtcgatactccacttgaagagtgcatgcgacgcgaccccaagggcctgtattccaaggccagggctggaaagatcgcaaacttcaccgggatcgacgctccgtacgaaccaccgctcaatcccgatctccaccttagcaccgttgggcacgagcctgagcaactcgcacagaagatcgtcgataaactcgcgacccgaaactga

SEQ ID NO: 25875 - protein, 620 aa, Bradyrhizobium sp. ORS278
MAAAQAPGAPSRDLLRFITCGSVDDGKSTLIGRLLHDSHVIFEDQLRSLASDSQKFGTTGEEIDLALLVDGLEAEREQGITIDVAYRFFSTPLRSFIVADTPGHEQYTRNMATGASLASLAIILIDARKGVLLQTRRHSLICSLLGIRHIVLAINKMDLVDFDKATFDAIVNDYTAFAAHLAFATIVPIPLSARYGHNVTTRSDRTPWFSGPVLIDCLENVDVASDLNKLPFRFPVQRVNRPNLDFRGYSGTVASGDIRVGDRVTTTPAGQTTSVREIVTADGMLEVARAGEAVTLTLVDEIDVSRGDLLASPDHLPEINDQFAAHIIWMSDRPLISGRSYLARIGTRTISMSVTAIRHKMDVNTGERLAASVLALNEIGLCNVATVRPIAFDPYAANRATGSFIVIDRLTNETVGAGMILFGLRRGSNVQSQPLLVNREARAAIKRQVPAVVWFTGLSGAGKSTIANCLEKKLHTAGFHTMLLDGDNIRQGLNRDLGFTEADRVENIRRVGEVAKLFVDAGLIVICSFISPYRSDRDMVRELMPPATFFEVFVDTPLEECMRRDPKGLYSKARAGKIANFTGIDAPYEPPLNPDLHLSTVGHEPEQLAQKIVDKLATRN

SEQ ID NO: 25876 - DNA, 624 bp, Synechococcus sp. WH 7803
  CDS (1)..(624): transl_table=11
atgagctcagcgtctccgaaggccaccaacatcgtgtggcatcaggcctcggtggaccgcgatgccagggctgagcagcgtggccatcgcagcgccattctctggttcacaggcctgagtggagcaggcaagagcaccctggccaatgccgtgaaccaggctctgtttgaacgcggcctggccacctatgtgctggatggcgacaacatccgccatggtctctgccgcgaccttggcttctcggacgcagacagggaggagaacatccgtcgcatcggtgaagttgccaagctctttctggactctggcgtgatcgttctcacagcttttgtgtccccgttccgcgctgatcgcgataaagcccgtgccctggtgggtgagggtgactttctcgaaatcttctgctcagcagacctgagcgtttgcgaagaacgcgacaccaagggcctttacgccaaggccagagcgggcgacatcaaggaattcacaggaatttccagcccctatgaggctccggagcatccggaactctctgtcgacacaggcgctggagagcttgaaacctgtgtcaacgaggttgtgagcgcactcgagagtcgggggatcatccccgctcaggcttga

SEQ ID NO: 25877 - protein, 207 aa, Synechococcus sp. WH 7803
MSSASPKATNIVWHQASVDRDARAEQRGHRSAILWFTGLSGAGKSTLANAVNQALFERGLATYVLDGDNIRHGLCRDLGFSDADREENIRRIGEVAKLFLDSGVIVLTAFVSPFRADRDKARALVGEGDFLEIFCSADLSVCEERDTKGLYAKARAGDIKEFTGISSPYEAPEHPELSVDTGAGELETCVNEVVSALESRGIIPAQA

SEQ ID NO: 25878 - DNA, 687 bp, Desulfovibrio vulgaris subsp. vulgaris str. Hildenborough
  CDS (1)..(687): transl_table=11
atgccatgttaccccacatacccaaccgacggacaagacatgaaatcgtgcaatacgtttttttgtgacgggagaatacggcgccccgaccgtgagcgtctgaacggacatccggcgcgcgccttctggttcaccggattgcccagtgccggaaagtcgacccttgcccacatcgcggaagaggtgttgcatcagcgtggcatacgtacctatgtattcgacggtgacaatgtccggcacgggctttgcggcgacctcggcttctcggaacatgaccgcaaggagaacgtacggcgcatcgctgaaaccgtacgactctttctggatgcggggatactctgcctgtgcgccttcgtctcgccgttgcgggctaacaggcaggcagtccgggatatcatcgggccgtgcgatttcttcgaggtctatgtgaagtgtccggtcacggtatgcgaatcacgcgacgtgaaggggctctacggcaaggcccgtcaggggcttgtggagaactacacgggcatatcggctccctatgaggaaccggagtcgcccgatattgtcgtggataccagccggaacaccatcgaggagagtgtgcagagtcttaccgatttcatcttgcaggtgatgaccgtcccgtgcgcgcagaaggatgcccaagcccccggcaaggccgtccgtttcccgtag

SEQ ID NO: 25879 - protein, 228 aa, Desulfovibrio vulgaris subsp. vulgaris str. Hildenborough
MPCYPTYPTDGQDMKSCNTFFCDGRIRRPDRERLNGHPARAFWFTGLPSAGKSTLAHIAEEVLHQRGIRTYVFDGDNVRHGLCGDLGFSEHDRKENVRRIAETVRLFLDAGILCLCAFVSPLRANRQAVRDIIGPCDFFEVYVKCPVTVCESRDVKGLYGKARQGLVENYTGISAPYEEPESPDIVVDTSRNTIEESVQSLTDFILQVMTVPCAQKDAQAPGKAVRFP

SEQ ID NO: 25880 - DNA, 618 bp, Erwinia carotovora subsp. atroseptica SCRI1043
  CDS (1)..(618): transl_table=11
gtgtctttacgtcactcgccaactgacgataacgtcgtctggcatgcgcacaatgtcacccgtgagtcgcgcgaaaaactgcgtggtcatcagggcgtcgttatctggtttaccgggttgtctggatccggtaaatccacgctggcgggggcgctggagcaagcgctgcaccagcgtggcgtcagcacctacctgctggatggcgacaacgtccggcacgggctgtgccgggatctgggcttcaccgacgacgatcggcgcgagaacatccgccgcgtgggtgaagttgccaagctgatggtcgatgctggtctggtggttctgactgcgtttatctcgccgcatcgcgccgagcgtaaaatggtgcaggatttactgggcgaagggcagtttatcgaagtcttcgtggatacgccgttagcgacctgtgaagcgcgcgaccctaaagggttgtacaaaaaagcccgtgcgggggaactgcgtaatttcacggggatcgactcggcgtatgaagcgccggaagcgccggatagtcatctggatggcgaacaattcgtaacaaatttgacagaccaattgttagatctgcttggcaagcgagctattatcaagctctga

SEQ ID NO: 25881 - protein, 205 aa, Erwinia carotovora subsp. atroseptica SCRI1043
MSLRHSPTDDNVVWHAHNVTRESREKLRGHQGVVIWFTGLSGSGKSTLAGALEQALHQRGVSTYLLDGDNVRHGLCRDLGFTDDDRRENIRRVGEVAKLMVDAGLVVLTAFISPHRAERKMVQDLLGEGQFIEVFVDTPLATCEARDPKGLYKKARAGELRNFTGIDSAYEAPEAPDSHLDGEQFVTNLTDQLLDLLGKRAIIKL

SEQ ID NO: 25882 - DNA, 594 bp, Bacillus licheniformis ATCC 14580
  CDS (1)..(594): transl_table=11
ttggtaaataaagatattgtctggcatgaagcgtccattacaaaacgggaatatcatgagaaaaatcaacataaaagctcaatcatttggctgacgggcttaagcggttcaggaaaatcaacgattgccaacgccgctgcgcgtgagttgtttgcacaaggctaccaggtcacggtgcttgacggcgacaacgtcaggcacgggctgaacaaggacctcgggttttccgatgaagaccggaaggaaaacatccgccggatcggcgaggttgcgaagctctttgtcgaacaggggacgatcgtcattacggcgttcatttctccttttaaagaagatcgcgggcttgtcagacagcttgtcgaggaagatgagtttcacgaagtctatgtgaaatgcgatttggcgacgtgtgaagagcgcgacccgaaaggcttgtacaaaaaagcgagaaacggagaaattccatttttcacagggatcgattcgccttatgaagagcctgaaacgcctgagcttgttcttgatacaggcgcacataaccgggaagagtgcaaaaaccagctcgtccaatacgtgaaagatcaaacgaaataa

SEQ ID NO: 25883 - protein, 197 aa, Bacillus licheniformis ATCC 14580
MVNKDIVWHEASITKREYHEKNQHKSSIIWLTGLSGSGKSTIANAAARELFAQGYQVTVLDGDNVRHGLNKDLGFSDEDRKENIRRIGEVAKLFVEQGTIVITAFISPFKEDRGLVRQLVEEDEFHEVYVKCDLATCEERDPKGLYKKARNGEIPFFTGIDSPYEEPETPELVLDTGAHNREECKNQLVQYVKDQTK

SEQ ID NO: 25884 - DNA, 711 bp, Burkholderia mallei ATCC 23344
  CDS (1)..(711): transl_table=11
atgtcagcttcatcgccttcgcgtgcgcggccgggcgcacgcccgcacgacggcgcgcccgcgcccgtgcgcgacgcgtgtccggcaccgcgccgggacgcgtcagcgccggagaatctcttctggcacgccgggcgcgtcgccgccgacgcgcgctcgacccagttcggccgcccgccgctcacgctgtggctcaccggcctgagcggcgcgggcaagtcgacgctcgcgggcgaactggagcggttgctgctgcgcgatcgatggccgtgcgcggtgctcgacggcgataacctgcgccaccggttgaaccgcgatctcggcttcggcgcggaagatcgccacgagaacatccggcgcaccgccgaggtcgcgcggctgatgaacggcgtcgggctcgtcgtcatcgcttcgctgatctcgccgtttcgcgacgatcgcgcgatggcgcgcgagatcgtgggcagcgactggttcagcgaggtttacgtgagcacgccgctcgacgaatgcgagcggcgcgatccgaaagggctgtatcgcaaggcgcgcggcggcctgctgccgaacttcaccggcgtgtccgcgccgtacgaaccgccggtatccgccgatctcgcgatcgacaccacgcggctgtcggtcgccgccgctgcggcgatgttgcgcgcgcacctgatcgcgcgctgcgcgggccgccatgtcgattga

SEQ ID NO: 25885 - protein, 236 aa, Burkholderia mallei ATCC 23344
MSASSPSRARPGARPHDGAPAPVRDACPAPRRDASAPENLFWHAGRVAADARSTQFGRPPLTLWLTGLSGAGKSTLAGELERLLLRDRWPCAVLDGDNLRHRLNRDLGFGAEDRHENIRRTAEVARLMNGVGLVVIASLISPFRDDRAMAREIVGSDWFSEVYVSTPLDECERRDPKGLYRKARGGLLPNFTGVSAPYEPPVSADLAIDTTRLSVAAAAAMLRAHLIARCAGRHVD

SEQ ID NO: 25886 - DNA, 645 bp, Burkholderia pseudomallei K96243
  CDS (1)..(645): transl_table=11
gtgcgcgacgcgcgtccggcaccgcgccgggacgcgtcagcgccggagaatctcttctggcaagccgggcgcgtcgccgccgacgcgcgctcgacccagttcggccgcccgccgctcacgctgtggctcaccggcctgagcggcgcgggcaagtcgacgctcgcgggcgaactggagcggttgctgctgcgcgatcgatggccgtgcgcggtgctcgacggcgataacctgcgccaccggttgaaccgcgatctcggcttcggcgccgaagaccgccacgagaacatccggcgcaccgccgaggtcgcgcggctgatgaacggcgtcgggctcgtcgtcatcgcttcgctgatctcgccgtttcgcgacgatcgcgcgatggcgcgcgacatcgtgggcagcgactggttcagcgaggtttacgtgagcacgccgctcgacgaatgcgagcggcgcgatccgaaagggctgtatcgcaaggcgcgcggcggcctgctgccgaacttcaccggcgtgtccgcgccgtacgaaccgccggtatccgccgatctcgcgatcgacaccacgcggctgtcggtcgacgccgctgcggcgatgttgcgcgcgcacctgatcgcgcgctgcgcaggccgccatgtcgattga

SEQ ID NO: 25887 - protein, 214 aa, Burkholderia pseudomallei K96243
MRDARPAPRRDASAPENLFWQAGRVAADARSTQFGRPPLTLWLTGLSGAGKSTLAGELERLLLRDRWPCAVLDGDNLRHRLNRDLGFGAEDRHENIRRTAEVARLMNGVGLVVIASLISPFRDDRAMARDIVGSDWFSEVYVSTPLDECERRDPKGLYRKARGGLLPNFTGVSAPYEPPVSADLAIDTTRLSVDAAAAMLRAHLIARCAGRHVD

SEQ ID NO: 25888 - DNA, 609 bp, Bacillus clausii KSM-K16
  CDS (1)..(609): transl_table=11
atgacaaaaacgaattcaaatcttgtttggcatgaagcaagtgtcagcaaacaggaaaggcatgcacgccataaccataaaggctgcgtgctttggtttacaggactttcaggctcaggaaaatcgacgctcgccaacgctttagaccgttcattgtttgatgcagggctgtcaacatacgtactagacggcgacaacatccgccatggcttaaataaggacttaggtttttccgatagagatcggcaggaaaacatccgccgtattggagaagttgccaaattgtttgttgatgctggtacaattgtatcgacagcctttatttcgccgtttcaatcggatagagaccaggcaagggctctactggcagacggcgaatttgtagaagtgtacgtgaaatgtccccttgaagagtgtgagcgccgtgatgtcaaaggactttataaaaaagcgcgcaatggggaaatacctcaatttactggcattagttccccttatgaggagccggaaacgcctgaaattaccgtcgatacgagcgtacaaaccgtggaagaatcagtagaacaaatcattggctggctagaaaagcatcatattctcactcggtga

SEQ ID NO: 25889 - protein, 202 aa, Bacillus clausii KSM-K16
MTKTNSNLVWHEASVSKQERHARHNHKGCVLWFTGLSGSGKSTLANALDRSLFDAGLSTYVLDGDNIRHGLNKDLGFSDRDRQENIRRIGEVAKLFVDAGTIVSTAFISPFQSDRDQARALLADGEFVEVYVKCPLEECERRDVKGLYKKARNGEIPQFTGISSPYEEPETPEITVDTSVQTVEESVEQIIGWLEKHHILTR

SEQ ID NO: 25890 - DNA, 609 bp, Bacteroides fragilis NCTC 9343
  CDS (1)..(609): transl_table=11
atggaagaaaataataatatatatccgatattcgaccggatgctgacccggcaggataaagaagaactcttgaaacagcgtggtgtgatgatctggtttaccgggttgagcggatcgggtaagagtaccattgccatcgctttggaacgcgaactgcataaacgcggattgttgtgtcgtatcttggatggagataacatccgtacaggcatcaacaataatctgggcttttccgaaactgaccgggtagaaaacatacgccgtatagccgaggtttcgaaactttttattgatacaggcattattacaattgctgctttcatcagccctaacaacgatatccgtgagatggctgcccgcattgtcggaccggatgactttctggaaatatttgtcagcactccgctcgccgaatgtgaaaagcgggacgtaaagggattgtatgccaaagctcgtcggggagaaataaaaaactttaccggaatatccgcccctttcgaagctcccgaacatccggctttgtcacttgacacttccgtattgtcacttgaggagtctgtcaatcgattgctggaaattgtgttgcctcgggtaagcagacatgaataa

SEQ ID NO: 25891 - protein, 202 aa, Bacteroides fragilis NCTC 9343
MEENNNIYPIFDRMLTRQDKEELLKQRGVMIWFTGLSGSGKSTIAIALERELHKRGLLCRILDGDNIRTGINNNLGFSETDRVENIRRIAEVSKLFIDTGIITIAAFISPNNDIREMAARIVGPDDFLEIFVSTPLAECEKRDVKGLYAKARRGEIKNFTGISAPFEAPEHPALSLDTSVLSLEESVNRLLEIVLPRVSRHE

SEQ ID NO: 25892 - DNA, 1878 bp, Pseudomonas fluorescens Pf-5
  CDS (1)..(1878): transl_table=11
atgaccggatcctcctcaaagtcgtcgcacgcatccgcccctcctcagcagcaggagcaactgcgcctcattacgtgcggaagtgaggatgacggcaaaagcaccctggtcggacgcctactttgggagctgcaacaggtaaccgacgaccagctcagaaccttgcaaaacgacaccaggcagtatggcggccaagccaacaacctagactacgccctgctactcgacggtttggccgacgaaaaaaaacaggacatgaccatcgacgtggcctaccgcttcttcgctactccacgtcgaaaattcatcgtggcggacgcccccgggcacgaacaatacactcgcaacatgctgagcggagcctctacggccgacattgccgtactggtgatcgatgccagcctaggcgtaagcacacaaactcgccgacatgcctatctattgtcagtgctgagagttcggcacatcgtactggccatcaacaagatggatctggtgaatcatgatcgaggcgcgttcaacgccattcaggcggacttccagagcacagcgcaggcgttgggatttgagagcatcacagccattcccgtgtcagcactcaagggcgacaacctcaccaccaggtccgcccgcactccttggtactcgggcccaactctgatcgcgtacctggaatccatcgaagtccagcacgccagcagcgataaggtgatatttccggtgcagtggatccaaaatcccgatgccagctccccaggaatcagcggcacacttgtatcaggcgagatcgcacaaggtgacaagattcgtattacagcgtccggacaaaccgctaacgtcgcgaggttgattacagcagatggcgacctatcgaaggccaaggccggggatgcggtgactctggttctgaagcaggaagtgcaagcctctcgcggcgatgtgatcgcccttgcggatcagcccttacagatgacagaccagttcgaagccactctgatctggatggttgatgaggccgggctcatcggtcgaacctatgaactgaaattagccacccaatggaccactgccagcatcacaacactgaaatatcaagtgaatgtaaacaaccaagcccatgaagcatgccggcaactcaggctaaacaccatcgcggtggccaacctggcactgaacaagccgctggtattcgccccctacagcgaatcacgggcactgggtggtttcatcctggttgatacctatagccatgccacagtggctgtcgggatgattcgccatgacctgcgtcgagcccagaacgtacatcgccaggcattgagcatcactcgcgagaaccgggagcaactcaacggccacaaaggcaaggtcatctggtttaccggcctctcgggctctggaaaatcaacagtggccaatgcactggagaaagaactccacgcccaaggtaaacgtacctacatactggacggagataacgttcgccagggtcttaacaaggacctgggttttaccgatgctgatcgcgtggaaaacatccgccgcgtggccgaggtcgccaggctgatgatggatgccggcctaattgtgatgacagccttcataagccctttcagggccgagcgcgagatggcccgacaactgatcggcgaggacaacttcatcgaggtatttgtcgatacaccacttgaagtttgcgaacaacgagatcctaagggactgtacaaaaaagcacggaatgggctgctaccgaacatgacaggcatcaatagcccgtatgaaacgcccgcacagcccactctcaagctgcacacgtcgcacgtcgagataggaacgatggtccagcaagtgctggaactattgctcaataagggttga

SEQ ID NO: 25893 - protein, 625 aa, Pseudomonas fluorescens Pf-5
MTGSSSKSSHASAPPQQQEQLRLITCGSEDDGKSTLVGRLLWELQQVTDDQLRTLQNDTRQYGGQANNLDYALLLDGLADEKKQDMTIDVAYRFFATPRRKFIVADAPGHEQYTRNMLSGASTADIAVLVIDASLGVSTQTRRHAYLLSVLRVRHIVLAINKMDLVNHDRGAFNAIQADFQSTAQALGFESITAIPVSALKGDNLTTRSARTPWYSGPTLIAYLESIEVQHASSDKVIFPVQWIQNPDASSPGISGTLVSGEIAQGDKIRITASGQTANVARLITADGDLSKAKAGDAVTLVLKQEVQASRGDVIALADQPLQMTDQFEATLIWMVDEAGLIGRTYELKLATQWTTASITTLKYQVNVNNQAHEACRQLRLNTIAVANLALNKPLVFAPYSESRALGGFILVDTYSHATVAVGMIRHDLRRAQNVHRQALSITRENREQLNGHKGKVIWFTGLSGSGKSTVANALEKELHAQGKRTYILDGDNVRQGLNKDLGFTDADRVENIRRVAEVARLMMDAGLIVMTAFISPFRAEREMARQLIGEDNFIEVFVDTPLEVCEQRDPKGLYKKARNGLLPNMTGINSPYETPAQPTLKLHTSHVEIGTMVQQVLELLLNKG

SEQ ID NO: 25894 - DNA, 630 bp, Colwellia psychrerythraea 34H
  CDS (1)..(630): transl_table=11
atgacaacaacaaacatgaaaacagaaaatactgtgtggcataaccaacaaatcagcaaagaacaacgcgctacgctaaaacagcaaaaaccagcgttactttggtataccggtttaagtggctcgggtaaatctaccgtagccaatgcggtggatgcgctgttgtttaagctaggttgtcatagttatttacttgatggtgataatgtacgtcatggtcttaatggtgacttaggttttagtgatgaagcgcgaattgaaaatattcgtcgtatttcagaagttgctaaattattccttgatgccggcctaatcgtgtcaacggcctttatttctccttttgctagtgatagagcgttagccaaagctaagcttgaagacggcgaatttattgaagtctttatcgataccccaatcagtgtgtgtgaacagcgtgatcctaaagggttatacaaaaaagcaagagcaggtgagataaaagactttaccggtattgactcaacttatgatgtacccactgcgccgcaaattcatgttaaaacggcagagcaatctgttgagcaatgtgcagagcaaattgtaagtcatttaattgagcagggctttatcagtgaaatgacgctaagctaa

SEQ ID NO: 25895 - protein, 209 aa, Colwellia psychrerythraea 34H
MTTTNMKTENTVWHNQQISKEQRATLKQQKPALLWYTGLSGSGKSTVANAVDALLFKLGCHSYLLDGDNVRHGLNGDLGFSDEARIENIRRISEVAKLFLDAGLIVSTAFISPFASDRALAKAKLEDGEFIEVFIDTPISVCEQRDPKGLYKKARAGEIKDFTGIDSTYDVPTAPQIHVKTAEQSVEQCAEQIVSHLIEQGFISEMTLS

SEQ ID NO: 25896 - DNA, 1956 bp, Ralstonia eutropha JMP134
  CDS (1)..(1956): transl_table=11
atggaagcgctgatggcaatgcagacggaaaccgtgccggtcacggccaatgacgacatcgggcaatacctgcgtgcgcagcaacacaagggcctgctgcgctttatcacctgcggcagcgtcgacgacggcaagagcacgctgatcggccggctgctgtatgaatcgaagatgctgttcgaagaccagctcgcccaactcgaagccgattcgaagaagatgggcacgcagggcgagaatctcgacttcgcgctgctggtcgacggcctcgccgcggagcgcgaacagggcatcaccatcgacgtggcgtaccgcttcttcgccacggacaagcgcaagttcatcgtcgccgacacacccgggcacgagcagtacacgcgcaacatggtgacgggcgcatccaccgccgatctcgcgatcctgctggtcgacgcgcgccgcggcgtgcagacgcagacgcgccgccacagctacctggtgtcgacactcggcatccgccgcgtggtggtggccatcaacaagctcgacatggtcgactactcgcgcgaggtctacgaccgcatcgaagccgagtaccgtgactttgcgcggcagatcggactcaatgacatcgtctgcatcccgatgtccgcgctgcatggagacaacatcacgcaaccaagtgccaatacaccgtggtaccacgggcccacgctgatggcgcacctcgaaagcgtgccggtcgaccgcgcgccggcgcaggacgaatcgttccgcctgccggtgcagtgggtcaaccgccccaacctcgacttccgcggctttgccggcaccgtcagtgcgggcgagatccgctgcggcgatcgcgtacgtgcgctgccgtccggccgggaaagccgcgtggccagcatcgtcggcgccgatggcgagtgcgggcaagccatgcgcggccaggcggtgacgctgacgctggccgacgagatcgacgtgagccgcggggatgtgctggcatgcgcggaagaccccgccgaggtggcagaccagttcgaagccacactggtgtggatgaacgaggatgccatgctgcccggccgcccctacctgctcaagctgggcacgcgtaccgtcggcgttaccgtggcccagcccaagtacaaggtcaacgtcaacacgctcgagcacctggccgcgcgcacgctggagctgaacgaaatcggcgtgtgcaacctgcacctggaccagccggtcgcgttcgccccgtacacgcgcaaccgcgacctgggcggctttatcatgatcgaccgccttaccaacaacaccgtcggcgcgggcatgctgcactttgcactgcggcgggcgcagaacgtgcactggcaggccatcgacgtcgaccgccgcgcgcatgccgcgctcaagcaccaggcgccgcgcattgtctggttcaccgggctctccggcgcgggaaaatcgaccattgccaacctcgtggaaaagcgcctgcacgcgctgggccatcacacctacctgctcgacggcgacaatgtgcgccacggcctgaacaaggacctgggcttctctgaagccgaccgcgtggagaacatccggcgcgtggccgaggtggcgcggctgatgctcgatgcgggtctggtggtgctggtttcgttcatctcgccgttccgctcggagcgcgagatggcgcgcgcgcttgctggcgacggcgagtttgcagaggtcttcatcgacacgccgctcgacgtggccgagctgcgcgaccccaagggcctctaccgcaaggcgcggcgtggcgagctgaagaacttcaccggcatcgactcgccttacgagccgcccgagcgccccgaaatccgtatcgacaccacggccgatacggccgaacaggcggcggagcgcatcgtcgcctggttgcaggaaacgggtctgcaggaatccggcgcgcctagtacaaacggacgatga

SEQ ID NO: 25897 - protein, 651 aa, Ralstonia eutropha JMP134
MEALMAMQTETVPVTANDDIGQYLRAQQHKGLLRFITCGSVDDGKSTLIGRLLYESKMLFEDQLAQLEADSKKMGTQGENLDFALLVDGLAAEREQGITIDVAYRFFATDKRKFIVADTPGHEQYTRNMVTGASTADLAILLVDARRGVQTQTRRHSYLVSTLGIRRVVVAINKLDMVDYSREVYDRIEAEYRDFARQIGLNDIVCIPMSALHGDNITQPSANTPWYHGPTLMAHLESVPVDRAPAQDESFRLPVQWVNRPNLDFRGFAGTVSAGEIRCGDRVRALPSGRESRVASIVGADGECGQAMRGQAVTLTLADEIDVSRGDVLACAEDPAEVADQFEATLVWMNEDAMLPGRPYLLKLGTRTVGVTVAQPKYKVNVNTLEHLAARTLELNEIGVCNLHLDQPVAFAPYTRNRDLGGFIMIDRLTNNTVGAGMLHFALRRAQNVHWQAIDVDRRAHAALKHQAPRIVWFTGLSGAGKSTIANLVEKRLHALGHHTYLLDGDNVRHGLNKDLGFSEADRVENIRRVAEVARLMLDAGLVVLVSFISPFRSEREMARALAGDGEFAEVFIDTPLDVAELRDPKGLYRKARRGELKNFTGIDSPYEPPERPEIRIDTTADTAEQAAERIVAWLQETGLQESGAPSTNGR

SEQ ID NO: 25898 - DNA, 612 bp, Pseudomonas fluorescens PfO-1
  CDS (1)..(612): transl_table=11
atgaatgaggcgctgcacagtctggcgacaacgcccgccatcagcccctataacctggcgctgccgcgccaggcccgggccgcgctcaacgggcagcggccgcgttgcctgtggctgaccggattatccggcgccggcaagtcgaccctggccaattcgctggagctgcacctgcatcaattcgggcggcacacctttctgctcgatggcgacaacgtgcgcaatggcctgtgccgggacctgggtatggacgatgccggtcgccgggaaaacatccggcgcatggccgaagtcgcccggctgatggtcgatgccgggctgatcgtcatcgttgcggcgatttccccgtttcgagccgaacgggatgctgcgcggcgactgtttgccgagggcgacttcgtcgaagtgcatgtgagcacttcgctcacggtgtgcgagcgccgtgatccgaaaggtttgtatcaggcggtgcgtcagggtcgtatccagcatttcacgggcatcgacagtccttacgaggctccgctggcggcggaatgccgtatcgacacggaagagatcgagccaagcgaggcctgcgaacggctggcggctttgctgcttgaaaaatga

SEQ ID NO: 25899 - protein, 203 aa, Pseudomonas fluorescens PfO-1
MNEALHSLATTPAISPYNLALPRQARAALNGQRPRCLWLTGLSGAGKSTLANSLELHLHQFGRHTFLLDGDNVRNGLCRDLGMDDAGRRENIRRMAEVARLMVDAGLIVIVAAISPFRAERDAARRLFAEGDFVEVHVSTSLTVCERRDPKGLYQAVRQGRIQHFTGIDSPYEAPLAAECRIDTEEIEPSEACERLAALLLEK

SEQ ID NO: 25900 - DNA, 594 bp, Carboxydothermus hydrogenoformans Z-2901
  CDS (1)..(594): transl_table=11
gtggcaaataatctcttctggcacgaaggtaaaataacggcggaagatcgcgaaaaattactggggcaaaaaggagtggttatttggcttaccgggctttcgggttcgggaaaatcaacgatagcccgggaactggaagcggtattgtaccggcaaggtaagcttgcttacgttttggatggcgataatatccgcatgggcttaaataaagacctgggcttttccgaaaaagaccgccaggaaaatattcgccggatcggagaagtagccaaactttttgtagatgctgggattattgtcatcactgcttttatttcacctttccgggctgacagggataaggtccgctcgatattaccggcggggaaatttattgaagtgtttgtagactgtccactggaagtgtgtgaagcaagggatgtaaaaggtctttatcaaaaagcccgggaagggaagatacccgaatttaccgggatcacctctccttatgagccgccggtaaaaccggaaattacgctgaaaaccgccgagcaatccttagaagagtgtgtagatataattcttacttatttacgcaaaaatttatacctttaa

SEQ ID NO: 25901 - protein, 197 aa, Carboxydothermus hydrogenoformans Z-2901
MANNLFWHEGKITAEDREKLLGQKGVVIWLTGLSGSGKSTIARELEAVLYRQGKLAYVLDGDNIRMGLNKDLGFSEKDRQENIRRIGEVAKLFVDAGIIVITAFISPFRADRDKVRSILPAGKFIEVFVDCPLEVCEARDVKGLYQKAREGKIPEFTGITSPYEPPVKPEITLKTAEQSLEECVDIILTYLRKNLYL

SEQ ID NO: 25902 - DNA, 1923 bp, Burkholderia sp. 383
  CDS (1)..(1923): transl_table=11
atggcacacgttctcaccgcgcccgaggcgctcgcgcaccatgcacccgattcacacgctgccgacgaagcggacacgccaacccaggacctgttgcgcttcatcacgtgcggcagtgtcgacgacggcaagagcacgctgatcggccgcctgctctacgaatcgaacatgctgttcgacgaccagctcacgcagctcgaggccgattcgaagaaggtcggcacgcagggcggcgaactcgatttcgcactgctcgtcgacggcctgtcggccgaacgcgagcaagggatcacgatcgacgtcgcgtaccgtttcttcgccaccgcgcggcgcaagttcatcgtcgccgatacgcccggccacgagcagtacacgcgcaacatgatcaccggcgcgtcgactgccgatctcgccgtgatcctgatcgacgcgcgcaagggcgtgctcacgcagacgcgccgccacagccatctcgtcgcgctgatcggcatcaagcgcgtggtgctcgcgatcaacaagatggacctggtcgactacgaccaggccgtgttcgatcgcatcgacgccgactatcgcgcgttcgcggccgagctcgggctggcggagatcgtcagcatcccgatgtcagcgctgcgcggcgacaacgtgatcgtgccgagcgcgcggatgccgtggtacgcgggcctgacgctgatgcagcatctcgacaccttgccgctcgccgcacgcgtgactagcgacgagccgttccggctgccggtgcagtgggtcaaccgcccgcacctgaatttccgcggctacgcgggcagcatcgcatcgggcgagatccgcgtcggcgagcgcgtgcgcgtgctgccgtccggcaaggagagccgcgtcgcgtcggtgatcacgcaaggcggcgaaagcgacatcgcgcgcgccggcgacgcggtgacgctcacgctcgccgacgagatcgatatcagccgcggcgacatgatcgcgcgcgcggatgcgccgcccgaggtggccgaccagttcgaggcgacgctcgtgtggatgcacgacgcgccgctgctgcccgggcgcccgtatctcgtgaagctcggcacgcagacggtcggcgcgacctgcgcgacgccgaagtacaagatcgacgtgaacacgcgcgagcatctcgcggcgcgcacgctcgcgctcaacgagatcggcgtgtgcaacctgagcttcgaccggcccgttgcgttcgatccgtacgaccgcaatcgccacaccggcggcttcatcgtgatcgaccgcgtcaccaacgacacggtcggtgccgggatgctgcacttcgcgctgcgccgcgcgcacaacgtgcactggcaggccgtcgacgtcgatcgcgccgcgcgtgccgcactgaaggcgcagacgccgcgcatcgtgtggctgacggggctgtcgggcgccggcaagtcgacgattgcgaatctcgtcgagaagcggctgcacgcgctcggcaagcacacgtacctgctcgacggcgacaacgtgcggcacgggctcaatcgcgatctcggcttcaccgaggccgatcgtgtggagaacatccggcgtgtcgccgaagtcgcgcggctgatgctcgacgcggggctcatcacgctcgtgtcgttcatctcgccgttccgcgcggagcgcgacatggcgcgcgcgctggtcggggccgacgagttcgtcgaagtgttcgtcgacacgccgctcgcggttgccgaggaacgcgatccgaagggcctgtacaagaaggcgcgacgcggcgagctgaagcacttcacgggcatcgattcgccgtacgaaccgcccgcgcaggccgaactgcgtgtcgacacggtcgccgagtcgccggaagaagcggccgatcgcatcgtcgcgtacctgctgcgcgagcgcgcggcgtaa

SEQ ID NO: 25903 - protein, 640 aa, Burkholderia sp. 383
MAHVLTAPEALAHHAPDSHAADEADTPTQDLLRFITCGSVDDGKSTLIGRLLYESNMLFDDQLTQLEADSKKVGTQGGELDFALLVDGLSAEREQGITIDVAYRFFATARRKFIVADTPGHEQYTRNMITGASTADLAVILIDARKGVLTQTRRHSHLVALIGIKRVVLAINKMDLVDYDQAVFDRIDADYRAFAAELGLAEIVSIPMSALRGDNVIVPSARMPWYAGLTLMQHLDTLPLAARVTSDEPFRLPVQWVNRPHLNFRGYAGSIASGEIRVGERVRVLPSGKESRVASVITQGGESDIARAGDAVTLTLADEIDISRGDMIARADAPPEVADQFEATLVWMHDAPLLPGRPYLVKLGTQTVGATCATPKYKIDVNTREHLAARTLALNEIGVCNLSFDRPVAFDPYDRNRHTGGFIVIDRVTNDTVGAGMLHFALRRAHNVHWQAVDVDRAARAALKAQTPRIVWLTGLSGAGKSTIANLVEKRLHALGKHTYLLDGDNVRHGLNRDLGFTEADRVENIRRVAEVARLMLDAGLITLVSFISPFRAERDMARALVGADEFVEVFVDTPLAVAEERDPKGLYKKARRGELKHFTGIDSPYEPPAQAELRVDTVAESPEEAADRIVAYLLRERAA

SEQ ID NO: 25904 - DNA, 645 bp, Synechococcus sp. CC9605
  CDS (1)..(645): transl_table=11
atgaccgccagccccacctacggagaactcaccaacaagggtgcgtccaccaacatcgcctggcatgaagcctccgtgggccgcgacgagcgctcgaagcagcgcggtcaccgcagcgccattctttggttcaccggcctctccggctccggcaagagcaccctggccaacgccgtcaacgcagccctgtttgagcgagggctcgccacctatgtgctggatggggacaacatccgccacggcctctgcaaagacctgggcttctctgatgccgaccgtgaggagaacatccgccgcatcggtgaagtggccaagctgtttctggatgcgggcgtgatcgtgctgaccgcgtttgtgtcgcccttccgtgctgaccgggacaaggcccgcggcctggtggaggacggcgacttcctcgaggtgttctgcgccgctgatctcgaggtctgcgaatcccgcgatcccaagggcctctacgccaaagcacgggcagggcagatcaaggaattcaccggcatctccagcccctatgaagcaccggaaacgcccgaactcaaaatcgacaccggcaagcaggatctggccgactccgtcgagctggtgatcaaagcgctccaggagcgtggggtgattccggcggcctga

SEQ ID NO: 25905 - protein, 214 aa, Synechococcus sp. CC9605
MTASPTYGELTNKGASTNIAWHEASVGRDERSKQRGHRSAILWFTGLSGSGKSTLANAVNAALFERGLATYVLDGDNIRHGLCKDLGFSDADREENIRRIGEVAKLFLDAGVIVLTAFVSPFRADRDKARGLVEDGDFLEVFCAADLEVCESRDPKGLYAKARAGQIKEFTGISSPYEAPETPELKIDTGKQDLADSVELVIKALQERGVIPAA

SEQ ID NO: 25906 - DNA, 783 bp, Burkholderia thailandensis E264
  CDS (1)..(783): transl_table=11
ttggcgatcgtttgccatccgtttgccgcggcggtgctcttcggccacctcggccgattatcgaaaggaatccagatcatgtcagcttcatcgcctccgcgcgtgcgcttgggcgcgcattcgtgcgacgccgcgcccgcgcgcgacgcgcgttcggcgccgcgccgcgccgggcccgcgccggagaaccttttctggcacgccggccgtgtcgccgccgatgcgcgcgcgacccagttcggccgccggccgctcacgctgtggctcaccggcctgagcggcgcgggcaagtcgacgctcgcgggcgagctggagcggctgctgctgcgcgatcgatggccgtgcgcagtgctcgacggcgacaacctgcgccaccggctgaaccgcgatctcggcttcggcgagcaggaccgtcaggagaacgtccggcgcgtcgccgaagtcgcgcggctgatgaacggcgtcggacttgttgtcatcgcgtcgctgatctcgccgtttcgcgacgatcgcgcgatggcgcgcgagatcgtcgggcgcgagcggttcagcgaggtttacgtgagcacgccgctcgacgaatgcgagcggcgtgatccgaaggggctgtatcgcaaggcgcgcggcggcctgctgccgaatttcaccggcgtgtgcgcgccgtacgagccgcccgtcgaagccgatctcgtgctcgacaccgcgcggttgtcgctcgacgacgcggcggcgatgctgcgcgcgcatctgatcgcgcgctgcgcaggcagcgatgtcgattga

SEQ ID NO: 25907 - protein, 260 aa, Burkholderia thailandensis E264
MAIVCHPFAAAVLFGHLGRLSKGIQIMSASSPPRVRLGAHSCDAAPARDARSAPRRAGPAPENLFWHAGRVAADARATQFGRRPLTLWLTGLSGAGKSTLAGELERLLLRDRWPCAVLDGDNLRHRLNRDLGFGEQDRQENVRRVAEVARLMNGVGLVVIASLISPFRDDRAMAREIVGRERFSEVYVSTPLDECERRDPKGLYRKARGGLLPNFTGVCAPYEPPVEADLVLDTARLSLDDAAAMLRAHLIARCAGSDVD

SEQ ID NO: 25908 - DNA, 1935 bp, Novosphingobium aromaticivorans DSM 12444
  CDS (1)..(1935): transl_table=11
atgaccgacacgatcaccacggaacagcccgtctacgtcaccgacgcactcatcgccgaggacatcgaccagtacctcaaggtgcatgagcacaagacgatgctgcgcttcatcacctgcgggtcggtggacgatggcaagtcgaccctgatcgggcgcctgctctacgattcgaagatgatcttcgaggaccagcttgccgcgctggaaaacgattcgaagaaggtcggtacgcaaggccaggacatcgacttcgcgctgctggtcgacggtcttgcagccgagcgtgagcagggcatcaccatcgacgtcgcctaccgcttcttcaataccgagaaacgcaagttcatcgtcgccgactgcccgggccacgaacagtacacccgcaacatggtgaccggcgcctcgaccgccgacctcgcggtgatcctgatcgacgcgcgcaagggcgtgctcgtgcagacccgccgccactcgtacctgtgccacctgatcggcatccgcaacatcgtgcttgcggtgaacaaaatggatcttgtcgattacgatccggtcgtgttcgacgccatcgtcaaggattataccgagttcgcacgctcgatcggcatcgagagcttcaccgccatgccgatctccggcttcaagggcgacaacatcaccacccgttcggccaatacgccctggtacaacgggccgaccctggtcgatcacctcgagacggtcgaggtcctctcctcgctcgacgcggacaagccgttccgcatgccggtgcagtgggtcaaccgccccaatctcgacttccgcggcttctcgggcctcgtggccaccggcagcgtcaagccgggcgacgagattcgcgtcctgccttccggcaagaccagcaaggtcacccgcgtcgtcacgctcgacggcgatctcgaccaggccgtcgccggccagtcggtgaccctgtgtctggccgacgaggtcgactgttcgcgcggcgacgtgatcgcgctggccgacaatccgccgcaggctgccgaccagttcgaggcaacactcgtctggctcaacgacgaggccatgctgccgggccgcgcctactggctgaagctcgcgacgcaaaccgtctctgccacggtccagcagcccaagtacgtcgtcaacgtcaacacgatggaacatctggcggccaagacgctggaactgaacgccatcggcgtggccgaacttgccaccgacaagccgctggtgttcgaaccctatgccgacagccgcacgctcggcggcttcgtgctgatcgacaagatcaccaacgcgaccgttgccgccggcatgctgcacttcagcctgcgccgcgcgcagaacgtgcactggcaggcgcttgacgtcagccgtgaggcccatgccgcgctcaagcaccagaagccggcagtgctgtggttcaccggcctgtccggctcgggcaagtcgaccatcgccaaccttgtcgagaagcgcctccacgcggtgggcaagcacaccttcctgctcgatggcgacaacgtgcgccatggcctgaacaaggacctgggcttcaccgaggccgaccgcatcgagaacatccgccgcgtcggcgaagtggcgaagctgatgaccgatgccgggctcatcgtgctcaccgccttcatcagcccgttccgcgcggaacgcgaaatggtgcgctcgctcatggccgatggcgaattcatcgaggtgttcatcgacaccccgcttgaagtggccgaatcgcgcgacgtgaaggggctctacaagaaggcccgttccggccagctcaagaacttcaccgggatcgacagcccctacgaagcgccgcagaatcccgagatccgggtcgacacgaccgaggaaacacccgaaaacgcggccgagcggatcgtgaatcaattgctcggctgggcgcccacgatctga

SEQ ID NO: 25909 - protein, 644 aa, Novosphingobium aromaticivorans DSM 12444
MTDTITTEQPVYVTDALIAEDIDQYLKVHEHKTMLRFITCGSVDDGKSTLIGRLLYDSKMIFEDQLAALENDSKKVGTQGQDIDFALLVDGLAAEREQGITIDVAYRFFNTEKRKFIVADCPGHEQYTRNMVTGASTADLAVILIDARKGVLVQTRRHSYLCHLIGIRNIVLAVNKMDLVDYDPVVFDAIVKDYTEFARSIGIESFTAMPISGFKGDNITTRSANTPWYNGPTLVDHLETVEVLSSLDADKPFRMPVQWVNRPNLDFRGFSGLVATGSVKPGDEIRVLPSGKTSKVTRVVTLDGDLDQAVAGQSVTLCLADEVDCSRGDVIALADNPPQAADQFEATLVWLNDEAMLPGRAYWLKLATQTVSATVQQPKYVVNVNTMEHLAAKTLELNAIGVAELATDKPLVFEPYADSRTLGGFVLIDKITNATVAAGMLHFSLRRAQNVHWQALDVSREAHAALKHQKPAVLWFTGLSGSGKSTIANLVEKRLHAVGKHTFLLDGDNVRHGLNKDLGFTEADRIENIRRVGEVAKLMTDAGLIVLTAFISPFRAEREMVRSLMADGEFIEVFIDTPLEVAESRDVKGLYKKARSGQLKNFTGIDSPYEAPQNPEIRVDTTEETPENAAERIVNQLLGWAPTI

SEQ ID NO: 25910 - DNA, 600 bp, Saccharophagus degradans 2-40
  CDS (1)..(600): transl_table=11
atggatatagtttggcacgaccataaaattacaaaagaagttcgacaagaacagcatgggcataaatcttgtgttatttggtttaccgggctgagtggctcgggcaagtctagcgtggccagcgagcttgagcgcgctcttgtgcagcagtttaatgcaaaaacctacctactagacggagacaacgtgcgccacggcctttgtaaagatttaggctttaccgcagacgacagagtagaaaatattcggcgtgttggcgagataagtaaactgtttgtagatgcggggcttatcaccctctctgcttttatctcaccctttcgcacagagcgtagattggcgcgagagctactagaagacggtgaatttattgaggtatttgtagatacgccacttagcgagtgcgaaaagcgtgaccccaaagggctataccaaaaagcgcgtgaaggtaaaataaaaaactttaccggcatagactctaaatacgaaacaccagaaaaccctgaaatacatttagaaaacggtaagcaaaccattcaggaatctgtagagcaaattattacttaccttaaaaagcacaactacttagctagcttgtaa

SEQ ID NO: 25911 - protein, 199 aa, Saccharophagus degradans 2-40
MDIVWHDHKITKEVRQEQHGHKSCVIWFTGLSGSGKSSVASELERALVQQFNAKTYLLDGDNVRHGLCKDLGFTADDRVENIRRVGEISKLFVDAGLITLSAFISPFRTERRLARELLEDGEFIEVFVDTPLSECEKRDPKGLYQKAREGKIKNFTGIDSKYETPENPEIHLENGKQTIQESVEQIITYLKKHNYLASL

SEQ ID NO: 25912 - DNA, 579 bp, Rubrobacter xylanophilus DSM 9941
  CDS (1)..(579): transl_table=11
atgaggttcaaccagagggagcgcggcttcacgctgtggttcaccgggctctcgggggcgggcaagaccaccatcgccgagatcgtggagaaggagctcagggagcgcggccgcagggtcgaggtgctcgacggggacatcgtgaggaccaacctctccaaggggctcggcttcagccgggaggacaggatcaccaacgtcctgcgcataggctttgtggccaacctcctcacccgcaacggggtggcggtgatcgtctcggccataagcccctacaaagaggcccgcgaccaggtgcggcgcaggatcatcgacttcatcgaggtgtacgtggacgcgccgctcgaggtgtgcgccgagcgggacgtcaagggcctctacaagaaggccttcgagggggagatacagaacttcactggcgtctcagacccctacgagccgcccgtggcccccgagctgcacatccgcaccgaccaggagaccccgcaggagagcgcccggcgggtcatcgagcgcctggagtacctgggctacctgtgggaccccgaggaggccgaggactaccactggtcccgctag

SEQ ID NO: 25913 - protein, 192 aa, Rubrobacter xylanophilus DSM 9941
MRFNQRERGFTLWFTGLSGAGKTTIAEIVEKELRERGRRVEVLDGDIVRTNLSKGLGFSREDRITNVLRIGFVANLLTRNGVAVIVSAISPYKEARDQVRRRIIDFIEVYVDAPLEVCAERDVKGLYKKAFEGEIQNFTGVSDPYEPPVAPELHIRTDQETPQESARRVIERLEYLGYLWDPEEAEDYHWSR

SEQ ID NO: 25914 - DNA, 1923 bp, Mesorhizobium sp. BNC1
  CDS (1)..(1923): transl_table=11
atgctgagctccaacgccgcggccgcggtcgcagacgccgagacggaaaccgccgatattcgcgcttatctctcctcgcaggagagaaagaccttgctgcgcttcctcacctgcggctccgtcgatgatggtaagtcgacgctcatcggccgcttgctttacgacacgaagctcattttcgaggatcagcttgccgcgctcgagcaggattcgaagaagcacggcacgaatggcggcgagatcgacttcgcgcttctggtcgacgggctggaggccgagcgccagcagggcatcaccattgatgtcgcctaccggttcttcgcaacgcccaagcgcaaattcattgtcgccgacacgccggggcacgagcaatatacgcgcaacatggcgacgggcgcttcgaccgccgatctcgccgtcgtgctggtagatgcgcgacagggcgtactgcagcagacccgccgtcactccatcattgcctcgctgctcggcatccggtacatcgttgttgcggtgaacaagatcgacctcgtcgacttcgacgagcaggtcttcgcgaagatcaccgccgattacgatgcctttgcgaaggaccttggcttctcctcgatcgtggcgatcccgatgtcggccaggcacggggacaacgtgacccgtatctccgagcgtaccccttggtacgccggcccgtcattgatcgagcacctggagacggtggacgtcgcgggcgagagcgtagcccagccgttccggttccccgttcaatatgtgaaccgccccaatctggatttccgcggctttgccggcacgatcgcctcaggttccgtggctgtgggcgacgaggtggtggtcgccaaatccggccggcgcacgcgggtgaagcggatcgtcacctatgacggcgacttgccgagcgcttttgaaggccaggccatcacggtggtcctggaggacgaggtggaggtctcgcgcggcgagattctggtggcgccggaggcgcggccggatgtggccgatcagttcaccgccaacatcgtctggttcgatgaacatccgcttctgcccggccgaatgtatattctgcgcaccgagacggacgaggtgagcgccaccgtcagccagctcaagcaccgggtgaacatcaacaatttcgcccatgaggccgcgaagtgccttgaactgaatgcggttggcgtgtgcaatctgtcgctccagtcgccgatcgccttcgatcctttcgggaagaaccgctcgaccggttccttcatcctcatcgaccgcgtgaccaacgccaccgtcggcgcgggaatgatcctgcacccgctgcggcgggccgccaacatccattggcaggcgctggacgtgacgaaggaatctcgcgcgaccttgaagcaccagaagccggcggtgctctggttcaccggcctttcggggtccggcaagtcgacggtcgccaatcttctggagaagaagctgcacgcggctggccgccacacctatatcctcgacggcgacaatgttcgccacgggctcaatcgcgacctgggcttcaccgaggaggaccgggtggaaaacattcgccgcgtggcggaggtggcccgtttgatggcggatgcggggctcatcgttctcgtctccttcatctcgcctttccgcgccgagcggcgcatggcccgcgacctgatgggcgagggcgagttcatagaagtgttcgtcgatacgcccttcgaggaatgcgccaagcgcgacccgaaggggctctatgctcgggcgctcaaaggtgaactgaaaaacttcaccggcatagattcgccctatgaggctcccgagaacccggatcttcacctgcacaccgtgggcagggcacccgaagatatggcggacgaattggaaacctggctgcgggagcgcggatattgctga

SEQ ID NO: 25915 - protein, 640 aa, Mesorhizobium sp. BNC1
MLSSNAAAAVADAETETADIRAYLSSQERKTLLRFLTCGSVDDGKSTLIGRLLYDTKLIFEDQLAALEQDSKKHGTNGGEIDFALLVDGLEAERQQGITIDVAYRFFATPKRKFIVADTPGHEQYTRNMATGASTADLAVVLVDARQGVLQQTRRHSIIASLLGIRYIVVAVNKIDLVDFDEQVFAKITADYDAFAKDLGFSSIVAIPMSARHGDNVTRISERTPWYAGPSLIEHLETVDVAGESVAQPFRFPVQYVNRPNLDFRGFAGTIASGSVAVGDEVVVAKSGRRTRVKRIVTYDGDLPSAFEGQAITVVLEDEVEVSRGEILVAPEARPDVADQFTANIVWFDEHPLLPGRMYILRTETDEVSATVSQLKHRVNINNFAHEAAKCLELNAVGVCNLSLQSPIAFDPFGKNRSTGSFILIDRVTNATVGAGMILHPLRRAANIHWQALDVTKESRATLKHQKPAVLWFTGLSGSGKSTVANLLEKKLHAAGRHTYILDGDNVRHGLNRDLGFTEEDRVENIRRVAEVARLMADAGLIVLVSFISPFRAERRMARDLMGEGEFIEVFVDTPFEECAKRDPKGLYARALKGELKNFTGIDSPYEAPENPDLHLHTVGRAPEDMADELETWLRERGYC

SEQ ID NO: 25916 - DNA, 594 bp, Cytophaga hutchinsonii ATCC 33406
  CDS (1)..(594): transl_table=11
gtgaatcatatacatcccatcttcgataaaatcctgcaacgtgaggataaagaagcgcagttaaaacaacattccattgtaatatggatggttggcttatctggttctggtaaaagtacgcttgcaaaggctttagaaagagatctgcacgatcgtggttttttaactacgctgcttgatggcgataatcttcgtaccggtatcaataacaatcttggttttaccgaagcagaccgcacagaaaatatccgccgcgctgccgaaacgtctaagttatttgctgcctgcggtatcattacgatctgctcattgatcagccctacggaagaaatccgttccatgtcaaaaaacatcattggcgcaaacgattattttgaattgtttgttaatactccgattgaggtgtgcgaacagcgcgatgtaaaaggtttgtacaaaaaagcacgtgccggtgaaatcaaaaactttacaggaattgactctccgtttgaacacccgaaagccccgtcgttagaagtgcgcaccgatttacatagcttagaagattgcctgcagcagattttaacagctatccttcctaaaattacctactaa

SEQ ID NO: 25917 - protein, 197 aa, Cytophaga hutchinsonii ATCC 33406
MNHIHPIFDKILQREDKEAQLKQHSIVIWMVGLSGSGKSTLAKALERDLHDRGFLTTLLDGDNLRTGINNNLGFTEADRTENIRRAAETSKLFAACGIITICSLISPTEEIRSMSKNIIGANDYFELFVNTPIEVCEQRDVKGLYKKARAGEIKNFTGIDSPFEHPKAPSLEVRTDLHSLEDCLQQILTAILPKITY

SEQ ID NO: 25918 - DNA, 1884 bp, Rhodococcus sp. RHA1
  CDS (1)..(1884): transl_table=11
atgaccaccaccagccggccccgtcagttgctgcggctcgccaccgcgggcagcgtcgacgacggcaagagcactctgatcggacggctcctccacgacaccggcagcctgcccaccgaccacctcgaggcggtgacgaacgccgacggcgaggccgacctcgccgccctgtccgatgggctgcgcgccgaacgcgaacagggcatcaccatcgacgtggcgtaccggttcttctccacaccgacccgcagcttcgtgctcgcggacacgccggggcacgaacggtacacccgcaacatgttcaccggtgcgtcgaacgcccacgtcgccgtgctgctcgtggacgcccgcgccggggtgctccggcagacccgacgccacgcccggatcgccgacctgctcggcgtgccgcacctggtcgcagtggtcaacaagatcgacctcgtcgacttcgacgagacccggttcaaggaagtcgaatccgaactcggcctgctcgcacagcgcctcggcggccgcgacctcacggtgatcccggtatccgccacccgcggcgacaacgtcgtcacacggtcggattcgacaccctggtacgacgggcccacgatcctcgagtatctcgaagaggtggaactcgccgcaccgtccgccgtcccgtccgaactgcgactgccgatccagtgggtggcgcggcccacggacgaccggcgccgccgctacaccggccggctgtccgcaggcaccctgtccgtcggcgacgaggtggtggtcctgcctgcgggttcccgcagcacggtcaccgccctcgacaccctcgatccccaccggtcggtcgcggtcgcgccgctgtcggtgtcgttcgaactcgcggacgacctcgacgtggcccgcggcgacctcgtcatcagcgccgccgccgacgcgaccgcacccgccccggcccgcgagatcgacgcgaccgtgtgctggctgagcgagacaccgctgcgggcgggcgaccgggtggcactcaagcacacctcccgcaccgtgcgcgccacggttcaggaattgcacacccggctcgacccggaaaccctcgaagaacacgactcccccagcgagctcgccctcaacgacatcggccggatcacgctccggacgagcacggtcgtgctccccgacccctatgccaccaatcgtgacgccggcgcgttcatcctcatcgacgaacagagcaacgacaccgtcggcgccggaaccgtcggcgaagcccgggaagtcgtgcccggcgagcagacccggcacgacatcaagtggcacccgtcgtcgctggaacgggatcggcgctggtccgcgaccgggcagcggggcgccaccatctggctcaccgggctgccggcgtccgggaagtcgacggtggcagtcgcgctcgaacggaccctcgtcgacgcaggacgaaccgcgtacctgctggacggcgacaacgtacggcacggcatctcggacgacctcgggttctcccccggcgaccgggccgagaacatccgccgcgtcggtcacctcacccggttgttcgcggacgccggggtggtcgccatcgcgtcgatggtgtcgccgctgagctcggaccgtgcgatcgcgcgggcgctcaacgaggccgcgggactgccgtttctcgagatccacgtgagcaccccggtcgacgaatgcgaacggcgtgaccccaaggggctctacgcccgggcgcgggcaggtgaactccgcggcctcaccgggatcgatgcgccgtacgaggcccccgagaatccggatctcgcgttcgacaccaccggcgccgatctcgacgatctcgtcgcgcggattctcgccgaactcgcccggcacgagacgccaccggcctag

SEQ ID NO: 25919 - protein, 627 aa, Rhodococcus sp. RHA1
MTTTSRPRQLLRLATAGSVDDGKSTLIGRLLHDTGSLPTDHLEAVTNADGEADLAALSDGLRAEREQGITIDVAYRFFSTPTRSFVLADTPGHERYTRNMFTGASNAHVAVLLVDARAGVLRQTRRHARIADLLGVPHLVAVVNKIDLVDFDETRFKEVESELGLLAQRLGGRDLTVIPVSATRGDNVVTRSDSTPWYDGPTILEYLEEVELAAPSAVPSELRLPIQWVARPTDDRRRRYTGRLSAGTLSVGDEVVVLPAGSRSTVTALDTLDPHRSVAVAPLSVSFELADDLDVARGDLVISAAADATAPAPAREIDATVCWLSETPLRAGDRVALKHTSRTVRATVQELHTRLDPETLEEHDSPSELALNDIGRITLRTSTVVLPDPYATNRDAGAFILIDEQSNDTVGAGTVGEAREVVPGEQTRHDIKWHPSSLERDRRWSATGQRGATIWLTGLPASGKSTVAVALERTLVDAGRTAYLLDGDNVRHGISDDLGFSPGDRAENIRRVGHLTRLFADAGVVAIASMVSPLSSDRAIARALNEAAGLPFLEIHVSTPVDECERRDPKGLYARARAGELRGLTGIDAPYEAPENPDLAFDTTGADLDDLVARILAELARHETPPA

SEQ ID NO: 25920 - DNA, 528 bp, Trichodesmium erythraeum IMS101
  CDS (1)..(528): transl_table=11
atggaaaaaggatttattctgtggtttacggggttaagtggagctggtaaaacaactatcagcaaaattgtggcagaaaaattaaaacaaagaggtcggaaagtagaaatattagatggggatatagtcagagaaaacttatcaaaagggttgacttttagcaaagcggaccgagatataaatatccggcgcatcggatttgtagctcatctcttaagcaggaatggagtagtggcgataactgcagcaattagtccttacaaagcagtacgcaatgaaattagagaaatggatgaaaattttatagaagtttatatcaatgcacctttagaagtatgtgaacaacgtgatgttaaggggttatatggtaaagctagggctggagaaattaaaaattttaccggtattgatgatccttacgaaccaccaaataatccagaaattacttgttgcacagataaagaaagtttagatgaaagtgtagctaatgtaattagtagtttagaaaaactaggttatttggtttga

SEQ ID NO: 25921 - protein, 175 aa, Trichodesmium erythraeum IMS101
MEKGFILWFTGLSGAGKTTISKIVAEKLKQRGRKVEILDGDIVRENLSKGLTFSKADRDINIRRIGFVAHLLSRNGVVAITAAISPYKAVRNEIREMDENFIEVYINAPLEVCEQRDVKGLYGKARAGEIKNFTGIDDPYEPPNNPEITCCTDKESLDESVANVISSLEKLGYLV

SEQ ID NO: 25922 - DNA, 663 bp, Synechococcus sp. CC9311
  CDS (1)..(663): transl_table=11
gtgccacgagacaatgcaatctttcgcgttccgttcatggccgccgccgacaatccaaaagccaccaacatcgtttggcaccaggcctcggtcgatcgcgacactcgagctgagcaacgcgggcaccgcagttcgattctctggtttacgggcttaagcggagcgggcaagagcaccttggccaatgccgtgaacgctgctttgtttgaacgcggacttgccacttacgtgttggacggcgacaacgttcgccacggcctctgcaaggacttgggcttttccgacgccgaccgagaggagaacatccgtcgcattggagaggtcgccaagctgttcctcgatgcaggcgtcatcgttctgactgcgtttgtatccccgtttcgagctgaccgcgataaggccagagcccttgtgaacactggagacttcatcgagatccactgcgcagccgatctcagcgtttgcgaagaacgcgacaccaaagggctttatgccaaagcacgtgcaggtgaaatcaaagaattcacaggtatctccagcccctatgaggcacccgaacagcctgagctcaacgtgaacacaggcaacagcagcctggatagctgcgttgatcaggtcatccgctatctgatcgacaaaaaagtcattcctgcgcagagctga

SEQ ID NO: 25923 - protein, 220 aa, Synechococcus sp. CC9311
MPRDNAIFRVPFMAAADNPKATNIVWHQASVDRDTRAEQRGHRSSILWFTGLSGAGKSTLANAVNAALFERGLATYVLDGDNVRHGLCKDLGFSDADREENIRRIGEVAKLFLDAGVIVLTAFVSPFRADRDKARALVNTGDFIEIHCAADLSVCEERDTKGLYAKARAGEIKEFTGISSPYEAPEQPELNVNTGNSSLDSCVDQVIRYLIDKKVIPAQS

SEQ ID NO: 25924 - DNA, 618 bp, Shewanella sp. MR-7
  CDS (1)..(618): transl_table=11
atgagcaatattgtgtggcaccaacatagcgtcgaccaagcagacagagccaaacttaagggacaaaatccggtattactctggtttactgggctatctggcgcgggtaagtctaccttagctggggcgcttgagcgtgcactgtttgatgcaggctttcacacttacctgctcgatggtgataatgtgcgccatggtttatgcaaagatctgggctttagtgtcgccgatagggatgaaaacctgcgccgtgttggtgaagtggcaaaactcatggtggatgcgggcttagtcgtattatcggcctttatctcgccgacccgtgaggaacgcgacagcatacgtgcacgttttccagaagggcaatttatcgaagtgcatgtgtcgacgccactcagcatatgtgaacagcgtgatcctaagggtttgtatgttaaggctcgccgcggtgagatcagcaactttacggggatttcatcaccctatgaggcgccactctcggcggaattaacgatagacaccagtaaaggggatttagcctcgcaggtgcgagccttgattgattatttgactgcgatcgaggttatcaatcctagtcggttaactgcctcggcttag

SEQ ID NO: 25925 - protein, 205 aa, Shewanella sp. MR-7
MSNIVWHQHSVDQADRAKLKGQNPVLLWFTGLSGAGKSTLAGALERALFDAGFHTYLLDGDNVRHGLCKDLGFSVADRDENLRRVGEVAKLMVDAGLVVLSAFISPTREERDSIRARFPEGQFIEVHVSTPLSICEQRDPKGLYVKARRGEISNFTGISSPYEAPLSAELTIDTSKGDLASQVRALIDYLTAIEVINPSRLTASA

SEQ ID NO: 25926 - DNA, 1917 bp, Alkalilimnicola ehrlichei MLHE-1
  CDS (1)..(1917): transl_table=11
atgtcgcacgcatccgagctcatcgcccaggacattgaggcctacctgaagcagcacgagcagaaggacctgctgcgctttatcacctgcggcagcgtggacgacggcaagagcacgctgatcggccggctgctgcacgactcgcagctcatctacgaggaccagctcgccgccatcaagcgcgactcgggcaagtacggcaccaccggcgatgaggtggacctggcgctgctggtggacggcctgcagtcggagcgcgaacagggcatcaccatcgatgtggcctaccgctacttctccaccgagaagcgcaagttcatcattgccgacaccccgggccacgagcagtacacccgtaacatggccaccggggcctccaccgccagtctggcgatcatcctggtggatgcgcgcaaggggctgcaggtgcagacccggcgccacagctttatcgtctcgctgctgggcatccgccacgtggtgctggcggtgaacaagatggacctggtggactacgaccaggcggtgttcgacgccatctgcaaagattaccaggacttcgtgaagcgcctgggcattcccgatgtgcactacgtgccggtctccgccttgcagggcgataacgtggtgaagccctcgacggccatgccctggtacgacggcccgacgatgatgcacatcctcgagaccctgccggtggcggccgatcgcaatttcgacgagttccgcctgccggtgcagtacgtcaaccggccgaacccggactttcgcggcttctgcggcaccatcgccagcggtgtggtgcatccgggcgacccggtggtcgccctgccctcgggcaagcgctcgcgggtggcgcgcattgtcacctgggagggggacctggcggaggccttcccgccccaggcggtgacgctgaccctggaggacgagatcgacgtcagccggggggatatcctggccagcccggacacggtgccgaccgtctccgaggccttcgatgcgcgcattgtctggatggccgagcagccgatgctgcccgggcggcaatacgacatcaagctgggcacgcgcctggtgccgggcacgcccacggcggtgcaccaccggatcgacgtgaactcgttggagcaccagcacgcggaggagctggggctgaacgagatcggttactgccgggtgacgctgaaccagccggtgcccttcgatgcctacgagcgggtggcggacaccggcagctttatcctcatcgaccggctgaccaacgtgaccgtgggcgcgggcatgatcgtgcgcccggcggagcgggcggtgccggagaagtccgacgatgtggtctggcaggagccgaagatcagcaagcagcagcgggccaaccagaagacccagcgcccggccatcctatggttcaccgggctgtccggctcgggcaagtcgaccctgtccaacgccctggagcagcggctctaccagcttggctaccacagctacctgctggacggcgacaacatccgccatgggcttaacggggacttgggcttcagccgcgaggaccgggtggagaacatccgccgcatcggcgaggtggcacggttgttcgtggacgcggggctgctggtggtgaccgccttcatctcccccttccgcgccgaccgggcgatggtgcgcgagctggtggaggacggtgagttcgtggagatcttcgtcgacaccccgctggaggtctgcgagcagcgcgaccccaaggggctgtacgccaaggcccgcgccggggtgatcaaggagttcaccggcatcgactcgccctacgagcccccggagaagccggagctgcacatccgcaccgcggagctgtccgtggacgagagcgtggagcgcatcatcgcctatctgcaggaccggcacatcttgcggtag

SEQ ID NO: 25927 - protein, 638 aa, Alkalilimnicola ehrlichei MLHE-1
MSHASELIAQDIEAYLKQHEQKDLLRFITCGSVDDGKSTLIGRLLHDSQLIYEDQLAAIKRDSGKYGTTGDEVDLALLVDGLQSEREQGITIDVAYRYFSTEKRKFIIADTPGHEQYTRNMATGASTASLAIILVDARKGLQVQTRRHSFIVSLLGIRHVVLAVNKMDLVDYDQAVFDAICKDYQDFVKRLGIPDVHYVPVSALQGDNVVKPSTAMPWYDGPTMMHILETLPVAADRNFDEFRLPVQYVNRPNPDFRGFCGTIASGVVHPGDPVVALPSGKRSRVARIVTWEGDLAEAFPPQAVTLTLEDEIDVSRGDILASPDTVPTVSEAFDARIVWMAEQPMLPGRQYDIKLGTRLVPGTPTAVHHRIDVNSLEHQHAEELGLNEIGYCRVTLNQPVPFDAYERVADTGSFILIDRLTNVTVGAGMIVRPAERAVPEKSDDVVWQEPKISKQQRANQKTQRPAILWFTGLSGSGKSTLSNALEQRLYQLGYHSYLLDGDNIRHGLNGDLGFSREDRVENIRRIGEVARLFVDAGLLVVTAFISPFRADRAMVRELVEDGEFVEIFVDTPLEVCEQRDPKGLYAKARAGVIKEFTGIDSPYEPPEKPELHIRTAELSVDESVERIIAYLQDRHILR

SEQ ID NO: 25928 - DNA, 1932 bp, Hyphomonas neptunium ATCC 15444
  CDS (1)..(1932): transl_table=11
atgcgcctcaacgacgatctcattgcttcggatatcggcgcgtatctggaggcgcacgagaacaaatcgctcctgcggttcatcacctgcggctcagtcgatgacggcaagtccacgctgatcggtcgcctgctctacgattcgaaaatgatcttcgaagatcagctggccgcgctggaaaacgattccaaaaaggtcggcacgcaaggcgaaggcatcgactttgccctcctcgtggacggcctcgcggccgagcgggagcaaggtatcacgattgatgtcgcctaccgcttcttcgcaacacccaaccgcaagttcatcgtcgccgatacgccgggacatgaacagtatacgcgcaatatggcgaccggcgcctcgaccgctgacgcggccatcctgatgatcgacgcgcgcaagggcatccttacccagacgcgccgccacagcttcattgccagccttctcgggatcaaacatctcgtcctggccgtgaacaagatggaccttgtcggatacaatcaggatgtgttcgacgacatcgtggcagattacaggacttttgccgaaggtcttccgggtaaggtcaatatccagcctattccgctctcggcgctggcgggcaccaacatgactgagcgctcgcccgagacgccctggtatgagggtccaagcctcatcgaatatctcgaaacggtcgagatcgaagcagaagataccgcgcggccgttccgcctgccggtccagtgggtcaaccggcccaatctcgatttccgcggctttgccggccagatttccagcggcgccgttcgccccggggatcgcgtgcgctcgcttccctccgggcgtgaaaccacgatcacccggatcgtgaccgcaggcggcgacctggacgaagcggttgcgggccaatccgtgactctgacctttgctgacgaaatcgacacctcccgcggcgacatgatcgtctccgccgatcagcctgcggaagtttccgaccagttccaggttcacctgctctggatgagcgagcaggccctgctgccgggccgccgctacatcctcaaggccggagcaaaaaccgtgacggcgacggtcaacgcgcccaagcacggcattgacgtcaacacgctcgccgaaacgcccgcccgcgccgccgagcttaaccagatcgtggtgaccaccctttccctcgaccagccgatcccgtttgatccctataaggataaccgggagaccggcggcttcatcctgattgaccgccagtccaatgatacggtcgccctcggcctgatcgactttgcgctgcgccgggcctcaaacatccattggcaagccatcgacatcagccgcgatgccctcgccgagcagaagggccaacgcccggcggtgctctggttcacaggcctttccggctcgggtaaatccactatcgccaacgccctgcagaagcgcctcttcgcctatggccggcacacattcatcctcgacggggacaatgtgcgccacggccttaaccgcgacctcggctttaccgacgccgaccgcgtggaaaacatccgccgcgtcgccaatgtcgcccgccttatgtcagatgccggtcttatcacgctggtctcgttcatctctcccttccgggccgaacgccagctggcacgcagcctgatgcctgagggcgagttcatcgagatccatgtcgatacgcctatcgaaattgccgaaagccgggatgtcaaaggcctctacaagaaggcccgcgccggtgagatccgcaacttcaccggtatcgacagcccgtatgagcccccgcgcaatgccgaaatccgaatcagtacggctgatcgcacggcggaagacgccgctgaggagattttcacttatctcgagacgcacggattcctcagcgtctgggacggccccggcagcggcatctga

SEQ ID NO: 25929 - protein, 643 aa, Hyphomonas neptunium ATCC 15444
MRLNDDLIASDIGAYLEAHENKSLLRFITCGSVDDGKSTLIGRLLYDSKMIFEDQLAALENDSKKVGTQGEGIDFALLVDGLAAEREQGITIDVAYRFFATPNRKFIVADTPGHEQYTRNMATGASTADAAILMIDARKGILTQTRRHSFIASLLGIKHLVLAVNKMDLVGYNQDVFDDIVADYRTFAEGLPGKVNIQPIPLSALAGTNMTERSPETPWYEGPSLIEYLETVEIEAEDTARPFRLPVQWVNRPNLDFRGFAGQISSGAVRPGDRVRSLPSGRETTITRIVTAGGDLDEAVAGQSVTLTFADEIDTSRGDMIVSADQPAEVSDQFQVHLLWMSEQALLPGRRYILKAGAKTVTATVNAPKHGIDVNTLAETPARAAELNQIVVTTLSLDQPIPFDPYKDNRETGGFILIDRQSNDTVALGLIDFALRRASNIHWQAIDISRDALAEQKGQRPAVLWFTGLSGSGKSTIANALQKRLFAYGRHTFILDGDNVRHGLNRDLGFTDADRVENIRRVANVARLMSDAGLITLVSFISPFRAERQLARSLMPEGEFIEIHVDTPIEIAESRDVKGLYKKARAGEIRNFTGIDSPYEPPRNAEIRISTADRTAEDAAEEIFTYLETHGFLSVWDGPGSGI

SEQ ID NO: 25930 - DNA, 1905 bp, Magnetococcus sp. MC-1
  CDS (1)..(1905): transl_table=11
atggtggatttgcatacccctcccgcgcactttgatatgcaggcctttgtgggtcaacaaaaccaaaaggatctgctccgtttgctcacttgcggctcggtggatgatggtaaatccaccctgctggggcgtctgctctacgacagtaaacgggtgatggaagatcaactgacggcgttggtggctgactccagccgctttggcaccaccggtgcgggtgagctggacttggcgctgttggtggatggtctggccgccgagcgggagcagggcattaccattgatgtggcctaccgttttttatccaccgagcggcgcacctttattgtggcggatgccccgggccatgagcagtacacccgcaacatggccactgccgcttccaccgctgagctggcgattatcttggtggatgccagcaaaggcattttgacccagacccggcggcacagctttattgtggggcttatgggcattaagtcggtggtgctggcggtgaacaaaatggatctggtggggtatcaggaggccccctttgtggccttggtgcaggcttatgaagcgttggcgcaacgcttgggtataacatccctacaggcgattccactggcggccctgacgggtgaacatgtggtgcagcggcagggtcatatgccttggtatagcgggccaaccctgctggagtatctggagtcggtgccggtggagcaagaggcctcgcaggctcctttgcgtatgccggtgcagtgggtcaatcgcccccatgccgattttcgtgggtttgcgggcaccttggccgctggagaggtgcggcctggggatgatgtggtggttctgccctcgggcaagttgagccaagtctctcgtattgtgagcatggatggccctctgcaacaggcggttgcaggggatgcggtgacactggtgttggccgatgcgctggatgtctcacggggggatgtgattgcccaagccaatgcccggcctgaggtggcggatcagtttgccgcccatctgctgtggatgagcgaggccgccctgctgccgggccgcgcctatctgttaaggataggtacagcccaagtgacggcccaagtgaccaagattaaacataaaatcaatgtcaataccggggagcaaatggcggcggcccatcttgagttaaacgatgtggcggtgtgcaatctggccttggatcgggcggtgccgtttgagccctataaggtaaaccggtcgctggggggctttattctggtggaccgtatgagtcatgccacggtaggctgtggcatggtggattttgcactgcggcgggcggccaatatccatcagcatgatatgaaggtggatcgcgcggcgcgggcggcggccaatgggcagcgtccatgtgttttgtggttcactggactctccgggtcgggtaaatccacggtggccgatctggtggagcaaaagctctaccgcatgcagcggcgcaccatgaccctggatggcgataatgtgcgccacggtttaaaccgcgacctggggtttaaagacgaagatcgggtggagaatattcggcgcattgccgaggtggccaaattaatggtcgaggcgggtttgattgtctgtgtcagctttatttcaccctttcgcaacgagcggcgcatggcgcgggagttaatgggtgccggagccttttatgagatctttgtggatgcctcgctggcggtgtgtgagcagcgggatcccaaggggctctataaaaaggcgcgtctgggggagatccccaactttactggcatcagcagcccttatgaagcccctcagacgcccgacctgcatctggccgctggcgatgaaaccccggagcagttggccgatcaagtggtccactttttacagcagcaaggggtgatctga

SEQ ID NO: 25931 - protein, 634 aa, Magnetococcus sp. MC-1
MVDLHTPPAHFDMQAFVGQQNQKDLLRLLTCGSVDDGKSTLLGRLLYDSKRVMEDQLTALVADSSRFGTTGAGELDLALLVDGLAAEREQGITIDVAYRFLSTERRTFIVADAPGHEQYTRNMATAASTAELAIILVDASKGILTQTRRHSFIVGLMGIKSVVLAVNKMDLVGYQEAPFVALVQAYEALAQRLGITSLQAIPLAALTGEHVVQRQGHMPWYSGPTLLEYLESVPVEQEASQAPLRMPVQWVNRPHADFRGFAGTLAAGEVRPGDDVVVLPSGKLSQVSRIVSMDGPLQQAVAGDAVTLVLADALDVSRGDVIAQANARPEVADQFAAHLLWMSEAALLPGRAYLLRIGTAQVTAQVTKIKHKINVNTGEQMAAAHLELNDVAVCNLALDRAVPFEPYKVNRSLGGFILVDRMSHATVGCGMVDFALRRAANIHQHDMKVDRAARAAANGQRPCVLWFTGLSGSGKSTVADLVEQKLYRMQRRTMTLDGDNVRHGLNRDLGFKDEDRVENIRRIAEVAKLMVEAGLIVCVSFISPFRNERRMARELMGAGAFYEIFVDASLAVCEQRDPKGLYKKARLGEIPNFTGISSPYEAPQTPDLHLAAGDETPEQLADQVVHFLQQQGVI

SEQ ID NO: 25932 - DNA, 618 bp, Shewanella sp. ANA-3
  CDS (1)..(618): transl_table=11
atgagcaatattgtgtggcaccaacatagtgtcgaccaagcggccagagcgaaactgaagggccaaaatccagtgttactctggtttactgggctgtctggtgcgggtaagtcgactttagcaggggcgcttgagcgcgcactgtttgaggcgggctttcacacttatttgctcgatggtgacaatgttcgccatggtttatgtaaggatctgggttttagcgtcgccgatagggatgaaaacttacgccgcgttggcgaagtggcaaaactcatggtggatgcgggcttagtcgtattatcggcctttatctcgccgacccgcgaggagcgcgatagcatacgggcacgttttccagaaggtcaatttatcgaagtgcatgtgtcgacgccgcttagcatatgtgagcagcgcgatcctaagggcttgtatgttaaggctcgccgcggtgagatcagcaactttaccggtatttcatcaccctacgaggcgccgctctcggcggagttaacgattgataccagtaaaggggatttagcctcgcaagtgcgtgctttaatcgattatttaaccgcgattggggtcatcaatcccgataaggctaaagcattagcctaa

SEQ ID NO: 25933 - protein, 205 aa, Shewanella sp. ANA-3
MSNIVWHQHSVDQAARAKLKGQNPVLLWFTGLSGAGKSTLAGALERALFEAGFHTYLLDGDNVRHGLCKDLGFSVADRDENLRRVGEVAKLMVDAGLVVLSAFISPTREERDSIRARFPEGQFIEVHVSTPLSICEQRDPKGLYVKARRGEISNFTGISSPYEAPLSAELTIDTSKGDLASQVRALIDYLTAIGVINPDKAKALA

SEQ ID NO: 25934 - DNA, 1851 bp, Mycobacterium avium 104
  CDS (1)..(1851): transl_table=11
atggccgccccaaccacgctattgcgtttggccactgcgggatccgtcgacgacggcaagtccacgctgatcggccggctgctctacgactccaaggccgtgatggaagaccagtgggcggcggtggagcagacctcgaaggaccgcggccacgactacaccgacctggcgctggtcaccgacggcctgcgggccgaacgcgagcagggtatcaccatcgacgtcgcctaccgctacttcgccacgcccaagcggaaattcatcatcgccgacacgcccggccacatccagtacacccgcaacatggtgaccggcgcgtcgaccgcgcagctggtgatcgtgctggtcgatgcgcggcacggcctgctggagcagtcccgccggcacgccttcctggcctcgctgctgggcatccagcacatcgtgctcgcggtcaacaagatggacctgatcggttgggacagagagaaattcgagtccatccgagacgaattccacgccttcgccgcgcgcctggacgtgcacgacgtggccaccatcccgatttcggccctgcacggcgacaacgtggtgaccaagtcggatcagacaccctggtacgaggggccggcgctgctgtcgcacctcgaagaggtgtacatcgccggtgaccgcaacctggtcgacgtgcggttcccggtgcagtacgtgatccgtccgcacacccacgagcatcaggaccaccgcagctacgccggtaccgtcgccagcggcgtgatgcgtcccggcgacgaggtcgtggtgctgccggtcggcaagcgcacccggatcaccgcgatcgagggcccgaacggcccggtgcaagaagcgttcccaccgatggcggtgtcgctgaccctggccgacgagatcgacatctcgcgcggggatctgatcgcgcgcacccacaaccagcccaggatcgcccaggatttcgacgcgacggtgtgctggatggccgacaacacgacgctggaaccgggccgcgactacgtcatcaagcacaccacccgcaccacgcacgcgagggtgaccgggctcgattaccggctcgacgtcaacacgctgcatcgggacaagaccgcgacggcgctgaaactcaatgagctgggccgtatttcgctgcgcacccaggtgcccctgctgctcgacgagtacacccgcaaccccagcaccggctcgttcatcctgatcgacccgcacaccaacggcacggtggccgcgggcatggtgctgcgcgacgcctcggcccaggccgcgagcccgaacacggtgcggcacaagtcatcagcgatcgccgcggcgcggccccgcggcaagacggtgtggttcaccggtctgtccggttccggcaagtcgtcggtggccatgctggtcgagcagaagctgctcgaaaagggtgcgcaggcttatgttctcgacggcgacaaccttcggcacgggctcaacgcggaccttggtttctccatggccgaccgggcggagaacctgcgccggctcgctcacgtggcggcgctgctggccgattgcggcaacgtcgtgctggttccggcgatcagcccactggccgagcaacgcgaattggcgcgcaaagtgcacgccgacgccggcttcgacttcatcgaggtgttctgcgacaccccgatcgaggaatgcgaaaagcgtgaccccaagggtctgtacgccaaggcgcgggccggcgagatcacccagttcaccggcatcgacagcccgtatcagccgccggcgaagcccgacctgcggctcaccccggacggcaccgtcgaggagcaggcgcagcgggtgatcgacctgctggaatcacgcgggtag

SEQ ID NO: 25935 - protein, 616 aa, Mycobacterium avium 104
MAAPTTLLRLATAGSVDDGKSTLIGRLLYDSKAVMEDQWAAVEQTSKDRGHDYTDLALVTDGLRAEREQGITIDVAYRYFATPKRKFIIADTPGHIQYTRNMVTGASTAQLVIVLVDARHGLLEQSRRHAFLASLLGIQHIVLAVNKMDLIGWDREKFESIRDEFHAFAARLDVHDVATIPISALHGDNVVTKSDQTPWYEGPALLSHLEEVYIAGDRNLVDVRFPVQYVIRPHTHEHQDHRSYAGTVASGVMRPGDEVVVLPVGKRTRITAIEGPNGPVQEAFPPMAVSLTLADEIDISRGDLIARTHNQPRIAQDFDATVCWMADNTTLEPGRDYVIKHTTRTTHARVTGLDYRLDVNTLHRDKTATALKLNELGRISLRTQVPLLLDEYTRNPSTGSFILIDPHTNGTVAAGMVLRDASAQAASPNTVRHKSSAIAAARPRGKTVWFTGLSGSGKSSVAMLVEQKLLEKGAQAYVLDGDNLRHGLNADLGFSMADRAENLRRLAHVAALLADCGNVVLVPAISPLAEQRELARKVHADAGFDFIEVFCDTPIEECEKRDPKGLYAKARAGEITQFTGIDSPYQPPAKPDLRLTPDGTVEEQAQRVIDLLESRG

SEQ ID NO: 25936 - DNA, 1854 bp, Mycobacterium smegmatis str. MC2 155
  CDS (1)..(1854): transl_table=11
atgagcgccaacacgactctgctgcggcttgcgacggcgggttcggtcgacgacggcaagtccacgctgatcggccggctgctgtacgactcgaaggccgtcatggaggatcagctcgcggccgtcgagcgcacctccaaggaacgcgggcacgactacaccgatctggcgctggtcaccgacggtctgcgcgccgagcgcgagcagggcatcacgatcgacgtcgcctaccgctacttcgccacggccaagcggaaattcatcatcgccgacaccccgggccacatccagtacacccgcaacatggtcaccggcacgtccaccgcacagctggcgatcgtactggtcgacgcccgcaacggcctgctcgaacagtcgcgcaggcacgcgttcctggcgtcgctgctgggcatccggcacatcgtgctggccgtcaacaagatggacctcatcggctgggaccaggagcgcttcgaggcgatccgcgacgaattccacacattcgcagcgcgtttggacgtccacgacgtcaccgccatcccgctgtcggcgctgcagggcgacaacgtcgtcaccaagagtgacaagaccccgtggtacgagggcccggccctgctggcccacctcgaagacgtctacatcgccggtgaccgcaacctggtcgacgtgcggttccccgtgcagtacgtgatccggccccagacgctcgaccacgccgaccaccgcagctacgcgggcaccgtcgccagcggcgtcatgcgcccgggtgacgagatcgtggtgctgcccagcggcaagtccagccgcatcaccgagatcgccggtcccggtgggccggtcgacgaggcgttcccgccgatggcggtgtcgatcagcctggccgacgacatcgacatcagccgcggcgacatgatcgcccggccgggcaaccagccccgcgtcacgcaggacttcgacgccacggtgtgctggatggccgacgacgcatcgctcgaaccgggccgcgagtacctgatcaagcacaccacgcgcaccacgcgcgccaaggtggtcgatctggactaccgcctcgacgtcaacacgctgcaccgcgacaagtccgcgaccgcgctcaaactcaacgagctgggccggatctcactgcgcacgcgcacgccgctgctgctcgacgagtacagccgcaaccccgcgacgggctcgttcatcctgatagatccgcacaccaacggcaccgtgggtgcgggcatggtgctgcgcgacgcccgcaacgaatccgcgagccccaacaccgtgcgccacgagaacctgatcaccgccgaggaccggctgacccgcgggcgcaccgtgtggttcaccggcctttcgggttcgggcaagtcgtcggtcgcgatgctcgtcgagcagaagctgctgggcaagggtgtcccggcgtacgtgctggacggcgacaacctgcgccacggcctcaacgccgatctgggcttctcgatggccgaccgcgccgagaacctgcgccgcctggcgcacgtcgcgtcgctgctcgccgattccgggcagatcgtgctggtgcctgccatcagcccgctcgaggagcaccgcgaactggcgcggcgggtgtccaccgagagcggtgtcgagttcttcgaggtcttctgcgacacgccgctggccgattgcgaggcacgcgatcccaagggcctgtacgccaaggcccgcgccggtgagatcacgcatttcaccggtatcgacagcccgtaccagcggcccaagcatcccgatctgcggctcacgcccgagcattcgctcgacgagttggccgatatggtgatcgagatgctggagacccgtaggtga

SEQ ID NO: 25937 - protein, 617 aa, Mycobacterium smegmatis str. MC2 155
MSANTTLLRLATAGSVDDGKSTLIGRLLYDSKAVMEDQLAAVERTSKERGHDYTDLALVTDGLRAEREQGITIDVAYRYFATAKRKFIIADTPGHIQYTRNMVTGTSTAQLAIVLVDARNGLLEQSRRHAFLASLLGIRHIVLAVNKMDLIGWDQERFEAIRDEFHTFAARLDVHDVTAIPLSALQGDNVVTKSDKTPWYEGPALLAHLEDVYIAGDRNLVDVRFPVQYVIRPQTLDHADHRSYAGTVASGVMRPGDEIVVLPSGKSSRITEIAGPGGPVDEAFPPMAVSISLADDIDISRGDMIARPGNQPRVTQDFDATVCWMADDASLEPGREYLIKHTTRTTRAKVVDLDYRLDVNTLHRDKSATALKLNELGRISLRTRTPLLLDEYSRNPATGSFILIDPHTNGTVGAGMVLRDARNESASPNTVRHENLITAEDRLTRGRTVWFTGLSGSGKSSVAMLVEQKLLGKGVPAYVLDGDNLRHGLNADLGFSMADRAENLRRLAHVASLLADSGQIVLVPAISPLEEHRELARRVSTESGVEFFEVFCDTPLADCEARDPKGLYAKARAGEITHFTGIDSPYQRPKHPDLRLTPEHSLDELADMVIEMLETRR

SEQ ID NO: 25938 - DNA, 2013 bp, Nocardioides sp. JS614
  CDS (1)..(2013): transl_table=11
atgccgcccgtcccgcagtactgccccaccccccgcgagctcgacgacctcgagctcctggtgaccggtgccctggtgccgacggtcgtcttcaacgagccgggcagcccggtcaccctgaccctgcccgacgacgtcgccgccgccgcgagcgccgccggtgcggtcgagctggtcgaccccgagggccttccgttggcgcaggtcgagatcccggccggcaccatcgacccgctcacccacgcgcagtacgggccgttccgtcgctactacctgacgcctgcacagacgagggagcggtacgccgggcgcaccttcgtcccggtcgtcgatgcgctgacgctgccccagctcgaggtcctgaagaccgtcggccccgtggtactgctgcccctggtcggccacggcacacccgagctgtcaccggtggctttgatccgggccacgatcgcggccgccacgtacctcccgcacgcggacgtcgtcgcgatccccctggccacccgtggcgacgccgatgtcgaccatgacctgggcctccaggtggtcgccaactatgccggcgaggatccgctggtcggggtcagcgacgacccgtcgggcgactatccgcccgaggtggccgagatcgtggcgttcgaccgtccggcggccgacgagcagggcctggtcctgttcttcaccggcctctcgggcagtggcaagtcgacgctcgcgcgggcgctgatggaccggctgctcgagcacggcggccgcacggtgacgagcctcgacggcgacgtcgtgcgccgcaatctctccgccggcctgaccttctccaaggaggaccgggagaccaacatccgtcggatcggctgggtcgccgccgagatctcgcgccacggcggggtcgccgtgtgcagccccatcgccccgttcgacgagacccgccagcaggtccgcgcgatggtccgcgacgccgggggcgcgttcttcctcgtgcacgtcgccaccccgctggaggagtgcgagcgccgcgaccgcaagggcctgtacgccaaggcccgccgcggcgagatccccgagttcaccggcatctcctccccctacgaggagcccgaggacgccgacgtccgcgtcgacaccaccggccgcaccatcggggacgccctcgacgacgtgatccaggccctccgcgcctccggccacctcgacctcaccgacaccccaccggccgacacccccccggtggtcgagcagcgagcgccagccgaccccccgccggtcgagcagcaaccgccagccgaccccccgctggccgagcagcgagcgccagccgtccctccgttggtcgagcagcgagcgccagcgagcgtcgtcgagaccccggaagagaaggcagggcctcctgaccttgatccgacggccggacaacgaccgtcccggtcagacaaggcaacctcgaacaagtccacccccaagcgcagcaccccgcttcgcgtcctctacatctgcacagccaacatctgccgctccccgttcatggagctctactcccgtcacctggccggccacggcacccacgtgacgttcgcgagcgccggcacccacggcttcgtcggacgcgagatggacccgaccatggccgcgacgctgagagcccgtggcgtggcaggagtcagccggttccgcagccggccgttctccagcgacctgatgccccacgccgacctggtactgaccgccgagtcgacgcatcggcagttcctcctcgacgaccacccggcgagcttccgcaaggtgctgacgatcggtcagttcgccgaggccgtccgcgcgtccggcgacgacctctccggccatgacctgctggccgcggtcgccgagcgacgcggccaggccgatccgtccctggacgtcggcgacccgtacggacaaggacccgaggtggcggcggtgtgtgccgacgcactcgacgagctgctgcgcgtcgtcgtccccgccctcaccggaaccaggaagatctccctatga

SEQ ID NO: 25939 - protein, 670 aa, Nocardioides sp. JS614
MPPVPQYCPTPRELDDLELLVTGALVPTVVFNEPGSPVTLTLPDDVAAAASAAGAVELVDPEGLPLAQVEIPAGTIDPLTHAQYGPFRRYYLTPAQTRERYAGRTFVPVVDALTLPQLEVLKTVGPVVLLPLVGHGTPELSPVALIRATIAAATYLPHADVVAIPLATRGDADVDHDLGLQVVANYAGEDPLVGVSDDPSGDYPPEVAEIVAFDRPAADEQGLVLFFTGLSGSGKSTLARALMDRLLEHGGRTVTSLDGDVVRRNLSAGLTFSKEDRETNIRRIGWVAAEISRHGGVAVCSPIAPFDETRQQVRAMVRDAGGAFFLVHVATPLEECERRDRKGLYAKARRGEIPEFTGISSPYEEPEDADVRVDTTGRTIGDALDDVIQALRASGHLDLTDTPPADTPPVVEQRAPADPPPVEQQPPADPPLAEQRAPAVPPLVEQRAPASVVETPEEKAGPPDLDPTAGQRPSRSDKATSNKSTPKRSTPLRVLYICTANICRSPFMELYSRHLAGHGTHVTFASAGTHGFVGREMDPTMAATLRARGVAGVSRFRSRPFSSDLMPHADLVLTAESTHRQFLLDDHPASFRKVLTIGQFAEAVRASGDDLSGHDLLAAVAERRGQADPSLDVGDPYGQGPEVAAVCADALDELLRVVVPALTGTRKISL

SEQ ID NO: 25940 - DNA, 1860 bp, Magnetospirillum magnetotacticum MS-1
  CDS (1)..(1860): transl_table=11
atgaagatcgtcgtcgtcggtcatgttgaccacggcaaatccactttggtggggcgtattctcaacgagaccggcgccctgcccgagggcaaggtcgaatacctgaaggaagtctgcgacaagcgcggcatgcccttcgaatgggccttcgtcatggacgcgctgcaggccgagcgtgaccagggcatcaccatcgacaccgcccagattcgctttcgatccgaagcccggccctatgtcatcatcgacgcgcccggccacaaggaattcctgaagaacatggtgtcgggcgcggcttcggccgaggccgccgtcctggtcatcgacgcccatgaaggcgtgcaggaacagtcgcgccgtcatggctatctgctgcatctgctgggcttgcgccagatcgccgtggcggtcaacaagatggatctggtggacttctcccaggcccgcttcgaggaagtgaaggccgagatcgtggcctatctcaattccatcggcgtcgagcccacctatgtcatcccggtggcggcacgctcgggcgccaacatcgcctcggtcgccgccgagaccccctggtacaagggccccagcgtgctgggcgcgctggatctcttcgaacccgccaagccgctcaccgatctggcgctgcgcttcccggttcaggatgtctacaagttcgacgagcgccgcatcatcgctggccgcatcgaatcgggccgccttaaggtgggcgacaccctggtcttcgcgccgtcgggcaagatggccaagatcgccaccatcgagacctggggcaatgtggcgtcggcggtttccgccggtgcgggccagtcggtgggcatcacgctcgacgagcagatcttcgtcgagcgcggcaatgtggccagcctggaactccatgctccgaaccagtcccatgacctgaaagcccgcgtcttctggctgggcaaggggccgttgaaggtggggtcccgctataagctgaagctggccaccgcggaacatgtggtcgatgtggtggccatcgagcgcgtgatcgatgtggaggacctggccaaccaccagggctcggaagtggcgcgcaacgccgtcgccgaagtcgtcttccggggcaagtcgcccatcgcccatgactcgttcatcgacaatccccgtttgggccgcttcgtcctggtggagggctacgatatcgtcggcggcggcgtcatcgccgaggcctcctccgacgaggcccgcaaccggtccacgcatgtgaccgaagtgccgcacaaggtggatgccgagacccgcgccatcgccaacggtcatcgtggcggcgtggtctggctgaccggcctgtcgggggcgggcaagtcgaccatcgccatggaagttgagcgccagttgttcctcaagggctggcaggtcaccgtgttggacggcgacaatgtgcgcaccggcctgtgcggcgatctgggcttctcggattccgaccgggtcgaaaatatccgccgggtgggcgaggtggcccatctgttcgccgaggctggcatggtggtggtgacctcgttcatctcgcccttccgcgccgatcgcgagaaggtacgcgccatcaacccggacgcctttcacgaaatccatgtgaccaccggcttggacgagtgcgaacgccgcgatcccaagggtctctacaagaaggcccgcgctggggagatcaatgacttcaccggcgtgtcttctgcctacgaggcgcccgccttgccggaactggccctggccaccgagggcaagagcgtggatgaaagcgttgccgaccttctacgctatatcgacaacgccttctcgctttcggcccgcgaacaggccaatggctgggggctgtaa

SEQ ID NO: 25941 - protein, 619 aa, Magnetospirillum magnetotacticum MS-1
MKIVVVGHVDHGKSTLVGRILNETGALPEGKVEYLKEVCDKRGMPFEWAFVMDALQAERDQGITIDTAQIRFRSEARPYVIIDAPGHKEFLKNMVSGAASAEAAVLVIDAHEGVQEQSRRHGYLLHLLGLRQIAVAVNKMDLVDFSQARFEEVKAEIVAYLNSIGVEPTYVIPVAARSGANIASVAAETPWYKGPSVLGALDLFEPAKPLTDLALRFPVQDVYKFDERRIIAGRIESGRLKVGDTLVFAPSGKMAKIATIETWGNVASAVSAGAGQSVGITLDEQIFVERGNVASLELHAPNQSHDLKARVFWLGKGPLKVGSRYKLKLATAEHVVDVVAIERVIDVEDLANHQGSEVARNAVAEVVFRGKSPIAHDSFIDNPRLGRFVLVEGYDIVGGGVIAEASSDEARNRSTHVTEVPHKVDAETRAIANGHRGGVVWLTGLSGAGKSTIAMEVERQLFLKGWQVTVLDGDNVRTGLCGDLGFSDSDRVENIRRVGEVAHLFAEAGMVVVTSFISPFRADREKVRAINPDAFHEIHVTTGLDECERRDPKGLYKKARAGEINDFTGVSSAYEAPALPELALATEGKSVDESVADLLRYIDNAFSLSAREQANGWGL

SEQ ID NO: 25942 - DNA, 534 bp, Nostoc punctiforme PCC 73102
  CDS (1)..(534): transl_table=11
atgagacaacaagagcctggggtgacagtatggttcactggtttaagtggtgcagggaaaactactatctgtcaattcgtggaaaaggaactgcggatacagggatacagagttgaagttctagatggtgatgcggtacgtcaaaatctatgcaaagggttgagtttcagtaaagaggatcgagaagagaatattcggcgtattggctttgtggctcatcttcttgcaagaaataatgtaattgttttggtttcaaccatttctccttaccgtaaggttcgagaagaagtgcgccaaaatattccaagtttcattgaagtatacgtcaatgcatcattagaagtttgtgaacagcgagacgtaaaagggttatataaaaaagccagaatgggggaaattaagaacttcaccggtattgatgatccttatgaaataccactccgtcctgaagtcgaatgcaaaactaaccaagaaaccctttaccaaagtgcaactaaagttttagaaaagctggaagagctgggttatatatag

SEQ ID NO: 25943 - protein, 177 aa, Nostoc punctiforme PCC 73102
MRQQEPGVTVWFTGLSGAGKTTICQFVEKELRIQGYRVEVLDGDAVRQNLCKGLSFSKEDREENIRRIGFVAHLLARNNVIVLVSTISPYRKVREEVRQNIPSFIEVYVNASLEVCEQRDVKGLYKKARMGEIKNFTGIDDPYEIPLRPEVECKTNQETLYQSATKVLEKLEELGYI

SEQ ID NO: 25944 - DNA, 546 bp, Crocosphaera watsonii WH 8501
  CDS (1)..(546): transl_table=11
atggaacaacggggcgtaacagtttggtttacaggattaagtggtgccggcaaaaccaccattacccaagctttagaaaagaaattaagagaagcaggttatcctctagaaatcttagatggggatattgttagaacgaatttaaccaaggggttaggtttctctaaagaagatcgtgacaccaatatccgtcgtatcggttttgtgtctcagttgcttacccgtcacggtgtgattgttttagtttctgctatttctccttatcgtgagattcgtgaagaagtcaaaggtaaaattggagactttgtggaagtctttgttaatgcacctttgaacgtttgcgaagatcgagatgtgaagggattatatcaacgggcccgcgctggtgaaattaaatctttcactggtattgatgatccctacgaaccccctttaaaccctgaagttgaatgtcgtaccgatctcgaaactttagaggaaagtgttaacaaagtttggcagaaactcgaagaaatgggttatcttgctaaacctgttgctgtttaa

SEQ ID NO: 25945 - protein, 181 aa, Crocosphaera watsonii WH 8501
MEQRGVTVWFTGLSGAGKTTITQALEKKLREAGYPLEILDGDIVRTNLTKGLGFSKEDRDTNIRRIGFVSQLLTRHGVIVLVSAISPYREIREEVKGKIGDFVEVFVNAPLNVCEDRDVKGLYQRARAGEIKSFTGIDDPYEPPLNPEVECRTDLETLEESVNKVWQKLEEMGYLAKPVAV

SEQ ID NO: 25946 - DNA, 591 bp, Prosthecochloris aestuarii DSM 271
  CDS (1)..(591): transl_table=11
atgaagcatatccatccggtttttgaccagattttagggcgtgaagataaagaacgtatgctcaaacaacgtggttgtgttttgtggtttacagggttgtcagggtctgggaagacgacaattgcccgtcatgttgagcaggagctcgctgggaaaggggtgttgacgcaagtgctggatggagacaatatccgtaccgggattaacaataatctcggatttggtgaggaggatagggttgaaaacatccggagaattgcagaggtgacgaagctgtttgttcattgtggtattgttacgttgaattgttttatcagccctactcgtgaaatgcgacaaatggcgaaggatattgtcggggctgatgattttgttgaggtgtttgtggatacgtctctgtacgagtgcgaggctcgggatgtgaaggggttgtacaaaaaagctcgcgcaggtgagatacctaattttaccggcattcatgaaccatttgaatcaccgttggatccggatgtacatatcgtcacagaacaacaatgcgtttctgaatgtgtaagttctgtgatttcattcgttatccctcgcatattttag

SEQ ID NO: 25947 - protein, 196 aa, Prosthecochloris aestuarii DSM 271
MKHIHPVFDQILGREDKERMLKQRGCVLWFTGLSGSGKTTIARHVEQELAGKGVLTQVLDGDNIRTGINNNLGFGEEDRVENIRRIAEVTKLFVHCGIVTLNCFISPTREMRQMAKDIVGADDFVEVFVDTSLYECEARDVKGLYKKARAGEIPNFTGIHEPFESPLDPDVHIVTEQQCVSECVSSVISFVIPRIF

SEQ ID NO: 25948 - DNA, 1713 bp, Sulfitobacter sp. EE-36
  CDS (1)..(1713): transl_table=11
atgcaaacgcccaaccttgctccgatccctgaactctatgtctcttacgactcggcgcagaagctgaaggtggaagctggcgacctggtcagccatgacctgacgccgcgccagatctgcgatctagagctgctgatgaacggtggcttcaaccctctcaagggtttcttgaccgaagaagactatgacggtgttgtcgaaaacatgcgtctggcggatgggtcgctgtggccgatgccgatcaaccttgatgtgtcggaaaagtttgccgaagggctcgagatcgggcaggacattgcgctgcgcgatcaggaaggcgtgattttggcggtgatgacggttaccgaccgttgggttccaaacaaggcccgcgaggcagagaaagtctttggcgcggatgacagcgcgcatccggcggtgaactatctgcacaacaccgcgggcaacgtctatctgggcggtcctgtgactggcatccagcagcccgtccactatgatttcaaggcgcgtcgcgacacgccgaacgagctgcgtgcctatttccgcaagatgggctggcgcaaggttgtggccttccagacccgcaacccgctgcaccgcgcgcaccaggaactgaccttccgcgccgcgcgtgaagcgcaggcgaacctgttgatccaccccgttgtcggcctgaccaagcccggcgatgtggaccactttacccgcgtgcgctgctacgaggccgtgctcaacaaatatcccgccgccaccaccgcgatgagcctgctgaaccttgccatgcgcatggctggcccccgcgaggccgtgtggcacggtctgatccgcaagaaccacggctgcacccatttcatcgtgggccgcgaccatgcgggccccggcaagaactctgccggtgaggatttctatggtccctatgacgcgcaggatctgttccgcgctcatgaggaagaaatgggcatcgaaatggtagacttcaaacatatggtttgggtggccgagcgcgcgcaatacgaggcgattgacgagatcgaagacaaggatgacatcaccatcctcaacatctcgggcaccgagttgcgccgccgtctgcaggaagggctggaaatccccgaatggttctccttccccgaggtggttgaagagctgcgccgcaccaagccgccgcgcaacaagcagggctttaccgtcttcttcaccggtttctccggctcggggaaatcgacaatcgccaatgctttgatggtcaaactgatggagatgggcggccgtcccgtcacgctgctggatggcgatatcgtccgcaagaacctgtcgtcggaactgggctttagcaaagagcaccgcgatctgaacatccgccgcatcggctatgtcgcgtccgagatcaccaagaacggcggcatcgccatctgtgcgccgattgcgccttacgccaccacccgccgcgcggtgcgcgaagacgtggagagctttggtgccttcgtcgaggtccacgtcgccacctccatcgaggaatgcgaacgccgcgaccgcaaggggctgtacaagctggcgcgtgagggtaagatcaaggaattcacagggatctcagacccctatgacgttcccgaaacccccgaactgcgcgttgagacagaaaatgtcgacgtcgacaattgcgccgatcaggtgctgctcaagctggaaagcatggggctgattaaggggtaa

SEQ ID NO: 25949 - protein, 570 aa, Sulfitobacter sp. EE-36
MQTPNLAPIPELYVSYDSAQKLKVEAGDLVSHDLTPRQICDLELLMNGGFNPLKGFLTEEDYDGVVENMRLADGSLWPMPINLDVSEKFAEGLEIGQDIALRDQEGVILAVMTVTDRWVPNKAREAEKVFGADDSAHPAVNYLHNTAGNVYLGGPVTGIQQPVHYDFKARRDTPNELRAYFRKMGWRKVVAFQTRNPLHRAHQELTFRAAREAQANLLIHPVVGLTKPGDVDHFTRVRCYEAVLNKYPAATTAMSLLNLAMRMAGPREAVWHGLIRKNHGCTHFIVGRDHAGPGKNSAGEDFYGPYDAQDLFRAHEEEMGIEMVDFKHMVWVAERAQYEAIDEIEDKDDITILNISGTELRRRLQEGLEIPEWFSFPEVVEELRRTKPPRNKQGFTVFFTGFSGSGKSTIANALMVKLMEMGGRPVTLLDGDIVRKNLSSELGFSKEHRDLNIRRIGYVASEITKNGGIAICAPIAPYATTRRAVREDVESFGAFVEVHVATSIEECERRDRKGLYKLAREGKIKEFTGISDPYDVPETPELRVETENVDVDNCADQVLLKLESMGLIKG

SEQ ID NO: 25950 - DNA, 1716 bp, Roseovarius nubinhibens ISM
  CDS (1)..(1716): transl_table=11
atgacgatttcgagcaatctcacccccgtacccgagctctatgtatcctatgacagcgcgcagaaacttaaggttgaggccgctgacctcgtcagctgggacctcacgccgcgccagatctgcgatctcgaactgctgatgaacggcgggttcaacccgctcaaaggcttcctgagccaagaagattacgacggcgtggtcgaaaacatgcgcctcgccgatggcacgctctggccgatgccgatcaccctcgacgtgtcggaagagtttgccgccaagctcgaagacggtcaggacatcgccctgcgcgaccaagaaggcgtgatcctcgccaccatgaccatcaccgacaattggacgcccaacaaggcgcgcgaggccgagcgcgtctttggcgccgatgacgatgcgcatccggcggtgaactatctgcacaacacggcgggcaaggtctatctcggcggcccggtgaccggcattcagccgccggtgcattacgatttccgcgctcgccgcgacaccccgaacgagctgcgcgcctatttccgcaagctgggctggcgcaaggtcgtggccttccagacccgcaacccgctgcaccgcgcgcatcaggaactgaccttccgcgccgcaaaagaggcacaggccaacctgctcatccatccggtcgtcggcatgaccaaaccgggcgatgtcgatcacttcacccgcgtgcgctgctatgaggcggtgctcgacaaatatccgggctcgaccaccacgatgagccttctgaacctcgccatgcgcatggccggcccgcgtgaggcggtttggcatgggctcatccgccgcaaccatggctgcacccatttcatcgtcggccgcgaccacgccggccccggcaagaacagccagggcgaggatttctacggcccctatgacgcgcaggacctcttccgcgaacatgaggccgagatcggcatcgaaatggtcgatttcaaacatatggtctatgtgcaggaacgcgcccagtacgagccgatggacgaaatcaccgacaaggacgacgtgaccgttctcaacatctccggcaccgagctgcgccgccgtctggccgaagggctcgagatcccggaatggttctcctttccggaagtggtccgcgagctgcgccgcacccgtccgccgcgcagccagcagggctttaccgtgttcttcaccgggttctccggctcgggcaaatcgacgatcgccaacgcgctcatggtcaagctgatggagatgggcgggcgtcccgtgacgctgctcgatggcgatatcgtgcgcaagaacctcagctccgagctgggcttttcgaaagagcaccgcgatctcaacatccgccgtatcggctatgtggcctccgagatcaccaagaacggcggtatcgcgatctgtgcgcccatcgcgccctatgcgaccacccgccgcgcggtgcgtgaggatgtcgaacagttcggcgccttcgtcgaggtccatgtcgccacctcgctcgaagaatgcgaacgccgcgaccgcaaggggctctacaagctggcgcgcgaaggcaagatcaaggaattcaccgggatttccgacccttacgatgtgcccgaaaaccccgagctgcgcgtcgagaccgagaatgtcgatgtcgacaactgcgcgcatcaggtcatcctgaagctcgaacagatgggccttatcgcgggctga

SEQ ID NO: 25951 - protein, 571 aa, Roseovarius nubinhibens ISM
MTISSNLTPVPELYVSYDSAQKLKVEAADLVSWDLTPRQICDLELLMNGGFNPLKGFLSQEDYDGVVENMRLADGTLWPMPITLDVSEEFAAKLEDGQDIALRDQEGVILATMTITDNWTPNKAREAERVFGADDDAHPAVNYLHNTAGKVYLGGPVTGIQPPVHYDFRARRDTPNELRAYFRKLGWRKVVAFQTRNPLHRAHQELTFRAAKEAQANLLIHPVVGMTKPGDVDHFTRVRCYEAVLDKYPGSTTTMSLLNLAMRMAGPREAVWHGLIRRNHGCTHFIVGRDHAGPGKNSQGEDFYGPYDAQDLFREHEAEIGIEMVDFKHMVYVQERAQYEPMDEITDKDDVTVLNISGTELRRRLAEGLEIPEWFSFPEVVRELRRTRPPRSQQGFTVFFTGFSGSGKSTIANALMVKLMEMGGRPVTLLDGDIVRKNLSSELGFSKEHRDLNIRRIGYVASEITKNGGIAICAPIAPYATTRRAVREDVEQFGAFVEVHVATSLEECERRDRKGLYKLAREGKIKEFTGISDPYDVPENPELRVETENVDVDNCAHQVILKLEQMGLIAG

SEQ ID NO: 25952 - DNA, 1716 bp, Oceanicola batsensis HTCC2597
  CDS (1)..(1716): transl_table=11
atgtccacgcccaatctcgcccccatccccgagcttttcgtctcatacgagtccgctcagaaacttaaaatcgaagccgcggacctcaccagctgggatctctccccgcgccagatctgcgatctcgaactgctcatgaacggcggcttcaacccgctcaaggggttcctgacggaagcggactataccagcgtggtcgagaacatgcgcctggcggacggctcgctctggccgatgccgatcacgctggacgtctccgaggccttcgccgacagcatcgagatcggacaggacatcgccctgcgcgaccaggagggcgtgatcctcggcaccatgaccgtcaccgaccgctggacgccggacaaggcgaaagaggccgagatggtcttcggcgccgatgacgatgcccacccggccgtgaactatctgcacaacaccgccggcaaggtgtatctcggcggcccgatcaccggcatccagcagccggttcactacgatttccgcgcccgacgcgacacgccgaacgagctgcgcgcctatttccgcaagctcggctggcgcaaggtcgtggccttccagacccgcaacccgctgcaccgtgcgcaccaggaactgacctttcgcgcggccaaggaagcccaggccaacctgctgatccacccggtcgtcggcatgaccaagccgggcgacgtcgatcacttcacccgcgtccgctgctacgaagccgtgctggacaaatatcccagctcgaccaccacgatgtcgcttctgcccctcgccatgcggatggccggcccgcgcgaagccgtctggcacggcctgatccgcaagaacttcggcgtgacccacttcatcgtgggccgcgatcacgccggtcccggttcgaactctcagggcgaggatttctacggcccctacgacgcgcaggagctcttcaagcagcacgaagaggaaatgggcatcacgatggtgccgttcaaacacatggtctatgtgcaggaacgggcgcaatacgaacccaacgacgagatcgcggacaaggatgacgtcaccatcctcaacatctcgggcacggaattgcgccgccgcctggccgaggggctggagatccccgactggttctcgttccccgaagtggtccgggagcttcgcaagacccggccgccgcgctcgaaacagggcttcaccgtgttcttcaccggcttctccggctcgggcaagtcgacgatcgccaatgcgctcatggtcaagctgatggagatgggcggccgccccgtgacgcttctagacggcgacatcgtccgcaagaacctgtcgtccgaactcgggttctccaaggaacaccgcgacctcaacatccggcgtatcggctatgtcgcctcggaaatcaccaagaacggcggcattgcgatctgcgcgccgatcgcgccctactcggcgacccgccgcgccgtgcgcgaggatatcgagcaatacggcgccttcctcgaggtccatgtcgccacgtcgctcgaggaatgcgaacgccgcgaccgcaagggcctctacaagctggcgcgcgagggcaagatcaaggaatttaccgggatctccgatccctacgacgtgccggaaaaccccgagctgcgcgtcgagaccgagaatgtcgatgtcgacaactgcgcgcatcaggtgatcctcaagctggaaagcctcggcctgatcgcggcgcactga

SEQ ID NO: 25953 - protein, 571 aa, Oceanicola batsensis HTCC2597
MSTPNLAPIPELFVSYESAQKLKIEAADLTSWDLSPRQICDLELLMNGGFNPLKGFLTEADYTSVVENMRLADGSLWPMPITLDVSEAFADSIEIGQDIALRDQEGVILGTMTVTDRWTPDKAKEAEMVFGADDDAHPAVNYLHNTAGKVYLGGPITGIQQPVHYDFRARRDTPNELRAYFRKLGWRKVVAFQTRNPLHRAHQELTFRAAKEAQANLLIHPVVGMTKPGDVDHFTRVRCYEAVLDKYPSSTTTMSLLPLAMRMAGPREAVWHGLIRKNFGVTHFIVGRDHAGPGSNSQGEDFYGPYDAQELFKQHEEEMGITMVPFKHMVYVQERAQYEPNDEIADKDDVTILNISGTELRRRLAEGLEIPDWFSFPEVVRELRKTRPPRSKQGFTVFFTGFSGSGKSTIANALMVKLMEMGGRPVTLLDGDIVRKNLSSELGFSKEHRDLNIRRIGYVASEITKNGGIAICAPIAPYSATRRAVREDIEQYGAFLEVHVATSLEECERRDRKGLYKLAREGKIKEFTGISDPYDVPENPELRVETENVDVDNCAHQVILKLESLGLIAAH

SEQ ID NO: 25954 - DNA, 654 bp, Prochlorococcus marinus str. MIT 9211
  CDS (1)..(654): transl_table=11
atgatcaaatttacaaatctcatgaataaagcttctgcaggaggagcaacctcaagatctaaaaatattgtttggcatgaagcctcggtaacccgtgccgacatttcccgacaaagatctcataaaagtgtaattctttggtttacaggcttgtcaggttctgggaaaagtactttggcaaatgcagtcaatgctgctttgtttaaaaaaggattttccacatatgttttagatggtgacaatgttaggcatggactatgtaaagatttgggcttttctgatgtagatagagaggagaatattagacgtatcagtgaagttgcgaaattatttcttgatgcaggaattattgttttaacggcatttgtctctccattccgatctgatagaaatgccgcgaggcaacttgtcgacaaaggagattttattgaagttttttgttcagctgatttaaaaacttgcgaagagcgagatacaaaaggactttatgcaaaggctcgtaaaggcgaaatcaaagattttacagggatttcaagtccctatgaggagcctgattctcctgaattaaacatagaaactggttctagggatttagataaatgtgttcaagatgttctttgcaagttaagtgaactaaatatcattgaggaataa

SEQ ID NO: 25955 - protein, 217 aa, Prochlorococcus marinus str. MIT 9211
MIKFTNLMNKASAGGATSRSKNIVWHEASVTRADISRQRSHKSVILWFTGLSGSGKSTLANAVNAALFKKGFSTYVLDGDNVRHGLCKDLGFSDVDREENIRRISEVAKLFLDAGIIVLTAFVSPFRSDRNAARQLVDKGDFIEVFCSADLKTCEERDTKGLYAKARKGEIKDFTGISSPYEEPDSPELNIETGSRDLDKCVQDVLCKLSELNIIEE

SEQ ID NO: 25956 - DNA, 633 bp, Synechococcus sp. RS9917
  CDS (1)..(633): transl_table=11
atgaccgctgcccgcgccgagacccccaaggccaccaacatcgtgtggcatcacgcctcggtcgaccgggccgcccgggctgaacagcgcggccatcgcagcgccatcctctggttcaccggcctgagcggtgccggcaagagcaccctggccaatgcggtgaatcaggccctgttcgtgcgggggctggccacctacgtgctcgatggtgacaacatccgccatggtctctgcaaagacctgggcttctctgatgcagaccgggaggagaacattcgtcgcatcggtgaagtggcgaagctgttcctcgatgccggcgtggtggtgctcaccgccttcgtgtctcccttccgcgccgatcgcgaccgggcccgccagctcgtgagcgctggcgatttcatcgagatccactgcgccgccgacctggaaacctgcgagcagcgcgacaccaaggggttgtatgccaaggcccgggccggggagatcaaggacttcaccggcatttccagcccctatgaggccccggaacagcccgagctgaaagtcgacacgggcagcagcgatctggaggcctgcgtccatcaggtggtgcatcacctgattcagcagggcatcattccggcgcagtcctga

SEQ ID NO: 25957 - protein, 210 aa, Synechococcus sp. RS9917
MTAARAETPKATNIVWHHASVDRAARAEQRGHRSAILWFTGLSGAGKSTLANAVNQALFVRGLATYVLDGDNIRHGLCKDLGFSDADREENIRRIGEVAKLFLDAGVVVLTAFVSPFRADRDRARQLVSAGDFIEIHCAADLETCEQRDTKGLYAKARAGEIKDFTGISSPYEAPEQPELKVDTGSSDLEACVHQVVHHLIQQGIIPAQS

SEQ ID NO: 25958 - DNA, 624 bp, Synechococcus sp. WH 5701
  CDS (1)..(624): transl_table=11
atgaccagctcccccgccgacagcaaagccaccaacatcgtctggcatgaggcctcggtggaccgcgactcccgcgccagccagcggggccaccgcagtgccatcctctggttcacggggctctcgggcgctggcaaaagcaccctggccaacgccgtgaacgtggagctgttccagcggggactggccacctacctgctcgatggcgacaacgtgcgccatggcctctgcaaggacctggggttctccgatgccgaccgggaggagaacatccgtcgcatcggcgaggtggccaagctcttcctcgacgccggcgtgatcaccctcaccgccttcgtgtcgcccttccgggccgaccgcgatcgggcccgggccctggtggagcgtggcgatttcatcgagatccactgctccgccgacctggcggtctgcgagcagcgtgatcccaaggggctctacgccaaggcccgtgccggcgtgatcaaggagttcaccggcatctccagtccctatgaagctccggagtcccctgaacttctggtcgacaccagcggcaggctggaggagaacgtggcccaggtgatcagctacctggagtgtcaggggttgatcgcggcgggctga

SEQ ID NO: 25959 - protein, 207 aa, Synechococcus sp. WH 5701
MTSSPADSKATNIVWHEASVDRDSRASQRGHRSAILWFTGLSGAGKSTLANAVNVELFQRGLATYLLDGDNVRHGLCKDLGFSDADREENIRRIGEVAKLFLDAGVITLTAFVSPFRADRDRARALVERGDFIEIHCSADLAVCEQRDPKGLYAKARAGVIKEFTGISSPYEAPESPELLVDTSGRLEENVAQVISYLECQGLIAAG

SEQ ID NO: 25960 - DNA, 648 bp, Synechococcus sp. WH 7805
  CDS (1)..(648): transl_table=11
atgccctcaacacccacctacggtcaactcaccaaccaaggcgcttccaccaacatcgcctggcaccacgcctctgttgaccgcaacgcccgagctgaacagcgcggacatcgcagtgccatcctctggttcacgggattgagcggagccgggaaaagcaccttggccaatgcggtgaatcaggccctgtttgaacgcgggttagccacctatgtgctggatggagacaacatccgacatggcctctgcaaagacctgggcttctcagacgcagaccgcgaagaaaacatccgccgcatcggtgaagtagccaagctcttcttggattctggcgtgattgttctcactgcttttgtctcccccttccgagctgatcgcgataaggccagagccttggtggaggacggtgactttctcgagatcttctgctctgctgacctaagcgtctgcgaagaacgcgacaccaagggcctttacgccaaggcaagagcaggcgaaatcaaagagttcacgggaatttccagcccatacgaagctccttcagatcccgaactctccgtcgacaccggagccggtgatctcgagagctgcgtgaatgaggtcgtcgacgcattggtcagccagggaatcatccccgctcaggcctga

SEQ ID NO: 25961 - protein, 215 aa, Synechococcus sp. WH 7805
MPSTPTYGQLTNQGASTNIAWHHASVDRNARAEQRGHRSAILWFTGLSGAGKSTLANAVNQALFERGLATYVLDGDNIRHGLCKDLGFSDADREENIRRIGEVAKLFLDSGVIVLTAFVSPFRADRDKARALVEDGDFLEIFCSADLSVCEERDTKGLYAKARAGEIKEFTGISSPYEAPSDPELSVDTGAGDLESCVNEVVDALVSQGIIPAQA

SEQ ID NO: 25962 - DNA, 597 bp, Pseudoalteromonas tunicata D2
  CDS (1)..(597): transl_table=11
atggataacaatattgtatggcagcattatgctgtttcgaaacaagaccgcagtgaacaaaagcaacatcgcccttgcatcatttggtttactggcttttctggctcaggcaaaagcactgttgcaggtgcccttgagcatgcgctacatcaagccggtgtgcatacctatttgcttgatggtgacaatgtgcgccacggtttatgtaaagatttagcttttagcgatagcgaccgccaagaaaatattcgtcgcgtcggtgaagttgcaaaactgatgctcgatgctggtttagtggtgctaactgcttttatctctccttttgcggcagaacgcaaaatggtgcgggatctagtggctgagggtgagtttatagaagtatttttagatacgcctttagctgtttgtgagcagcgcgatcctaaagggctttatgtcaaagcgcgtgcaggtgaaattaaacatttcaccggtatagattcagaataccaaataccggcaaatcctgaaattgtattagataccagtaaaaatcaattaagtgactcagttgctcagttagttagttatttaaaacaacaacacattattggataa

SEQ ID NO: 25963 - protein, 198 aa, Pseudoalteromonas tunicata D2
MDNNIVWQHYAVSKQDRSEQKQHRPCIIWFTGFSGSGKSTVAGALEHALHQAGVHTYLLDGDNVRHGLCKDLAFSDSDRQENIRRVGEVAKLMLDAGLVVLTAFISPFAAERKMVRDLVAEGEFIEVFLDTPLAVCEQRDPKGLYVKARAGEIKHFTGIDSEYQIPANPEIVLDTSKNQLSDSVAQLVSYLKQQHIIG

SEQ ID NO: 25964 - DNA, 624 bp, Photobacterium sp. SKA34
  CDS (1)..(624): transl_table=11
atgacaatcacgccacaagcgcatgatgataacgagaatattgtttggcatcgtcataccgtaaccaaagaattacgtgcaacacaaaagaatcagaaagcgagtgtgttgtggtttactggcctaagcggagcaggaaaatcaacagtagctggcgcattagaaaataaactggctgaaattggttaccacacctatttacttgatggtgataatgttcgccatggtttatgtcgtgatcttggtttctcagcagaagatcgccgtgaaaatattcgacgtattggtgaagtcgcgacattaatggctgatgctggactaatagtacttagtgcttttatttcaccacatcgagaagagcgtcaattagtgagagatttactgcctgaaggtgagtttattgaagtatttgttgatactcctcttgctgagtgtgaaaaacgtgatccgaaaggcttgtataaaaaagcgcgagcaggtgaaatcaaacaatttacaggtattgattctgaataccaaccgccgttatcgcctgagctccatttagcggcaggtagcaatgcaatagataagctggtggcacaatgtgttgaacatttaaagtcacaacagatcatcagctaa

SEQ ID NO: 25965 - protein, 207 aa, Photobacterium sp. SKA34
MTITPQAHDDNENIVWHRHTVTKELRATQKNQKASVLWFTGLSGAGKSTVAGALENKLAEIGYHTYLLDGDNVRHGLCRDLGFSAEDRRENIRRIGEVATLMADAGLIVLSAFISPHREERQLVRDLLPEGEFIEVFVDTPLAECEKRDPKGLYKKARAGEIKQFTGIDSEYQPPLSPELHLAAGSNAIDKLVAQCVEHLKSQQIIS

SEQ ID NO: 25966 - DNA, 603 bp, delta proteobacterium MLMS-1
  CDS (1)..(603): transl_table=11
atgacctgccccaacaccgtcccttatcggggtaagataacccgcccattacgggagcaactgcttaagcagcggagcatggtgctgtggtttaccggcctgtcgggctcggggaaatctaccatcgcccacgcggtggaggagagactgcaccaaatgggccgcttgacctatgttttcgacggcgacaacgtccgccagggactctgcagcgacctcagcttctccccggaaggccgggcggaaaacctgcggcggatttcggaaatggtcaaactcttcctcgatgccggcctgatctgccttaccgcctttatctcgcccctgaaagccgaccgccgccactgccgggagctgatcgactgcggccgcttttttgaaatttacgtcaaatgttccctggaagagtgcgaacggcgggatgtgaaggggctgtacaaaatggcccgggaagggaagatcaaaaactacaccggcatttccgctccctatgaagcgccggagcagcccgatctcgtcctggaaaccgaccggcataccttggatgagtgtgtcaaccaggtggtcgggtttgtaaccgccaagtcccaaactgacaaataa

SEQ ID NO: 25967 - protein, 200 aa, delta proteobacterium MLMS-1
MTCPNTVPYRGKITRPLREQLLKQRSMVLWFTGLSGSGKSTIAHAVEERLHQMGRLTYVFDGDNVRQGLCSDLSFSPEGRAENLRRISEMVKLFLDAGLICLTAFISPLKADRRHCRELIDCGRFFEIYVKCSLEECERRDVKGLYKMAREGKIKNYTGISAPYEAPEQPDLVLETDRHTLDECVNQVVGFVTAKSQTDK

SEQ ID NO: 25968 - DNA, 648 bp, Synechococcus sp. RS9916
  CDS (1)..(648): transl_table=11
atgaccgcctcccccacttacggccagctcaccaaccagggcgcttccaccaacatcgcctggcaccacgcctcagtcgatcgggctgcccgggcggatcagcgcggtcatcgcagcgccatcctctggttcaccggcctcagcggcgccggcaaaagcaccctggccaatgccgtaaaccaggccttgtttgagcgaggactggccacctacgtgctggatggcgacaacgttcgccacggcctctgcaaagacctggggttttccgacgctgaccgggaggaaaacattcgccgcatcggcgaagtggcgaagctgttcctcgactccggtgtgatcgtgcttaccgccttcgtctctcccttccgtgccgaccgcgacaaagctcgtgccctggtggacgacggcgacttcatcgaagtgttctgctctgccgatctgggggtctgtgaggaacgcgacaccaaagggctctatgccaaggcgcgggccggcgaaatcaaggagttcaccggcatctccagcccttatgaagcccccgaatcccccgagctgtcggtcgataccggtgcggcggctctggacgcttgcgttgaacaggtggtgaacgccctgatcgaacgcggcgtcattccggctcagtcctga

SEQ ID NO: 25969 - protein, 215 aa, Synechococcus sp. RS9916
MTASPTYGQLTNQGASTNIAWHHASVDRAARADQRGHRSAILWFTGLSGAGKSTLANAVNQALFERGLATYVLDGDNVRHGLCKDLGFSDADREENIRRIGEVAKLFLDSGVIVLTAFVSPFRADRDKARALVDDGDFIEVFCSADLGVCEERDTKGLYAKARAGEIKEFTGISSPYEAPESPELSVDTGAAALDACVEQVVNALIERGVIPAQS

SEQ ID NO: 25970 - DNA, 618 bp, Vibrio sp. Ex25
  CDS (1)..(618): transl_table=11
atgactgccgaaacgacggtaaaagatgaaaacattgtttggcaccagcattcggtcgataaacagtttcgtgctgaattaaagaagcaaaaacctgctgtattgtggtttaccggcttatctggagcgggtaaatcaaccgtagcgggggcgttggaaaatcgccttgcagcattgggttaccacacctatttattggatggtgacaatgtgcgacatggcttgtgtagcgatttgggcttttctgaacaggatcgccgcgagaatattcgtcgtattggtgaactggctaaactgatggcggatgcaggcttaattgtgttgtcggcgttcatttcaccgcatcgcgcagagcgacagctagtgcgcgacttattgccagaaggtgagtttatcgaagtgttcgtcaatgcatctctagaagtctgcgaaggtcgcgatcctaaaggtttgtaccgcaaagcacgtgcgggagagattcctaatttcactggtattgattcggaatatcaagcgccagagaaccctgaaatcgatttgcccgcgggagaaaagagtgtcgatgagctggtggacttgtgcttggaagcgcttaagtcgcgtgcagtgatccgataa

SEQ ID NO: 25971 - protein, 205 aa, Vibrio sp. Ex25
MTAETTVKDENIVWHQHSVDKQFRAELKKQKPAVLWFTGLSGAGKSTVAGALENRLAALGYHTYLLDGDNVRHGLCSDLGFSEQDRRENIRRIGELAKLMADAGLIVLSAFISPHRAERQLVRDLLPEGEFIEVFVNASLEVCEGRDPKGLYRKARAGEIPNFTGIDSEYQAPENPEIDLPAGEKSVDELVDLCLEALKSRAVIR

SEQ ID NO: 25972 - DNA, 597 bp, Alteromonadales bacterium TW-7
  CDS (1)..(597): transl_table=11
atggatgaaaatatagtttggcataactacgcaacgactaaagcacaacgtagtgagcaaaaaaaacataagccggctattttatggtttaccggtttttcaggctccggtaaaagcaccgtagccaacgcactcgaagcggcacttaatcagcaaggtgtacacacttacctgcttgatggcgacaacgtacgccacggtttatgtaaagacctaggctttagcgatgaagaccgcatagaaaacattcgccgtgtaggcgaaaccgcaaaactaatgaccgacgcaggcttgttagtacttactgcgtttatatctccctttagagctgaacgcaacatggtgcgcaatttagtagacgacggagagtttattgaagtatttatagatactccgcttgatgtatgcgaaagccgcgatccaaaagggctatacaaaaaagcacgcgcaggagagataaaacactttactggcatcgactcaaactacgaagtacccacaaagcctgaaataattttagatacaagtaaaaacaccctagaccaatcggttgcccaactgataacgtatctaaaacaaacgcatataataggttaa

SEQ ID NO: 25973 - protein, 198 aa, Alteromonadales bacterium TW-7
MDENIVWHNYATTKAQRSEQKKHKPAILWFTGFSGSGKSTVANALEAALNQQGVHTYLLDGDNVRHGLCKDLGFSDEDRIENIRRVGETAKLMTDAGLLVLTAFISPFRAERNMVRNLVDDGEFIEVFIDTPLDVCESRDPKGLYKKARAGEIKHFTGIDSNYEVPTKPEIILDTSKNTLDQSVAQLITYLKQTHIIG

SEQ ID NO: 25974 - DNA, 618 bp, marine gamma proteobacterium HTCC2143
  CDS (1)..(618): transl_table=11
atgactgaacaaaaagcaaccaatgttcactggcacgatggtgaagtgacccgtgaagatcggtccaaaattttaagtcaaaaaggagctactttgtggttcacgggtctgtcgggcagtggtaaaagtacggtagcggtggcgcttgagcaggcgttgacggctaaaggtaaactgacttacaggcttgatggcgataacattcggttaggtattaacaagaacctgggttttagtgccgaagaccgcactgaaaacattcggcgcattggcgaaatatcaaaattgtttgtcgatgtcggtgtaataacgctgtccagttttgtcagcccttatcgggcggatagagatctggtgcgtgagctgcataagcaagctggaatggactttattgaagtctacgttgatgtacctctcgacgtagcggaagatcgcgatccaaaagggctgtacaaaaaggcaagagcgggcgaaattccgaacttcaccggtatttctgacccctatgaagaaccgctaaatgctgaggtggttctcaatagtcatgaaatgacgttggaacaagaagttgatattttactgcagattatgaccgatcgcggattgctggccgcgtaa

SEQ ID NO: 25975 - protein, 205 aa, marine gamma proteobacterium HTCC2143
MTEQKATNVHWHDGEVTREDRSKILSQKGATLWFTGLSGSGKSTVAVALEQALTAKGKLTYRLDGDNIRLGINKNLGFSAEDRTENIRRIGEISKLFVDVGVITLSSFVSPYRADRDLVRELHKQAGMDFIEVYVDVPLDVAEDRDPKGLYKKARAGEIPNFTGISDPYEEPLNAEVVLNSHEMTLEQEVDILLQIMTDRGLLAA

SEQ ID NO: 25976 - DNA, 618 bp, marine gamma proteobacterium HTCC2080
  CDS (1)..(618): transl_table=11
atgactgaacaaaaagccaccaacgttcactggcatgatggtgaaattacccgcgctgaccgcgatcgcatgatgaagcaacaaggcgctaccctttggttcactggattgtccggcagtggcaaaagtactatcgctgtcgcattggaagccaagttgtttgagcgtggccacctgagctatcgccttgatggcgacaacatccgctttggcattaataagaatcttgggttttccgcggaggatcgcactgaaaatatccggcgtattggtgagattgcaaagttatttgtagattccagcgtcatcgcactaagcagctttattagcccctatcgcgcggatcgcgaccaggtgcgtgcactccacgttgaatctgggatgatgtttattgaagtgtttgtagattgcgccctggaagaagccgaaaaacgtgaccctaaaggtctttataaaaaagctcgtgccggagaaatcaaaaactttaccggcattgacgatccttacgaagcccccgaatcccctgagatccatctgcacactgatcagatgagccttgaggctgaggttgagctgctgattgactacctagaacaacgcggcgttttgaccgcttaa

SEQ ID NO: 25977 - protein, 205 aa, marine gamma proteobacterium HTCC2080
MTEQKATNVHWHDGEITRADRDRMMKQQGATLWFTGLSGSGKSTIAVALEAKLFERGHLSYRLDGDNIRFGINKNLGFSAEDRTENIRRIGEIAKLFVDSSVIALSSFISPYRADRDQVRALHVESGMMFIEVFVDCALEEAEKRDPKGLYKKARAGEIKNFTGIDDPYEAPESPEIHLHTDQMSLEAEVELLIDYLEQRGVLTA

SEQ ID NO: 25978 - DNA, 615 bp, Candidatus Desulfococcus oleovorans Hxd3
  CDS (1)..(615): transl_table=11
atgacaaaccacgaaaaagccaatatttactggcaccagggtcagattcgaaaggccgaccgggaacggttgagcggtcatcgcggcgctgtcctctggctcaccgggttaccggcttccggcaagtcgacggtggccgtggcactggagaaaaaactgtttgaccgggggtgccgcacctacattctggacggtgacaacatacgccacggtctcaacagggacctgggtttttcgccggaggaccggacggaaaacatccgccggattggagaggtggcccgcctgttctgcgactgtggcgtccttaccatggtggcctttatctctccgtaccaatcggaccgtcaggcggcacgggaggccgcagaggaacccggtacgttcatagaagtgtttgtcgattgccccctggccacctgtgaacaacgggatcccaagggcatgtaccggagagcccgtgctggtgagatacaggggtttacggggatttccgcaccttatgaggttcctgaaaaacctgaaatttacttggataccgggataaacgacctgagcgcctgcgtggacacggtgattcgatatcttgagatgaacgggttcatcccggcctga

SEQ ID NO: 25979 - protein, 204 aa, Candidatus Desulfococcus oleovorans Hxd3
MTNHEKANIYWHQGQIRKADRERLSGHRGAVLWLTGLPASGKSTVAVALEKKLFDRGCRTYILDGDNIRHGLNRDLGFSPEDRTENIRRIGEVARLFCDCGVLTMVAFISPYQSDRQAAREAAEEPGTFIEVFVDCPLATCEQRDPKGMYRRARAGEIQGFTGISAPYEVPEKPEIYLDTGINDLSACVDTVIRYLEMNGFIPA

SEQ ID NO: 25980 - DNA, 600 bp, Marinobacter sp. ELB17
  CDS (1)..(600): transl_table=11
ttggcagacgatattgtttggcatgatcacaaagttgtccgttctcagcgcgctgagaacaagaaccagaaaccttgcctgctgtggtttacgggcctaagtggttccggaaaatccaccatcgccaatgcgctggatgtggcattgcataaccggggttaccacacgttcctgctggatggcgataatgttcgccacggcttgtgcagagacttgggtttttccgatgaggatcgggtggaaaacatccgccgcattggtgaagtgagcaagctgtttgctgatgcagggttgattgtattgagtgcgttcatctcacccttcaacagtgatcgacgcctggtgcgtaagcttttcccggcgggtgaatttattgaagtttacatggatacacctctagcgacgtgtgaagagcgtgaccccaaagggctctatcaaaaagcacgcgccggtgagatcagtgatttcacaggtatcgactcgccgtatgaagcgccagcccacccggaaatcagcctagatacatccagctcctcagtggatgactgtgtggactcgttgatcaattatcttctcgagcggaagttgatcgtagggtaa

SEQ ID NO: 25981 - protein, 199 aa, Marinobacter sp. ELB17
MADDIVWHDHKVVRSQRAENKNQKPCLLWFTGLSGSGKSTIANALDVALHNRGYHTFLLDGDNVRHGLCRDLGFSDEDRVENIRRIGEVSKLFADAGLIVLSAFISPFNSDRRLVRKLFPAGEFIEVYMDTPLATCEERDPKGLYQKARAGEISDFTGIDSPYEAPAHPEISLDTSSSSVDDCVDSLINYLLERKLIVG

SEQ ID NO: 25982 - DNA, 1920 bp, Erythrobacter sp. SD-21
  CDS (1)..(1920): transl_table=11
atgcctgagaacgcaaacgatcccatttatcagaccgacgccctcatcgccgaggacatcgacgcctatctcgaaaagcaccagcacaagaccatgctgcgctttatcacctgcggcagtgtggatgatggcaagtcgacccttatcggtcgcctgctttacgattccaagatgatcttcgaagaccagcttgccgcgctcgaaagcgacagcaagcgtgttggcacccaaggccaagagatcgacttcgcgctgctggtcgacggtcttgccgccgagcgcgagcagggcatcaccatcgacgtcgcctaccgctttttcgcgaccgagaaccgcaagttcatcgtcgccgactgcccgggccacgaacagtacacgcgtaacatggtaaccggcgcttcgaccgccgaccttgcctgcatcctgatcgatgcgcgcaagggcgtgctcgtgcagaccaagcgccacagcttcctgtgccatcagctcggcatcaagaacctcgtgcttgccgttaacaagatggacctgatcgattacgaccagaaaaagtatgacgcgatcatcgctgactacgcgcattttgctgaaagcatcgggatcgagagcttcaccgcgattccgatctcgggtcttgcgggcgataacatcacttcgccctcggacaacaccggctggtatgatggccctacgctgatggagcatctcgaagcggtcgaagtgcgctcggacgcaaaccttgcccacccgttccgcatgccggtgcagtgggtgaaccgcccgaacctcgacttccgcggtttctccggcctcatttcttcgggcagcgtgaagccgggcgacaccgtccgctcgctgccttcgggcaagaccagcacggtcaagtcggtcgtcaccatgggcggcgatctcgaagaaggcgtggccggccagtcggtcaccatcacgctcgacgacgagatcgattgctcgcgcggtgacgtgctggcggcagccgacagcccgcccgaagtggccgaccagttcgaaagcacgatcgtgtggatggacgaggacccgctggtcgtcggccgtgcttactggatgaagctcggcacgcagatggtcagcgtgaccgtcgccgagcccaagttcgagatcgacgtcaacacgatggagcatcttgcagccaagacgctgcatctgaaccagatcggcgttgcggaaatcaccaccgacaagcggatcgtgttcgatccctacacggaaaaccgcgcgctcggcggcttcatcctgatcgacaagatcaccaaccacacggtcggtgccggtatgctgcacttcagcctgcgccgcgcgcagaacgtgcactggcaggcggtggacatcacgcgtgacgatcacgccgcgatgaaaaaccagaaaccgcgcgtgttgtggttcaccggcctttcgggttctggcaagtcaaccatcgccaacgaggtcgagaaaaagctggcgatcatgaaccgccacaccttcctgctcgacggcgacaatgtccgccacggcctcaacaaggacctgggcttcaccgagacggaccggatcgagaacatccgccgcatcggcgaagtcgccaagctgatgaccgacgccggcctcatcgtgctgaccgccttcatttcgcccttccgcgccgaccgccagctggtccgcgacatgatgggcgagggcgagttcatcgaaatccacgtcgacacgccgctcgaagtggcggaacagcgcgacgtgaagggcctctacaagaaggcacgcgccggggagctgaagaacttcaccggtatcgacagcccctatgaagagcccgaaagcccggaaatccgcgtaaacacggtggcgatgagccctgaagaagccgcggactacatcatcaagcagatcctgccgctcaagtaa

SEQ ID NO: 25983 - protein, 639 aa, Erythrobacter sp. SD-21
MPENANDPIYQTDALIAEDIDAYLEKHQHKTMLRFITCGSVDDGKSTLIGRLLYDSKMIFEDQLAALESDSKRVGTQGQEIDFALLVDGLAAEREQGITIDVAYRFFATENRKFIVADCPGHEQYTRNMVTGASTADLACILIDARKGVLVQTKRHSFLCHQLGIKNLVLAVNKMDLIDYDQKKYDAIIADYAHFAESIGIESFTAIPISGLAGDNITSPSDNTGWYDGPTLMEHLEAVEVRSDANLAHPFRMPVQWVNRPNLDFRGFSGLISSGSVKPGDTVRSLPSGKTSTVKSVVTMGGDLEEGVAGQSVTITLDDEIDCSRGDVLAAADSPPEVADQFESTIVWMDEDPLVVGRAYWMKLGTQMVSVTVAEPKFEIDVNTMEHLAAKTLHLNQIGVAEITTDKRIVFDPYTENRALGGFILIDKITNHTVGAGMLHFSLRRAQNVHWQAVDITRDDHAAMKNQKPRVLWFTGLSGSGKSTIANEVEKKLAIMNRHTFLLDGDNVRHGLNKDLGFTETDRIENIRRIGEVAKLMTDAGLIVLTAFISPFRADRQLVRDMMGEGEFIEIHVDTPLEVAEQRDVKGLYKKARAGELKNFTGIDSPYEEPESPEIRVNTVAMSPEEAADYIIKQILPLK

SEQ ID NO: 25984 - DNA, 597 bp, unidentified eubacterium SCB49
  CDS (1)..(597): transl_table=11
atgcaagaaaacgtaatagcacatacatttaatgtaaccagagcgcaacgcagtgcgatgaaaaatcagcagccattgttactttggtttacaggtctatcaggttctggtaaatctacgattgcaaatgctttagaaaaagcactgtttgaaaaaggaatacatacttattcacttgatggggataatgtgcgtttaggtttaaatagtaatttgtcgttttctgcagaggatagaacagaaaacattaggcgtattgcagaagtttcaaatttaatgatagatgcggggctagtagtgattgcatcttttgtttccccttataaaaaagatagagcagcagttaaagagatagttggtgattttagatttgttgaagtttttgttaatacttcggtagaagaatgtgaaaaaagggatgtaaaaggactttataaaaaggcaagagcaggagagataaaaaattttactggtattaatgccccttatgaggcaccagtaaacacagatatagaaatagatactttagagacttcagttgaagctgcagttgatattataatacacaagattgaacataaaatagcacaccaatga

SEQ ID NO: 25985 - protein, 198 aa, unidentified eubacterium SCB49
MQENVIAHTFNVTRAQRSAMKNQQPLLLWFTGLSGSGKSTIANALEKALFEKGIHTYSLDGDNVRLGLNSNLSFSAEDRTENIRRIAEVSNLMIDAGLVVIASFVSPYKKDRAAVKEIVGDFRFVEVFVNTSVEECEKRDVKGLYKKARAGEIKNFTGINAPYEAPVNTDIEIDTLETSVEAAVDIIIHKIEHKIAHQ

SEQ ID NO: 25986 - DNA, 636 bp, Moritella sp. PE36
  CDS (1)..(636): transl_table=11
atgacaacaattatcaatgaaagcaatgctgatacaacagcaactgaaaatatcgtgtggcataagcatactgtagataaagccgcaagagctgcgaacaaacaacagcaaccttgcgtgttatggtttactggcttaagtggctcgggtaaatcgacagtggcgggtgcattagagaatgaattacacaaagcgggttatcatacctatttgttagacggcgataatgtgcgttttggtttatgtggtgatctgggctttagcgatgatgatcgtaaagaaaatattcgcagagtgggagaagtggcaaagttaatggttgatgcgggtgttattgtattaacagcctttatttctccacaccgtcaagagcgtgaactcgttcgtgcattattgggtgacagtgagtttatcgaaatacatgttgatgccgatcttgcgatttgtgagcagcgtgatcctaaggggctttataagaaagcgcgagcaggtgagatcaagaattttaccggtattgattctgtttatgaagcgccaactaaacctgaattgtatctagataatggcaataacccagtttcaagctcagttcaacagatcatgacttatctttcacagcaaggtcatattaagtaa

SEQ ID NO: 25987 - protein, 211 aa, Moritella sp. PE36
MTTIINESNADTTATENIVWHKHTVDKAARAANKQQQPCVLWFTGLSGSGKSTVAGALENELHKAGYHTYLLDGDNVRFGLCGDLGFSDDDRKENIRRVGEVAKLMVDAGVIVLTAFISPHRQERELVRALLGDSEFIEIHVDADLAICEQRDPKGLYKKARAGEIKNFTGIDSVYEAPTKPELYLDNGNNPVSSSVQQIMTYLSQQGHIK

SEQ ID NO: 25988 - DNA, 1836 bp, Molgula tectiformis
  CDS (1)..(1836)
atgtctgcagaagcatcgatgccgcctcgatcacaaaacattgtgtatcaacagcatcgcgtgtcgcgcgccaaacgtggacaggtcatgggtcaaaagggaggcttcagaggttgcactatctggttcactggactctccggagcaggaaaaaccacagttgcgatgaagttggaagagtttttgtgctcgaaaggaatcccagcgtacagtttggacggagataatatccgacatgggttaaataaggatctaggtttttctcccgatgacagagaagaaaacattcgtcgtatcggagaagttgcgaagttattcgcagacgcgggagtagtgtgtcttgtatccttcatttcaccgtacagaaaggatcgtgacaatgctcgaaaaactcacgagggaagtgatttggaatttgttgaagtttacgttgacaccccgatcgaagaatgtgaaaaaagagacgtgaaaggactttacaaaaaagcacggcaagggattattaaaggtttcactggtattgactcgccatatgaggcgcccgagaggccggaagttaccgtcaaaaccacaaagatgcccgtcgagaaatgtatgctggaggtagtctctgtattacaagaaaagggcattattccctcaaccacccacgctacagttaacgaactatttgtcccaaaagatcaagtcgaagaatataaaacaaaagctgagaatttaccgacacttaatattaccaagcttgatctacaatggctgcaagtactgtcagaaggatgggccactccgcttagtggtttcatgagggagcgcgaattcctacaatcccaacattttggttgtctgctagactctggtatcactaaccaatcagtgcccatcgttctacctgtttccaatgacgacaaagaaagattagcagaagcgagtgagtttgtcctggcatacgaaggcaagaagtacgccgtcatgcagaatccagagttctacgaacacagagtggaagagagatgctccagacaatggggaatgagcaataagggacatcctcacatcaagatgatcgcggaatcaggcgaatggttgtgtgggggagatatcaaagctatcgagaggatcacatggggagatggtctcgataattatagattgacgccattggagctccgagagaagttccaacagatgggggcagacgcagtgtttgctttccaactccgaaacccagttcataacggccacgcacttctcatgcaggacacaaaacgcacactcgtcgaacgaggtttcaagaaccctgtcctgctgttgcatcctctcggtggttggaccaagagtgatgatgtcccgttggatgttaggatgaagcagcacgcagctgtgctcgaagaaggagtcttggatccaaaatccaccgtcgtggcaatcttcccgagtccaatgatgtacgctggtccaacggaagtgcaatggcatgccaaagcacgaatggcaaccggggcaaacttttatattgttgggcgtgacccggctggtatgccacaccctgaagagaagagagatttgtacgaacatacacacggcaaaaaggtattaacgatggcgccagggctaacacaattggagatcgtgccattcaaggtcgccgcttataacaaggtcaaaggtgccatgaccttctatgaccctgaacatcacgcagattttgattttatttctggaactagaatgaggcgaacagcaagagaagggggaagtcttcctgatggcttcatggctccaaaagcctggaagatcttacaagactactaccaatctcttccaaagagcacttag

SEQ ID NO: 25989 - protein, 611 aa, Molgula tectiformis
MSAEASMPPRSQNIVYQQHRVSRAKRGQVMGQKGGFRGCTIWFTGLSGAGKTTVAMKLEEFLCSKGIPAYSLDGDNIRHGLNKDLGFSPDDREENIRRIGEVAKLFADAGVVCLVSFISPYRKDRDNARKTHEGSDLEFVEVYVDTPIEECEKRDVKGLYKKARQGIIKGFTGIDSPYEAPERPEVTVKTTKMPVEKCMLEVVSVLQEKGIIPSTTHATVNELFVPKDQVEEYKTKAENLPTLNITKLDLQWLQVLSEGWATPLSGFMREREFLQSQHFGCLLDSGITNQSVPIVLPVSNDDKERLAEASEFVLAYEGKKYAVMQNPEFYEHRVEERCSRQWGMSNKGHPHIKMIAESGEWLCGGDIKAIERITWGDGLDNYRLTPLELREKFQQMGADAVFAFQLRNPVHNGHALLMQDTKRTLVERGFKNPVLLLHPLGGWTKSDDVPLDVRMKQHAAVLEEGVLDPKSTVVAIFPSPMMYAGPTEVQWHAKARMATGANFYIVGRDPAGMPHPEEKRDLYEHTHGKKVLTMAPGLTQLEIVPFKVAAYNKVKGAMTFYDPEHHADFDFISGTRMRRTAREGGSLPDGFMAPKAWKILQDYYQSLPKST

SEQ ID NO: 25990 - DNA, 744 bp, Chlamydomonas reinhardtii
  CDS (1)..(744)
atgcagtcagctccttcgctgctatcgcgctttggctgcctcgtgcgtcccgccaatttcgctgcggcctctgtggcctcacgagctatgagcactgcttatgacgtaggatcctctaccaacattaagtggcacgagggcgctgtccccacggaaaataaggaggcgattatgcaacagaagggatgcgtcgtttggttcaccggcctgagcgggtctggcaagagcaccgtcgcctgcacgctggagcacgctcttgcggagtctggcaaagttaccgctctgctggacggcgacaacattcggcacggcctgaacagcaacctcggattctctgcgaccgatcgcgaggagaacatccgccgcattggcgaggtctccaagctgttcgctgacacgggtattgtcactctggtcagcttcatctcgccctaccgccgggaccgcgaccgtgtccggtctcgcgtgccggagggtcgtttcatcgaggtgttcatgaaggtccccatctctatctgcgaggagcgtgaccccaagggcctctacaagaaggcccgcgccggccagctcaaaggcttcaccggcattgacgatccctacgaggagcccctgaacgcgaaggtggtgctggaggcggagacggcggacggcaagcgcatctcgccccaggaccaggcgcgcacgctgctcgagtacctgcacagcaagggcttcctgaccggtccttccaccccacccaagtaa

SEQ ID NO: 25991 - protein, 247 aa, Chlamydomonas reinhardtii
MQSAPSLLSRFGCLVRPANFAAASVASRAMSTAYDVGSSTNIKWHEGAVPTENKEAIMQQKGCVVWFTGLSGSGKSTVACTLEHALAESGKVTALLDGDNIRHGLNSNLGFSATDREENIRRIGEVSKLFADTGIVTLVSFISPYRRDRDRVRSRVPEGRFIEVFMKVPISICEERDPKGLYKKARAGQLKGFTGIDDPYEEPLNAKVVLEAETADGKRISPQDQARTLLEYLHSKGFLTGPSTPPK

SEQ ID NO: 25992 - DNA, 828 bp, Oryza sativa subsp
  CDS (1)..(828)
atgccctcgcacgcgatcccctccccgcttctgcgagcgcggcccccggcaccctcggcggcggcggccgcggcgaccgggaggagggccccgtcgcgtgtggtggcggcattgggcggaggcggcccggccgggagagggatggagcagcagcagcagctcgccggggacggctcccgcagcccagttaaagagaagcctctagtgtcaaccattgggaaatcaaccaatatactgtggcacaattgcccaattggacaatctgagaggcagaacttgttggggcaaaaaggatgtgtcatttggatcacaggactcagcggctcagggaaaagcactcttgcatgtgcactgagtcgggagttgcattgcagcggccaccttacttatgtccttgatggtgacaacctaaggcatggcctaaatcgagatctaagcttcaaggcagaagaccgtgcagaaaatatacgaagagttggagaagtggcaaagctattcgcagatgctggaatcatatgcattgctagtttgatatctccatataggagagaccgtgatgcgtgccgtgtgctgcttccagagtctagatttattgaagtatttatggatttgccactagaaatttgtgaagctcgtgatcctaaaggtctatacaagcttgcacgctctggaaagattaaaggcttcactggaattgatgatccatatgaatcaccagtgaatagtgagatagtaattaagatggtagatggggaatgtccttcacccaaagcaatggcccagcatgttctgtgctaccttgaagagaacggatatttgcaagcttag

SEQ ID NO: 25993 - protein, 275 aa, Oryza sativa subsp
MPSHAIPSPLLRARPPAPSAAAAAATGRRAPSRVVAALGGGGPAGRGMEQQQQLAGDGSRSPVKEKPLVSTIGKSTNILWHNCPIGQSERQNLLGQKGCVIWITGLSGSGKSTLACALSRELHCSGHLTYVLDGDNLRHGLNRDLSFKAEDRAENIRRVGEVAKLFADAGIICIASLISPYRRDRDACRVLLPESRFIEVFMDLPLEICEARDPKGLYKLARSGKIKGFTGIDDPYESPVNSEIVIKMVDGECPSPKAMAQHVLCYLEENGYLQA

SEQ ID NO: 25994 - DNA, 1038 bp, Oryza sativa subsp
  CDS (1)..(1038)
atggcccgcgtggtggaattggggcggcggaagaattcggttgcgtttgtatgcattgcatcactgcggaatctgggcgagaacaaagttttgcaaatgtcatctactgtgccgaaggcgtccaatatcttctggcatgattgtgcagttggccaggctgatcggcagaagctactgaagcagaaaggttgcgttgtttggatcacaggacttagtggttcaggtaaaagtaccctggcatgcacattagatcgagagctccatacaagagggaagctttcttatgttcttgatggtgataatttaagacatggtttgaacaaggatcttggctttaaggcggaagaccgtgctgaaaatatacgcagagttggtgaggtagcaaagctattcgcagatgcaggcctagtatgcattgcaagtttcatatctccgtataggagagaccgtgagtcttgtcgtgcattattgtcagatggtagctttattgaagttttcttgaacatgcccttggaattgtgtgagtcaagggatcctaagggcctttataagcttgctcgtgcaggaaaaataaagggttttactggaattgatgacccttatgaatcaccattaaactctgagattgagatcaaagaagtggatgattggttacatgctttgatctacccatattccttcttcactgcacagctaatggagctgtgcaatgacattcagcgtcgcgtgggtggcggcggcggcgcgggtgccggcggagctgtgccaggacagggcggggcgcgcgggcggcggcggcggctgcgggccgacgaggtgctgcgcgcgctgctcgtggcgcccgtgcgggagctcgagcgcctcgccgactggctcttcgtgttcttctgcctccccctgccggactactacgtgccgggctccggccgcggcgggctgctggtggcgcgggcgccgtcgtcgccgtcgggcggcgcgctcctgcactacggcggcgtttttgatggttttgcggtagcttctttgattaagaaatga

SEQ ID NO: 25995 - protein, 345 aa, Oryza sativa subsp
MARVVELGRRKNSVAFVCIASLRNLGENKVLQMSSTVPKASNIFWHDCAVGQADRQKLLKQKGCVVWITGLSGSGKSTLACTLDRELHTRGKLSYVLDGDNLRHGLNKDLGFKAEDRAENIRRVGEVAKLFADAGLVCIASFISPYRRDRESCRALLSDGSFIEVFLNMPLELCESRDPKGLYKLARAGKIKGFTGIDDPYESPLNSEIEIKEVDDWLHALIYPYSFFTAQLMELCNDIQRRVGGGGGAGAGGAVPGQGGARGRRRRLRADEVLRALLVAPVRELERLADWLFVFFCLPLPDYYVPGSGRGGLLVARAPSSPSGGALLHYGGVFDGFAVASLIKK

SEQ ID NO: 25996 - DNA, 687 bp, Oryza sativa subsp
  CDS (1)..(687)
atggagcagcagcagcagctcgccggggacggctcccgcagcccagttaaagagaagcctctagtgtcaaccattgggaaatcaaccaatatactgtggcacaattgcccaattggacaatctgagaggcagaacttgttggggcaaaaaggatgtgtcatttggatcacaggactcagcggctcagggaaaagcactcttgcatgtgcactgaatcgggagttgcattgcagcggccaccttacttatgtccttgatggtgacaacctaaggcatggcctaaatcgagatctaagcttcaaggcagaagaccgtgcagaaaatatacgaagagttggagaagtggcaaagctattcgcagatgctggaatcatatgcattgctagtttgatatctccatataggagagaccgtgatgcgtgccgtgtgctgcttccagagtctagatttattgaagtatttatggatttgccactagaaatttgtgaagctcgtgatcctaaaggtctatacaagcttgcacgctctggaaagattaaaggcttcactggaattgatgatccatatgaatcaccagtgaatagtgagatagtaattaagatggtagatggggaatgtccttcacccaaagcaatggcccagcatgttctgtgctaccttgaagagaacggatatttgcaagcttag

SEQ ID NO: 25997 - protein, 228 aa, Oryza sativa subsp
MEQQQQLAGDGSRSPVKEKPLVSTIGKSTNILWHNCPIGQSERQNLLGQKGCVIWITGLSGSGKSTLACALNRELHCSGHLTYVLDGDNLRHGLNRDLSFKAEDRAENIRRVGEVAKLFADAGIICIASLISPYRRDRDACRVLLPESRFIEVFMDLPLEICEARDPKGLYKLARSGKIKGFTGIDDPYESPVNSEIVIKMVDGECPSPKAMAQHVLCYLEENGYLQA

SEQ ID NO: 25998 - DNA, 723 bp, Oryza sativa subsp
  CDS (1)..(723)
atggcccgcgtggtggaattggggcggcggaagaattcggttgcgtttgtatgcattgcatcactgcggaatctgggcgagaacaaagttttgcaaatgtcatcaattgtgccgaaggcgtccaatatcttctggcatgattgtgcagttggccaggctgatcggcagaagctactgaagcagaaaggttgcgttgtttggatcacaggacttagtggttcaggtaaaagtaccctggcatgcacattagatcgagagctccatacaagagggaagctttcttatgttcttgatggtgataatttaagacatggtttgaacaaggatcttggctttaaggcggaagaccgtgctgaaaatatacgcagagttggtgaggtagcaaagctattcgcagatgcaggcctagtatgcattgcaagtttcatatctccgtataggagagaccgtgagtcttgtcgtgcattattgtcagatggtagctttattgaagttttcttgaacatgcccttggaattgtgtgagtcaagggatcctaagggcctttataagcttgctcgtgcaggaaaaataaagggttttactggaattgatgacccttatgaatcaccattaaactctgagattgagatcaaagaagtggatggtgtatgcccttcaccatcggacatggcaggacaagtagtcacttatctagaggagaaagggtttctgcatgattag

SEQ ID NO: 25999 - protein, 240 aa, Oryza sativa subsp
MARVVELGRRKNSVAFVCIASLRNLGENKVLQMSSIVPKASNIFWHDCAVGQADRQKLLKQKGCVVWITGLSGSGKSTLACTLDRELHTRGKLSYVLDGDNLRHGLNKDLGFKAEDRAENIRRVGEVAKLFADAGLVCIASFISPYRRDRESCRALLSDGSFIEVFLNMPLELCESRDPKGLYKLARAGKIKGFTGIDDPYESPLNSEIEIKEVDGVCPSPSDMAGQVVTYLEEKGFLHD

SEQ ID NO: 26000 - DNA, 1866 bp, Magnetospirillum gryphiswaldense
  CDS (1)..(1866): transl_table=11
atgtccaacactccgctcaagatcgtcgtcgtcggccatgtggaccacggcaagtccaccctggttggtcgtctgttgcacgaaaccggcgccctgcccgaaggcaaggtcgagtacctgaaggaagtctgcgacaagcgcggcatgccgttcgaatgggccttcgtcatggatgcgcttcaggccgaacgcgaccagggcatcaccatcgacacatcgcaattgcggttccataccggcaaccgtccggtgctgatcatcgatgcccccggccacaaggaattcctgaagaacatgatcaccggcgccgcgtccgccgaagccgccgtgctggtcatcgacgcccatgaaggcgtgcaggaacaatcccgccgccatggctatctgctgcacctcctgggcctgacccagatcgccgtggccgtcaacaagatggatctggtcgattggtcggaagcccgcttcaaggaggtggaagcggaaatccgcgcctatctgggcggcatcggcgtcacccccacccatgtggtgccggtgtcggcgcgtggtggcgacaacatcaacgccgtttcggaaaagtcggcctggtacaaggggccgtcggtgatcggcgcgctggatggtttcgccgccgctgccgtcgctaccgatctggctttgcgcctgccggtgcaggacgtctacaagttcgacagccgccgcatcatctcgggccgcatcgaaagcgggcgcatcaaggtgggcgaccgcctgaccttctcgccctcgggcaagtcggcccgcgtcgccagcatcgaaggctgggccgggtccgacatcaccgtgctcagtgccggtgccggccagtcggtgggcgtcaccctggacgagcccattttcgtcgagcgcggtcaagtggcccatctggccgaagccgccccggccttggcccatgaaatccgggcccgcgtgttctggctgggccgcgacccgctggccttgggcgaccgcctcaagctgaagctggccaccgccgaatatcacgtggaagtggcggccatcgagaaggtcatcgacgtcgaggatctgggcagtcaccagggcgcccaggtcggtcgcaacgccgtggccgaactggtgttccgttcacgcggggccatggccttcgacaccttcggcgacaacgcccggctgggccgcttcgtcctggtgcacggctacgacatcgtcggcggcggcatcgtcggtgccgccatggacaaccgcaacatcttccatgtggatcatcaggtgacctcggaatcccgggcacgggccaatggtcacaagggcggcgtgttgtggctgaccggcctgtcgggtgccgggaagtcgaccatcgccatggaactggagcgccgcctgttccagaagggctggcaggtcaacgcgttggacggcgacaacgtccgccacggcctgtgcagcgacctgggcttcagccccgaggaccgcagcgaaaacatccgccgcgtcggcgagatcggccatctgttcgcccgggccggcatgctggtgatcaccgccttcatcagcccctatcgcgccgaccgcgaccgggtgcgtgccattgaccccgaggcctttcatgaaatccatgtcgccaccggcttggatgaatgcgaacgccgcgaccccaagggtctgtacaaaaaggcacgcaagggcgaaatcatcgatttcaccggcgtttccgccccctatgaggcgccggaaaatcctgaattgaccctgaataccgatggcaagtcggtggaggagacggtgagcgaattggtctcctatgtggaagcccagttcgggcgcaacgcggtggacaccatgaccgcctggacttttcgtatttag

SEQ ID NO: 26001 - protein, 621 aa, Magnetospirillum gryphiswaldense
MSNTPLKIVVVGHVDHGKSTLVGRLLHETGALPEGKVEYLKEVCDKRGMPFEWAFVMDALQAERDQGITIDTSQLRFHTGNRPVLIIDAPGHKEFLKNMITGAASAEAAVLVIDAHEGVQEQSRRHGYLLHLLGLTQIAVAVNKMDLVDWSEARFKEVEAEIRAYLGGIGVTPTHVVPVSARGGDNINAVSEKSAWYKGPSVIGALDGFAAAAVATDLALRLPVQDVYKFDSRRIISGRIESGRIKVGDRLTFSPSGKSARVASIEGWAGSDITVLSAGAGQSVGVTLDEPIFVERGQVAHLAEAAPALAHEIRARVFWLGRDPLALGDRLKLKLATAEYHVEVAAIEKVIDVEDLGSHQGAQVGRNAVAELVFRSRGAMAFDTFGDNARLGRFVLVHGYDIVGGGIVGAAMDNRNIFHVDHQVTSESRARANGHKGGVLWLTGLSGAGKSTIAMELERRLFQKGWQVNALDGDNVRHGLCSDLGFSPEDRSENIRRVGEIGHLFARAGMLVITAFISPYRADRDRVRAIDPEAFHEIHVATGLDECERRDPKGLYKKARKGEIIDFTGVSAPYEAPENPELTLNTDGKSVEETVSELVSYVEAQFGRNAVDTMTAWTFRI

SEQ ID NO: 26002 - DNA, 816 bp, Enteromorpha intestinalis
  CDS (1)..(816)
atgctgcgagcgatcgcgcaacgggcgcgcggctcggcgctgcaatgcgccgcgccgggcaccgagtgggccagctgcgtacgcggatcgtcgggcttcactgcgtatgatgtgggcgagtcgaccaacatcaagtggcacgagacgatggtgagccggggcgacaaggagcgcctgctcaatcagcgtggctgcgtcctctggttcacaggcctctctggctccggcaagtccactgtggcctgcacgctcgagcacgccctgaacgcgcgcggcaagatgacggcgctgctggacggcgacaacgttcgccacggcttgaactcaaacctcactttcacagctgaggacagaacggaacatccgccgcatcggcgaagtgagcaagctctttgccgacgctggcgtcctccactccgtgagcttcatctccgccctatcgcgccgacgcgacccgtgcgcgagcgctgcgcgggcgacttcgtggagtgctatatgaagatccccatcgagctctgcgagcagcgcgaccccaagggcctctacaagaaggcgcgcgccggcctcatgaagggcttcaccggcatcgacgacccatacgaggagccgctggagcctgagctcacgatcacggtgcgcgaggagggcagcgacatgaactcgcccgaggccatggcgaagcagatctttgactatctcgaggcgaagggctttctcaagggtcccgcagtagcaagcagcggcgggagttgcgctagggtcgcgaggtggggcgggcatggcaggcgacgtggccgccagcggctggcatggtag

SEQ ID NO: 26003 - protein, 271 aa, Enteromorpha intestinalis
MLRAIAQRARGSALQCAAPGTEWASCVRGSSGFTAYDVGESTNIKWHETMVSRGDKERLLNQRGCVLWFTGLSGSGKSTVACTLEHALNARGKMTALLDGDNVRHGLNSNLTFTAEDRTEHPPHRRSEQALCRRWRPPLRELHLRPIAPTRPVRERCAGDFVECYMKIPIELCEQRDPKGLYKKARAGLMKGFTGIDDPYEEPLEPELTITVREEGSDMNSPEAMAKQIFDYLEAKGFLKGPAVASSGGSCARVARWGGHGRRRGRQRLAW

SEQ ID NO: 26004 - DNA, 732 bp, Ostreococcus tauri
  CDS (1)..(732)
atgcttcgctcgcgcgcgagagaggtgtgcgcgcgcgcggcgtcgctcgcgcgcgcggtgggatcggaggcgacgaggcgcgggatgagcgacgtgacggtggatgcgtacaaggttggggaatcgaccaacatcaagtggcacgagggcgcggtggatcgggagacgcgcgaacgcgcgttgggacagcggggatgcgtgttgtggttcaccggattgtcgggaagcgggaagtccacggtggcgtacacgctggagcacgaactgttcaagcgcgggaagatcgcgcaggtgctcgacggggataacattcgtcacgggttgaactccaatttggggttcaccgcggaggatcgcgaagagaacattcgaagaatcggtgaggtgtcgaaactgtacgcggatagcgggatgatcacgctcgtgagctttatctcgccgtataagcgggatcgcttgcgcgtccgcgaacgcgtcggcgaccgcttcgtcgaggtgtacatgaagattcctttgagcgtgtgcgaggatcgcgacccaaaagggttgtacaaggccgcgcgcgcgggtaagattaagggtttcaccggaatcgacgatccgtacgaggagccggagaacgctgagatcgagatggaggtcgccaaggaggacggcgtcttggcgccgccgagagaaatggcggagaagatcatcgaatacctggataaaaagggtttcttgaaggcgtaa

SEQ ID NO: 26005 - protein, 243 aa, Ostreococcus tauri
MLRSRAREVCARAASLARAVGSEATRRGMSDVTVDAYKVGESTNIKWHEGAVDRETRERALGQRGCVLWFTGLSGSGKSTVAYTLEHELFKRGKIAQVLDGDNIRHGLNSNLGFTAEDREENIRRIGEVSKLYADSGMITLVSFISPYKRDRLRVRERVGDRFVEVYMKIPLSVCEDRDPKGLYKAARAGKIKGFTGIDDPYEEPENAEIEMEVAKEDGVLAPPREMAEKIIEYLDKKGFLKA

SEQ ID NO: 26006 - DNA, 921 bp, Medicago truncatula
  CDS (1)..(921)
atgaccaccgtgaaatcacttccaccgtcacgtagcaccgccgtataccgtacggtccaatgccgacaattgccgacggaaaacctagggtttcctacactcttcccactcaatgccggtagatcgtgccgcagtcagagaagcctagcactcttctacgaccgtgcgagattgaaggcatacacattgaagccaattcaggctaagaacgattctgaatcgtcttgctcggataataacagtacttcgttttctgctgtcaatgaaactggaaatctggtaaaaatctccgccagatgtcaaatattgggaaactcgacgaacattttgtggcatgattgtccagttcaaaaatgtgatagacagcagctgcttcagcaaaaaggatgtgttatatggctaactggtctcagtggttcaggaaaaagtactcttgcatgtgctttgagtcaaagcttgcactccagaggaaaactgacttacatccttgacggtgacaatattcggcatggtctaaaccgtgatcttagttttagagcagaagatcgttcagaaaacatacgaaggattggtgaggttgcaaaactctttgcagatgctggtcttatttgcatcactagtttgatatcaccctatcaaaaggatagagatgcttgcagagcactactgccagaaggggatttcattgaggttttcatagacgtgccactacatgtgtgcgaagctagggacccaaagggcctatacaagcttgctcgtgcaggaaagatcaaaggtttcactggtatagatgatccatatgaaccaccttgttgctgtgagataatattacaacagaaaggaagtgactgtaagtcccctaaagatatggcagaaacagtgatatcctatttggagaagagtggacatctgcaggcctga

SEQ ID NO: 26007 - protein, 306 aa, Medicago truncatula
MTTVKSLPPSRSTAVYRTVQCRQLPTENLGFPTLFPLNAGRSCRSQRSLALFYDRARLKAYTLKPIQAKNDSESSCSDNNSTSFSAVNETGNLVKISARCQILGNSTNILWHDCPVQKCDRQQLLQQKGCVIWLTGLSGSGKSTLACALSQSLHSRGKLTYILDGDNIRHGLNRDLSFRAEDRSENIRRIGEVAKLFADAGLICITSLISPYQKDRDACRALLPEGDFIEVFIDVPLHVCEARDPKGLYKLARAGKIKGFTGIDDPYEPPCCCEIILQQKGSDCKSPKDMAETVISYLEKSGHLQA

SEQ ID NO: 26008 - DNA, 1911 bp, Rhizobium meliloti
  CDS (1)..(1911): transl_table=11
atgagcagcgccaccgccccggctccttgcgccgataccgatatcgacctctggctcgcccggcagaccggcaaatcgctgctgcgcttcctgacctgcggctcggtggacgatggtaagtcgacgctcatcggccgactgctctatgacagccagatgatcctcgacgaccagttggcgtcgctgaaaaaggacagccgcaacaggcatgtgggcgaggagggcatcgatttctcgctgctggtcgacggtctcgtcgccgagcgcgagcagggcatcaccatcgacgtggcttatcgcttcttttccaccgaccggcgaaagttcatcgtcgccgatacgcccggccacgagcaatacacccgcaacatggcgaccggcgcctccaacgccgacgtggcgctgctgctggtcgacgcccgcaaggggcttttgacccagacgcgccgccacagtttcatcctctcgctgtttggggtgaagcacgtggcgctggtggtcaacaagatcgatctcatggactattcccaggaggtgttcgcaaggatcgaggccgaataccgcgcctttgttaccgaattgggtttcgcctcccttgccgcagtccccatctcggccctgcgcggcgataacatcgtcgccaagtcggagcgcacgccatggtacacgggctcgccgcttctgtcctacctcgaagatatcgctgtcgatgaagaccgcacgcaaaccccgttccgttttccggtgcagtgggtcaatcgtcccaatctcgattttcgcgggttttcgggtacggtcgcctcgggcacggtcagggtgggtgacgagattctggtctcatcctcccgcaagcccgccgcgatcgcgcgcatcgtcaccatggacggcgatcttcccgaagccgccgccgaacaggccgtaacgctcgtcctcgaccgcgagatcgatatctcgcgcggcgacgtgctcacccattccggccagacgccggaattctccaaccagttccaggcagaactcgtatggatggccgacgaacccgcctatcccgggcgctcctatcttttaaagatcggcagccaggtggtgcccgcgactattaccgacctgaaacaccgcaccaacgtcaatacgctgaaaaaggccgccgccaagcggctcgagctcaatgaggtcggcacggttaccatcgccaccgacaggccgattgccttcgatccctacaacacaaatcggctgaccggcggcttcatcctcatcgaccgcattcacaatctcacccttggcgcgggcaccatcgcgtatggcctgcaacgggcgcgaaacctttcctaccagtccttcgacgtcaatcgcgaggtccgcgccggtatgaaggggcagaccccgcagatcgtctggttcaccggcctgtcgggctcgggcaagtcgacggtcgccaacctactcgaaaaacggctcaccgctgaaggcaagcatgcctacatcctcgacggcgacaacgtccggcacgggctcaacaaggatctcggcttcaccgacgcggcacgtgtggagaacatccgccgtgtggccgaggtggcgcggctgatggccgatgcagggttgatcgtcattgtctcgttcatctcccccttcgccaacgagcgccgcatcgcccgcgaaatcgccgccaacatccgctttctcgaagcctacgtcgacaccccgctggaggtgtgcgaagcgcgcgatcccaaagggctctacgccaaggcccgggccggccagatcaccaattttaccggcgtcgacagcccgttcgaagtgccgcaggatcccgatattacgctccgtggcgcagtcgcctcgtctgaggaaatggccgacatcatctacgaaagggtagttcgaactgatcaggcgaagtaa

SEQ ID NO: 26009 - protein, 636 aa, Rhizobium meliloti
MSSATAPAPCADTDIDLWLARQTGKSLLRFLTCGSVDDGKSTLIGRLLYDSQMILDDQLASLKKDSRNRHVGEEGIDFSLLVDGLVAEREQGITIDVAYRFFSTDRRKFIVADTPGHEQYTRNMATGASNADVALLLVDARKGLLTQTRRHSFILSLFGVKHVALVVNKIDLMDYSQEVFARIEAEYRAFVTELGFASLAAVPISALRGDNIVAKSERTPWYTGSPLLSYLEDIAVDEDRTQTPFRFPVQWVNRPNLDFRGFSGTVASGTVRVGDEILVSSSRKPAAIARIVTMDGDLPEAAAEQAVTLVLDREIDISRGDVLTHSGQTPEFSNQFQAELVWMADEPAYPGRSYLLKIGSQVVPATITDLKHRTNVNTLKKAAAKRLELNEVGTVTIATDRPIAFDPYNTNRLTGGFILIDRIHNLTLGAGTIAYGLQRARNLSYQSFDVNREVRAGMKGQTPQIVWFTGLSGSGKSTVANLLEKRLTAEGKHAYILDGDNVRHGLNKDLGFTDAARVENIRRVAEVARLMADAGLIVIVSFISPFANERRIAREIAANIRFLEAYVDTPLEVCEARDPKGLYAKARAGQITNFTGVDSPFEVPQDPDITLRGAVASSEEMADIIYERVVRTDQAK

SEQ ID NO: 26010 - DNA, 636 bp, Aspergillus oryzae
  CDS (1)..(636)
atgtccacaaacatcaccttccatgccagcgccctgacgcgcagcgaacgcagcgaactccgcaaccaacgcggtctcacaatctggctcaccggtctctccgcctcgggcaagtctaccattgccgttgagctcgagcaccagctcctccgagaccggggtgtccacgcctaccgtctcgacggtgacaacatccgcttcggactcaacaaggacctcggttttagcgaaaaggaccgcaacgagaacatccgtcggattgcagaggttgccaagctcttcgccgacagcgcctctatcgccatcacctcgttcatctcgccctaccgtgcagaccgtgacaccgcgcgcaaactgcacgaagtccccaccccgggtgaagagaccggtttgcccttcgttgaggtcttcatcgatgtccccattgaggttgccgagcagcgtgaccccaagggtctttataagttggccagggcgggtaagatttcggagttcaccggcatcagtgcgccttacgaggaacctgaaaagcctgaggtgcatatccataaccatgatttgccagtccaggatgctgtgaagcagattgtggattatttggatgctcagggctacttgccccctaagaaggagtag

SEQ ID NO: 26011 - protein, 211 aa, Aspergillus oryzae
MSTNITFHASALTRSERSELRNQRGLTIWLTGLSASGKSTIAVELEHQLLRDRGVHAYRLDGDNIRFGLNKDLGFSEKDRNENIRRIAEVAKLFADSASIAITSFISPYRADRDTARKLHEVPTPGEETGLPFVEVFIDVPIEVAEQRDPKGLYKLARAGKISEFTGISAPYEEPEKPEVHIHNHDLPVQDAVKQIVDYLDAQGYLPPKKE

SEQ ID NO: 26012 - DNA, 600 bp, Campylobacter jejuni subsp
  CDS (1)..(600): transl_table=11
atggataaaaatcttacttggcataacacaaatatcaccaaagaacaaagatcaaaacttaaaaatcaaaaaccttgtgtactttggctaacaggacttagtgcaagtggaaaatcaaccattgccaatgctttagaacagaaattacacgagcttggttttcatacgtatttgcttgatggggataatattcgcataggtttaaataaagacttaggctttgatgaaaactcaagagtggaaaacataagacgcatagcagaactttgcaaactttttgttgatagtggtttgattatactaagtgcttttatctcaccctttaaaagcgatagagctttagcaagatctttagtaaaaaaagatgaatttatagaaatttttgtagatacacctttagaactctgtgaaaaaagagatcctaaaggactttacaaaaaggcgcgaaatggagaaataaaaaatttcacaggtatagacaggccttatgaaaaacctcaaaatcctgaaattcatttgcaaaattccaaagccaaacttaatgaaaatgtagatataatcttaaactatcttaaagaaaatggatatattgatacttga

SEQ ID NO: 26013 - protein, 199 aa, Campylobacter jejuni subsp
MDKNLTWHNTNITKEQRSKLKNQKPCVLWLTGLSASGKSTIANALEQKLHELGFHTYLLDGDNIRIGLNKDLGFDENSRVENIRRIAELCKLFVDSGLIILSAFISPFKSDRALARSLVKKDEFIEIFVDTPLELCEKRDPKGLYKKARNGEIKNFTGIDRPYEKPQNPEIHLQNSKAKLNENVDIILNYLKENGYIDT

SEQ ID NO: 26014 - DNA, 1902 bp, Rhodococcus sp
  CDS (1)..(1902): transl_table=11
atgactgtttcctcggatctgatcgctgacgacatcgaggcgtacctcgaacgtcatgcaaacaagagcatgctgcgattcatcacgtgcggcagcgtcgacgacggcaagagcaccttgatcggccgtctgctctacgaatcgaaactcgtcttcgacgaccagttgacggcgctcgaagccgattcgcgcaagagcggaacccagggggaggggctcgatttcgcgctcctggtcgacggtctcgccgccaaacgtgagctgggcatcacgatcgacgtcgcctaccgctacttcacgaccgagcgacgcaagttcgtcgtcgccgatactccggggcacgagcagtacacccgaaacatggtgacgggcgcgtcgaccgccgatcttgctgtgatccttgtcgattcccgcaaggggatactgactcagacccgccggcactcgtatctggtgtcgttgctggggatcaagcacgtggtgcttgccgtgaacaaactcgacctcgtcgactactcgcaagaggtcttcgatgccattaccgcggattacgcagagttcgctcacgagatcggtctggacgggttcgtcgccatcccgatgtcggcatacatgggtgacaatctcacccagcgcagtgcgaataccccgtggtactccggaccaagcctgatcgagcatctcggaagcgtggacatcgacgatgctgccgccgcggctccgttccggatgccggtgcagtgggtcaaccggccggacctcgacttccgcggattctccggccagatcgtttccggcaccgtatctcccggagatcccatccgcgtgctccccagtggaaagacgtccacagtcgagcgcatcgtgaccatgggtggcgacctcgacgttgcccgtgcgggccgctcggtcaccatcacgctcgccgacgagatcgacatcagtcgcggtgatgtgctgtccatcggcgacaatccgccggccgtagccgatcagttcgaggcctgcatcgtctggatgggtgaggctcccatgctgcccgaacggccgttcctgtgccagatcggtaccgtcacagtcactgggcgcatcaccaaaccgaaacacaagatcaacgtcaacactctcgagaagaccgcaacgactactctcgcgctcaacgaaatcggtgtctgcaacctcagtttcgatcgaccggtcccgttcgacccgtacgtcggcaaccgtgacaccggtagcttcatcctcatcgaccgccttaccaacggcactgtcggtgcgggcatgatcacgcactcgctgcgtcgatcggacaacattcactggcaatccgtcgacgtcgacgaggccgcgcacaccaggctcaagggacaccaacccgcagttctgtggttcaccggtctctccggttcgggaaagtcgaccatcgcgaacgatgtcgagcgtcaactgcacgcactcggcgcgcacacctacctcctcgacggagacaacgtccgtcacgggctgaatcgagacctcggattcaccgaagccgaccgcgtcgagaacatccgtcgcgtcaccgaggtcacccgactgatggcggacgccggtctgatcgtcctcgcgtccttcatttcaccgttcgaggccgagcgtcatgccgcccgtgaattgatcggcgacgaacagttcgtcgaaatcttcgtcgacaccgctcttgccgtcgcagaggagcgagatcccaagggtctgtacaagaaggctcgacggggcgagttggtgaacttcaccggaatcgattcgccgtacgaaccgccgcagaaccctgacattcacgtcgacaccagtgtcacgacgaccgaggacgctgcgatcgcgatcgtcgaccatctccgcgcccgcggaaccatttcttga

SEQ ID NO: 26015 - protein, 633 aa, Rhodococcus sp
MTVSSDLIADDIEAYLERHANKSMLRFITCGSVDDGKSTLIGRLLYESKLVFDDQLTALEADSRKSGTQGEGLDFALLVDGLAAKRELGITIDVAYRYFTTERRKFVVADTPGHEQYTRNMVTGASTADLAVILVDSRKGILTQTRRHSYLVSLLGIKHVVLAVNKLDLVDYSQEVFDAITADYAEFAHEIGLDGFVAIPMSAYMGDNLTQRSANTPWYSGPSLIEHLGSVDIDDAAAAAPFRMPVQWVNRPDLDFRGFSGQIVSGTVSPGDPIRVLPSGKTSTVERIVTMGGDLDVARAGRSVTITLADEIDISRGDVLSIGDNPPAVADQFEACIVWMGEAPMLPERPFLCQIGTVTVTGRITKPKHKINVNTLEKTATTTLALNEIGVCNLSFDRPVPFDPYVGNRDTGSFILIDRLTNGTVGAGMITHSLRRSDNIHWQSVDVDEAAHTRLKGHQPAVLWFTGLSGSGKSTIANDVERQLHALGAHTYLLDGDNVRHGLNRDLGFTEADRVENIRRVTEVTRLMADAGLIVLASFISPFEAERHAARELIGDEQFVEIFVDTALAVAEERDPKGLYKKARRGELVNFTGIDSPYEPPQNPDIHVDTSVTTTEDAAIAIVDHLRARGTIS

SEQ ID NO: 26016 - DNA, 1884 bp, Sinorhizobium sp
  CDS (1)..(1884): transl_table=11
atgttgtccataccgccgcatgacatcgaggcacgtctcgccgagcacgacaacaaatcgatcctcaggttcatcacctgcggctccgtcgacgacggcaaatcgacgctgatcgggcgtttgctctacgacgcgaagctgatcttcgaggatcagttggccaatctgggacgcgtcggggtggccaatggcgaggagatcgacctctcgctgcttctcgacggtcttgaagccgagcgcgaacagggcatcaccatcgacgtcgcctaccgctatttcgccacgtcgaaacgcaaattcatcgtcgccgacacgcccggccacgaggaatatacccgcaacatggtgacgggcgcttcgacggccgacctggccgtcatcttgatcgacggccgccagggcatccttcagcagacccggcgccactcctgcatcgcgtcgctgctcggcatccgccatgtggtgctggcagtcaacaagatcgaccttgtcgacttccgccagcaggtcttcgacgagatcgtcgccgattatctcgccttcgccagggaacttggctttgccagcatccggccgatcccgatctcggcgcgctatggcgacaatgtcgtctcggcgtcggcaaacacctcgtggtacaaggggcccgcactgctcgaatatctggagacggtgcaagtcgatcctcccacccaggagaaaccgttccgtttcccggttcaactggtgttgcggccgaacgcagacttccgcggctatgccggccaggccgcttccggccatgttacggtcggcgatcctgtcgtcgtcgcgaaatccggccagcgaaccaccgtcaaggcgatcgtcacctatgacgggaacctcgaaagggcgggggagggcgaggcggtgacgctcgtgcttgccgatgaggtcgatgcctcgcgcggcaacatgctggtggccccggccgcacggcgtttcgtggccgaccagttccaggcgcatgtcatctggttcgatgcgagcccgatgttccctggacggagctacatcctcaggaccgagacggacagcgtcagcgccacagtcaccacgctcaagcatcaggtgaacgtcaacagctttgcccgtgaagcggcgaaatccttgcagatgaacgaggtgggcgtctgcaacatctcgacgcaggtgccgatcgccttcgacgcctacaaggacaaccgggcgaccgggaacttcatcatcgtcgatcgggtgacgaacgccaccgtcggcgccggcctgatagacttcccacttcgccgcgccgacaacgtccactggcaagcgttcgaagtgaacaaggctgcacgcagcgcgatgaagagccagcgcgctaccgtgctctggttcaccgggctatcgggctccggcaaatcgacgatcgggaacgcgctcgatcgcatcctgcatgcgcgcggcaagcacacctacctgctcgacggcgacaatgtccgccacgggctcaatcgcgatctcggcttcaccgaggaggatcgtgtcgagaacattcgccgcgtggcggaggtcgccaagctgatggccgacgccggcctcatcgtgctcgtttcgttcatctcgccgttccgtgacgagcggcgcatggcgcgcgaattgatggacgagggcgagttcatcgagatcttcgtcgacacgccgatcgaggagtgcgcgcgccgcgacccgaaggggctctatgagaaggcgctggccggcaagatcgcaaacttcaccggcgtctcctcgccctatgaggtgccggagagcccggaactgcatctgaagacggtcgaagtggacccggtcgcgctggcgctgaagatcgaggagttcctcgaccagcggatggaggagaaatga

SEQ ID NO: 26017 - protein, 627 aa, Sinorhizobium sp
MLSIPPHDIEARLAEHDNKSILRFITCGSVDDGKSTLIGRLLYDAKLIFEDQLANLGRVGVANGEEIDLSLLLDGLEAEREQGITIDVAYRYFATSKRKFIVADTPGHEEYTRNMVTGASTADLAVILIDGRQGILQQTRRHSCIASLLGIRHVVLAVNKIDLVDFRQQVFDEIVADYLAFARELGFASIRPIPISARYGDNVVSASANTSWYKGPALLEYLETVQVDPPTQEKPFRFPVQLVLRPNADFRGYAGQAASGHVTVGDPVVVAKSGQRTTVKAIVTYDGNLERAGEGEAVTLVLADEVDASRGNMLVAPAARRFVADQFQAHVIWFDASPMFPGRSYILRTETDSVSATVTTLKHQVNVNSFAREAAKSLQMNEVGVCNISTQVPIAFDAYKDNRATGNFIIVDRVTNATVGAGLIDFPLRRADNVHWQAFEVNKAARSAMKSQRATVLWFTGLSGSGKSTIGNALDRILHARGKHTYLLDGDNVRHGLNRDLGFTEEDRVENIRRVAEVAKLMADAGLIVLVSFISPFRDERRMARELMDEGEFIEIFVDTPIEECARRDPKGLYEKALAGKIANFTGVSSPYEVPESPELHLKTVEVDPVALALKIEEFLDQRMEEK

SEQ ID NO: 26018 - DNA, 831 bp, Arabidopsis thaliana
  CDS (1)..(831)
atgatcgccgccggagctaaatcgctattagggctttcgatggcttctccaaaagggattttcgatagcaattcaatgagtaattcaagatctgttgttgttgttcgtgcttgtgtttctattgatggatctcaaactctgagtcataacaaaaatggatctattcctgaggttaaatccattaacggtcacacgggacaaaagcaaggacctttgtctacggtcggaaactcgacaaatataaagtggcatgaatgttctgttgagaaagttgatagacagagattgcttgatcagaaaggatgtgtgatttgggtcaccggtcttagtggttcagggaagagtactttggcttgtgctttgaatcagatgttgtatcaaaaggggaagctttgttatattcttgatggtgataatgttaggcatggcttaaaccgtgatcttagctttaaagctgaggatcgtgcagagaatattcgtagagttggagaggttgctaagctttttgcggatgctggaataatctgcattgcgagtttgatatctccttatagaacagatagggacgcttgtcgaagtttgctccccgagggagattttgttgaggtgttcatggatgtaccgcttagtgtttgcgaggcgagggatccaaagggtctttacaagcttgctcgtgcaggaaagatcaaaggttttaccgggatcgatgacccttacgagccaccattgaactgcgagatttctctaggacgtgaaggaggaacttctcctatcgaaatggcggaaaaggtcgtcggatacttagataacaagggttatcttcaagcataa

SEQ ID NO: 26019 - protein, 276 aa, Arabidopsis thaliana
MIAAGAKSLLGLSMASPKGIFDSNSMSNSRSVVVVRACVSIDGSQTLSHNKNGSIPEVKSINGHTGQKQGPLSTVGNSTNIKWHECSVEKVDRQRLLDQKGCVIWVTGLSGSGKSTLACALNQMLYQKGKLCYILDGDNVRHGLNRDLSFKAEDRAENIRRVGEVAKLFADAGIICIASLISPYRTDRDACRSLLPEGDFVEVFMDVPLSVCEARDPKGLYKLARAGKIKGFTGIDDPYEPPLNCEISLGREGGTSPIEMAEKVVGYLDNKGYLQA

SEQ ID NO: 26020 - DNA, 918 bp, Arabidopsis thaliana
  CDS (1)..(918)
atggcgagatgtgtgggaaggtgctacgtttcgccggcgttcggtgagtctgaatcgcaccggttatcggagcggcggtttctgaaattgtctagctccacgaattcggatcccgccggtagtaaaagtttgaagcttcgcgggaaaattcatcggagaatgagctacttccgtccgatcatggcaaaagatgaatccatttcatcgcggtccggtgaaacgaagcaaatcaatggaaagcaaaagaacattgtctggcatgattgtcccgttactaaatccgacaggcaagaattaattaagcataagggatgtgtgatttggattactggcttaagtggttcaggtaaaagtagtctggcatgtgctcttagtcgagctttgcacaatcgtggaaagctttcgtatatacttgatggtgacaatgttcgacatggtttaaacagcgatcttagtttcgaagcagatgatcgagctgaaaacattcgaagagttggtgaagtggctaaactgtttgcagattctggtattatctgtattgcaagtttaatatctccttaccggatagaacgagctgcctgccgtgcattattaccacaaggagatttcattgaggtatttatggatgtgccactccatgtttgtgaagctagagatccaaagggcttatacaaacgtgcacgcgctggtaaaatcaaaggttttacaggagtagatgatccatatgaagcgcctttggattgcgagattgtaatacaaaacagtagagacaaggggctttcttcttcatcttcatcttcatcttcaccttcatcttcgtcttcttctctgtgtgaaatggcagatattgttgtgtcgtacttggaccaaaatggatacctgaagaaacactccacaaaatcacgtgattgtatgtaa

SEQ ID NO: 26021 - protein, 305 aa, Arabidopsis thaliana
MARCVGRCYVSPAFGESESHRLSERRFLKLSSSTNSDPAGSKSLKLRGKIHRRMSYFRPIMAKDESISSRSGETKQINGKQKNIVWHDCPVTKSDRQELIKHKGCVIWITGLSGSGKSSLACALSRALHNRGKLSYILDGDNVRHGLNSDLSFEADDRAENIRRVGEVAKLFADSGIICIASLISPYRIERAACRALLPQGDFIEVFMDVPLHVCEARDPKGLYKRARAGKIKGFTGVDDPYEAPLDCEIVIQNSRDKGLSSSSSSSSSPSSSSSSLCEMADIVVSYLDQNGYLKKHSTKSRDCM

SEQ ID NO: 26022 - DNA, 873 bp, Arabidopsis thaliana
  CDS (1)..(873)
atggcgagatgtgtgggaaggtgctacgtttcgccggcgttcggtgagtctgaatcgcaccggttatcggagcggcggtttctgaaattgtctagctccacgaattcggatcccgccggtagtaaaagtttgaagcttcgcgggaaaattcatcggagaatgagctacttccgtccgatcatggcaaaagatgaatccatttcatcgcggtccggtgaaacgaagcaaatcaatggaaagcaaaagaacattgtctggcatgattgtcccgttactaaatccgacaggcaagaattaattaagcaaaagggatgtgtgatttggattactggcttaagtggttcaggtaaaagtagtctggcatgtgctcttagtcgagctttgcacaatcgtggaaagctttcgtatatacttgatggtgacaatgttcgacatggtttaaacagcgatcttagtttcgaagcagatgatcgagctgaaaacattcgaagagttggtgaagtggctaaactgtttgcagattctggtattatctgtattgcaagtttaatatctccttaccggatagaacgagctgcctgccgtgcattattaccacaaggagatttcattgaggtatttatggatgtgccactccatgtttgtgaagctagagatccaaagggcttatacaaacgtgcacgcgctggtaaaatcaaaggttttacaggagtagatgatccatatgaagcgcctttggattgcgaggttcatataatatccaatttttcttcgtcttcttctctgtgtgaaatggcagatattgttgtgtcgtacttggaccaaaatggatacctgaagaaacactccacaaaatcacgtaattgtatgtaa

SEQ ID NO: 26023 - protein, 290 aa, Arabidopsis thaliana
MARCVGRCYVSPAFGESESHRLSERRFLKLSSSTNSDPAGSKSLKLRGKIHRRMSYFRPIMAKDESISSRSGETKQINGKQKNIVWHDCPVTKSDRQELIKQKGCVIWITGLSGSGKSSLACALSRALHNRGKLSYILDGDNVRHGLNSDLSFEADDRAENIRRVGEVAKLFADSGIICIASLISPYRIERAACRALLPQGDFIEVFMDVPLHVCEARDPKGLYKRARAGKIKGFTGVDDPYEAPLDCEVHIISNFSSSSSLCEMADIVVSYLDQNGYLKKHSTKSRNCM

SEQ ID NO: 26024 - DNA, 1890 bp, Drosophila melanogaster
  CDS (1)..(1890)
atgccgaatccgccaattggattttatccccatatcaaaagaaggtgcctacaggtggcgacgaatgtgaccgagcaaaagcaccatgtcaccagggagacgcgcggcaagaatttgggactctgtcgaggattccgaggatgcacggtgtggctgactggcctcagtggagctggaaagacctcgattgccttcgaactggaggcgtacctggtatcccggggcattccggcctacgggttggacggcgacaacattcgcaccggactgaacaagaacctgggcttcacgcccgccgatcgcgaggaaaacattcgccgcgtgggcgaggtggccaagttgtttgccgacagcggagtggtggccatctgcagcttcgtttcgcccttcgccgacgatcgtgagatggcgcgcaagatccacaaggatgcgggtctgaagttctatgagatattcgtggacacaccgctggatgtgtgcgaaacccgggacgtgaagggtctatacaagaaggcgcgcgagggcgtaatcaaaggattcacgggcattacgcaggagtacgagcgaccccagatgccggagctggtggtcaacacgcacggctacacggtgcgcgagtccactcagaagctggtgacgctgctcgaacaggagggcattattccgcgctcgctgcgcgacgtagacctgctgccggagctttatcccagcgaatccattgccacggaggcactgcgtcacgaggccgagtcgctgcaagccatcgaaatcagcaccgtggagctgcagtgggtgcaagtactggcaggatgggcatatccactgcgcggcttcatgcgcgaggatgagtacctgcagacgctgcacttcaacacacttcagagcggcatggacggttcctatcgcgagaaccactcggtgcccattgttttgagcgccacgcaggcggacaaggatcgtctggacggctgctcctcgctgactctcaaataccaaggcaaggcggtagccattctgcggcgtcccgagttctactttcagcgtaaggaggagcggctggcccgccagttcggcaccagcaatcccaatcacccgtacagtaagcaggtctacgagtccggggattatttggtcggtggcgatctggcagtgatcgaacgtatccgctgggaggacggactggatcagtacaggctgactcccaacgagttaaggcgccgctttaaggagctgaatgccgacgccatcttcgcctttcagttgcgcaatcccatccacaacggccatgccctgctcatgcaagacactcgccgccagctgctggagcgcggcttcaagcagccagtgctgctgctgcatcctctgggtggctggaccaaggacgacgatgtgccgctggatgtgcgcatgaagcagcaccaggccgtgctcgacgcaggtgtcttgcgacgagaggacacagtgctggccatcttcccctcgccaatgatgtacgccggtcccacggaggtgcagtggcacgcaaaggcgcgcatgaacgccggtgcgaacttctacattgtaggccgcgatccggctggcatgccgcatccggccaaggaaacttatccggatggaaacctatacgatgccacccatggtgcgcgagtgcttaagatggcccagggactagacagcatggagatcctgcccttccgtgttgctgcctatgacaagagcgccagtagaatggccttcttcgagcccaagaggaaggatgagtttgagttcatctcgggaaccaagatgcgcaccctggccaaaacgggagccagtccgccggatggcttcatggaaccggaggcttggcgcatcctggccacctactaccagaacctgccgcagtcgtaa

SEQ ID NO: 26025 - protein, 629 aa, Drosophila melanogaster
MPNPPIGFYPHIKRRCLQVATNVTEQKHHVTRETRGKNLGLCRGFRGCTVWLTGLSGAGKTSIAFELEAYLVSRGIPAYGLDGDNIRTGLNKNLGFTPADREENIRRVGEVAKLFADSGVVAICSFVSPFADDREMARKIHKDAGLKFYEIFVDTPLDVCETRDVKGLYKKAREGVIKGFTGITQEYERPQMPELVVNTHGYTVRESTQKLVTLLEQEGIIPRSLRDVDLLPELYPSESIATEALRHEAESLQAIEISTVELQWVQVLAGWAYPLRGFMREDEYLQTLHFNTLQSGMDGSYRENHSVPIVLSATQADKDRLDGCSSLTLKYQGKAVAILRRPEFYFQRKEERLARQFGTSNPNHPYSKQVYESGDYLVGGDLAVIERIRWEDGLDQYRLTPNELRRRFKELNADAIFAFQLRNPIHNGHALLMQDTRRQLLERGFKQPVLLLHPLGGWTKDDDVPLDVRMKQHQAVLDAGVLRREDTVLAIFPSPMMYAGPTEVQWHAKARMNAGANFYIVGRDPAGMPHPAKETYPDGNLYDATHGARVLKMAQGLDSMEILPFRVAAYDKSASRMAFFEPKRKDEFEFISGTKMRTLAKTGASPPDGFMEPEAWRILATYYQNLPQS

SEQ ID NO: 26026 - DNA, 609 bp, Bacillus halodurans
  CDS (1)..(609): transl_table=11
atgggaacgtccaatcagccgcacattgtgtggcatgaagcgagtgtgtctaaagaagaacggcaaaagcgaaatcgtctaaaaagttgtgttgtttggttcactggtctttctggttcggggaaatccacgcttgccaatgccttagatcgaaagctttttgaagaagggattcatagttatgtattagacggggataacattcgtcacggtttgaatgcgggactaggctttagtgaagaggatcggaaggagaacattcgccggattggagaagtggccaaattgttcgtggacgctggagttgtcacatcaacagccttcatttcaccatttcgcgaagatcgtgacaatgttcgagggattttagatgatggagagttcatcgaggtgtatgtgcgctgtccgctcgaaacttgtgaaaaacgtgatccgaaagggctctataagaaagcaagaagcggtgatattccggaatttactggtatcagttcaccgtatgaagagcccgtcaatccagagctcatcattgatacggatcagttagcggtcgaggaagcggttgaaaaaatttatgcctatctacatgcacaagaaagtggaaaataa

SEQ ID NO: 26027 - protein, 202 aa, Bacillus halodurans
MGTSNQPHIVWHEASVSKEERQKRNRLKSCVVWFTGLSGSGKSTLANALDRKLFEEGIHSYVLDGDNIRHGLNAGLGFSEEDRKENIRRIGEVAKLFVDAGVVTSTAFISPFREDRDNVRGILDDGEFIEVYVRCPLETCEKRDPKGLYKKARSGDIPEFTGISSPYEEPVNPELIIDTDQLAVEEAVEKIYAYLHAQESGK

SEQ ID NO: 26028 - DNA, 594 bp, Bacillus subtilis
  CDS (1)..(594): transl_table=11
gtgacaaatcgcgatattgtatggcatgaagcctctatcacaaaagaagagtatcagcaaaaaaacaagcataaaagctccattctctggctgacagggttaagcggctcaggcaaatcaaccattgccaacgccgctgcgagagaattgtttgagcaaggctaccaagtcattgtgctggacggggataatatccgtcacggcctaaatagggatcttggtttttctgatgaagaccgaaaagaaaacatccgccggatcggagaggtggcgaagctttttgttcagcagggaaccattgtgattactgcttttatctctcctttccgcgaggacagacaacaggttcgcgagcttgtggaagcgggcgaatttaatgaagtctacattaaatgcgaccttgatatttgtgaacaaagagatccgaaagggctttacaaaaaagcaagaaacggcgagattccgttctttacaggaattgattctccttatgaagaaccggaagctccagagctcgttcttgattcaggacagcatgaccgtgaagcgtgtaaaaatcagctgatcgagtttgttaaacaaaaattgagctga

SEQ ID NO: 26029 - protein, 197 aa, Bacillus subtilis
MTNRDIVWHEASITKEEYQQKNKHKSSILWLTGLSGSGKSTIANAAARELFEQGYQVIVLDGDNIRHGLNRDLGFSDEDRKENIRRIGEVAKLFVQQGTIVITAFISPFREDRQQVRELVEAGEFNEVYIKCDLDICEQRDPKGLYKKARNGEIPFFTGIDSPYEEPEAPELVLDSGQHDREACKNQLIEFVKQKLS

SEQ ID NO: 26030 - DNA, 600 bp, Bacillus subtilis
  CDS (1)..(600): transl_table=11
atgacacacaatccgaacatcatttggcatcccgctgccatctcaaagtctgacagacagtccttaaacggacacaaaagctgcgtcctttggtttacaggtttgtccggctccggaaaatcggtgctggccaatgctgtcgatgaaaagctttaccgcaagggcattcagagctacgtgcttgacggtgataatatccgccacggcttaaacaaagatcttggatttcagactggtgacaggattgaaaacatccgccggatcggagaagtggcgaagctgtttgtcgacagcgggcaaatgattttaacggcttttatttctccattcagagaggatcgggacatggttagagcgctctttcctaaaggtgagttcttcgaaatttatgtgaagtgcccgctgcatgtttgtgaacagcgcgatccaaaagggctttataaaaaagcgcgaaacggagagatcaaacatttcaccgggatcgattctccgtatgaagcgccgctttcacccgatttcatcattgagtctgaccagacctctatttccgatggagctgatctcatcattaacgcactgcaaaacagaggaattatataa

SEQ ID NO: 26031 - protein, 199 aa, Bacillus subtilis
MTHNPNIIWHPAAISKSDRQSLNGHKSCVLWFTGLSGSGKSVLANAVDEKLYRKGIQSYVLDGDNIRHGLNKDLGFQTGDRIENIRRIGEVAKLFVDSGQMILTAFISPFREDRDMVRALFPKGEFFEIYVKCPLHVCEQRDPKGLYKKARNGEIKHFTGIDSPYEAPLSPDFIIESDQTSISDGADLIINALQNRGII

SEQ ID NO: 26032 - DNA, 603 bp, Clostridium acetobutylicum
  CDS (1)..(603): transl_table=11
atgaataataaaaaaagtacaaatgtagtgtggcaggaaactaaaataaaaagacagaatagagaaaaaatgttaaaacagaagggtgcagttttatggtttactggactttcaggttcaggtaagtcaacggttgcatctgcacttgaaaagaagctttatgaaatggggtacttgacatatttattggatggagacaatttaagatatggtcttaattctgatcttggctttaaaagtgaagacagaactgaaaatataagaagagtatcagaagttgcaaaactgtttgctgatgcaggaatcataacaataacaacatttatttctccattcatagaggatagaaataatgcaagaaagcttttagggaaagattttgtagaggtatatatagattgtcctattgaagtctgtgagaaacgagacccaaaaggcatatataaaaaagctagaaatggtgagatcaaaaattttactggcatcgattcaccttatgaaaaaccagaaaagccagaaattacggttgaaacgtataaggatactgaagaaaaatgcgttgacaatataattgaatatctaaaacaacataaaattttatag

SEQ ID NO: 26033 - protein, 200 aa, Clostridium acetobutylicum
MNNKKSTNVVWQETKIKRQNREKMLKQKGAVLWFTGLSGSGKSTVASALEKKLYEMGYLTYLLDGDNLRYGLNSDLGFKSEDRTENIRRVSEVAKLFADAGIITITTFISPFIEDRNNARKLLGKDFVEVYIDCPIEVCEKRDPKGIYKKARNGEIKNFTGIDSPYEKPEKPEITVETYKDTEEKCVDNIIEYLKQHKIL

SEQ ID NO: 26034 - DNA, 606 bp, Escherichia coli O157
  CDS (1)..(606): transl_table=11
atggcgctgcatgacgaaaacgtcgtctggcatagccatccggtcactgtgcaacaacgcgagctacaccacggtcatcgtggtgtagtgctgtggtttaccggcctctccgggtccggtaaatcaacggtcgccggggcgctggaggaggcgttacataaactcggcgtcagtacgtatctgctggatggcgacaatgttcgccacggattatgcagcgatctcggttttagcgatgccgatcgtaaagagaatatccgtcgcgtcggtgaagtggcgaatttgatggttgaagccggactggtggtgctgaccgcatttatctcgccacaccgcgccgaacgccagatggttcgcgaacgcgtaggagaagggcgctttatcgaagtgtttgtcgatacgccgctggcgatttgcgaagcccgcgatccaaaaggcttatataagaaagcgcgtgccggtgaactgcgcaactttacgggaatagattccgtttacgaagcgcctgaatcggcagaaattcatctcaatggtgaacaattagtaacaaatttggtacagcaattattagatctgttgagacagaacgatattatcagatcctga

SEQ ID NO: 26035 - protein, 201 aa, Escherichia coli O157
MALHDENVVWHSHPVTVQQRELHHGHRGVVLWFTGLSGSGKSTVAGALEEALHKLGVSTYLLDGDNVRHGLCSDLGFSDADRKENIRRVGEVANLMVEAGLVVLTAFISPHRAERQMVRERVGEGRFIEVFVDTPLAICEARDPKGLYKKARAGELRNFTGIDSVYEAPESAEIHLNGEQLVTNLVQQLLDLLRQNDIIRS

SEQ ID NO: 26036 - DNA, 606 bp, Escherichia coli O6
  CDS (1)..(606): transl_table=11
atggctctgcatgacgaaaacgtcgtctggcatagccacccagtaactccgcaacaacgcgaacagcaccacggtcatcgtggtgttgtgctgtggtttaccggcctctctggttccggtaaatcaaccgtcgcgggggcgctggaggaggcgttacataaacttggcgtcagtacgtatctgctggatggcgacaacgttcgccacggattatgcagcgatctcggttttagcgatgccgaccgtaaagagaatatccgtcgcgtcggtgaagtggcgaatttgatggttgaagccggactggtggtgctgaccgcatttatctcgccacaccgcgccgaacgccagatggttcgcgaacgcgtaggagaagggcgctttatcgaagtgtttgtcgatacgccgctggcgatttgcgaagcccgcgatccaaaaggtttatataagaaagcgcgtgccggtgaactgcgcaactttacgggaatagattccgtttacgaagcgcctgaatcggcagaaattcatctcaatggtgaacaattagtaacaaatttggtacagcaattattagatctgttgagacagaacgatattatcagatcctga

SEQ ID NO: 26037 - protein, 201 aa, Escherichia coli O6
MALHDENVVWHSHPVTPQQREQHHGHRGVVLWFTGLSGSGKSTVAGALEEALHKLGVSTYLLDGDNVRHGLCSDLGFSDADRKENIRRVGEVANLMVEAGLVVLTAFISPHRAERQMVRERVGEGRFIEVFVDTPLAICEARDPKGLYKKARAGELRNFTGIDSVYEAPESAEIHLNGEQLVTNLVQQLLDLLRQNDIIRS

SEQ ID NO: 26038 - DNA, 624 bp, Lactobacillus plantarum
  CDS (1)..(624): transl_table=11
atggtaaaatcagataatattacttggcatcaatcgcaagttagcaaggccgaacggcaagcgctgaaccatcataagagtgtggttttatggtttactggcctgtccggctccggtaagtcgacgattgcgaatgccgttgaaaaagcattatttgaccaacaagttggtagttacgttttagacggcgacaatatgcgttttggcttgaataagaatttaggcttctcagctgaagaccgtgaagaaaatattcgccgaatcggcgaagttgccaaactatttgtcgatgctggcgtgattacgttgacggctttcatttcaccatatcgggccgaccgtgataaagtgcgggcgaaccttgaggtcgatgagtttattgaagtgttcgtcgacacgccgcttgaagtttgtgaacaacgagatgtgaaacaattgtacgcgaaggcgcgtcgtggtgaaatcacgggctttacaggcatcgatgcaccatacgaagcacctatcgatcctgagattacgattgacacgtccaaacaaccactgaccgcttccgtccaacaagtattgaattacttggcggaacaccattatgtcagtttggttactgcaaatgaaaactaa

SEQ ID NO: 26039 - protein, 207 aa, Lactobacillus plantarum
MVKSDNITWHQSQVSKAERQALNHHKSVVLWFTGLSGSGKSTIANAVEKALFDQQVGSYVLDGDNMRFGLNKNLGFSAEDREENIRRIGEVAKLFVDAGVITLTAFISPYRADRDKVRANLEVDEFIEVFVDTPLEVCEQRDVKQLYAKARRGEITGFTGIDAPYEAPIDPEITIDTSKQPLTASVQQVLNYLAEHHYVSLVTANEN

SEQ ID NO: 26040 - DNA, 591 bp, Pseudomonas aeruginosa
  CDS (1)..(591): transl_table=11
atgaatcctcgtgaacatggaaaacgatcgatcgataacgagacacgcagtgcgctcaagcgccaacgcccagcggtcatctggctgaccgggttgagtggcgctggaaaatccactattgcgagtgccctggaactagcgcttttcgaacagaagaaacatacgtttctcctggacggcgacgatctccgccttggcctgtgccgaaaccttggctacagcgacgaagatcgcaccgagaacattcgaagaatcgcggaagtggcaaagatcctgctggaagccggccttatcgtgatcgtggcaaccatctcgccattttcgcgagacaggcgcctctctcgggaacttatcggcatcgagcatttcatcgaggtctttgtcgatacgccgctctcggaatgcgagagaagagatcccaaaggcctgtacaggaaagcacgctcgggcaagatcgaaaacttcaccgggatcgactcgatctacgaaacgcccgcacagccgaacataacgatcgatacactttcagaagaccccgacctggcggtgaagcgaatcatttcctacctggagacgaaccagccagcctga

SEQ ID NO: 26041 - protein, 196 aa, Pseudomonas aeruginosa
MNPREHGKRSIDNETRSALKRQRPAVIWLTGLSGAGKSTIASALELALFEQKKHTFLLDGDDLRLGLCRNLGYSDEDRTENIRRIAEVAKILLEAGLIVIVATISPFSRDRRLSRELIGIEHFIEVFVDTPLSECERRDPKGLYRKARSGKIENFTGIDSIYETPAQPNITIDTLSEDPDLAVKRIISYLETNQPA

SEQ ID NO: 26042 - DNA, 810 bp, Rhodopirellula baltica; identical to SEQ ID NO: 25822
  CDS (67)..(810): transl_table=11

SEQ ID NO: 26043 - protein, 247 aa, Rhodopirellula baltica
MSQSNSDDSASSSTQQAGDGQDDVQQNIVWHAHTVSREDRESKLGQRGVVVWFTGLSGCGKSTIANELDRLLIDRGATCTLLDGDNVRHGLCAPPSVLKEEHGEDFAGRFGLGFGPTDREENIRRIGAVTELFASAGVIVLAAFVSPYQRDRDRVRNTIESSGRAGDFLEVFVDTPLEICKQRDPKGLYQKAIAGEIKNFTGISDPYDAPPSPEIHLKWREGQTPHDQASEIIREMEKRGVLGPAKG

SEQ ID NO: 26044 - DNA, 606 bp, Salmonella typhi
  CDS (1)..(606): transl_table=11
atggcgctgcatgatgagaacgtggtctggcactctcatcccgttactgtcgccgctcgtgaacagctccacggccaccgtggcgtggtgctgtggtttaccggactctccggttcgggaaaatcaacggtggccggcgcgctggaagaggcgttacatcagcgtggcgtcagtacctacctgttggatggcgataatgtgcgccacggtttgtgccgtgatttaggctttagcgatgccgatcgccaggaaaatattcggcgggtaggcgaagtggccagtctgatggcggacgctggcctgattgttttgacggcatttatttctccgcaccgcgccgagcggcaactggtaaaagagcgcgtcggccacgatcgttttatcgagatttatgtcaatacgccgctggctatctgtgaacagcgcgatcctaaaggattgtataaaaaagcgcgcgcgggcgagttgcgtaactttaccggtatcgacgccatttacgaagcgcctgactcgccccaggttcatcttaatggtgaacaattagtaacaaatttggtttcccaattattagacctgctgagacggcgcgatattatcagatcctga

SEQ ID NO: 26045 - protein, 201 aa, Salmonella typhi
MALHDENVVWHSHPVTVAAREQLHGHRGVVLWFTGLSGSGKSTVAGALEEALHQRGVSTYLLDGDNVRHGLCRDLGFSDADRQENIRRVGEVASLMADAGLIVLTAFISPHRAERQLVKERVGHDRFIEIYVNTPLAICEQRDPKGLYKKARAGELRNFTGIDAIYEAPDSPQVHLNGEQLVTNLVSQLLDLLRRRDIIRS

SEQ ID NO: 26046 - DNA, 600 bp, Staphylococcus epidermidis
  CDS (1)..(600): transl_table=11
atgagtgaatcaaatcatattacatggcatgactcagaagttacgaagaaacaaagacagcataaaaatggacacaaaagtgctgttatatggtttacagggctatctgggtcagggaaatcaacggtctctgttgccttagaaaaagaattatttaatgaaggaaaacaaacataccgtttagatggtgataatgtgcgtcatggtcttaataaaaatttagggtttagtcctgaagatcgttcagaaaatattcgacgcattggagaagtagcaaaattaatggtagacgctggagccttaacagttactgcttttatctccccatataaagaagacagagaaggtgttagagcattactagaggataatgagtttatagaagtatatacaaaatgtagtgttgaggaatgtgaaaagagagatcctaaaggattgtataaaaaagcacgatctggggaaatacctgaatttacaggtataagtgcaccttatcaagcacctgaaaaccctgaaattactatagatactgaacacgacactattgaacaatcagtggtacaaattatacgttatcttaaagaacacgaatatatttaa

SEQ ID NO: 26047 - protein, 199 aa, Staphylococcus epidermidis
MSESNHITWHDSEVTKKQRQHKNGHKSAVIWFTGLSGSGKSTVSVALEKELFNEGKQTYRLDGDNVRHGLNKNLGFSPEDRSENIRRIGEVAKLMVDAGALTVTAFISPYKEDREGVRALLEDNEFIEVYTKCSVEECEKRDPKGLYKKARSGEIPEFTGISAPYQAPENPEITIDTEHDTIEQSVVQIIRYLKEHEYI

SEQ ID NO: 26048 - DNA, 648 bp, Vibrio cholerae
  CDS (1)..(648): transl_table=11
atgagtaagcaagcagatagcctgggctttgagcaagatgccaagccagagaatgtggtgtggcatcgtcatgcggtggataaagcgcaacgtgcgacactgaaacagcagcgccctgcggtactctggtttaccggtttatcgggtgcgggcaaatcgaccgtggcaggggcgcttgagaaccgtttagcggcgcttgggtatcacacttatctgctggatggtgataacgtacgccacggtttgtgtagcgatctcggcttttctgaacaggataggcgggaaaacattcgccgcattggtgagcttgccaagctgatgtcggatgcgggtttgattgtgctgaccgcgtttatttcaccccatcgcgctgagcgacaaatggtgcgtgacttgttgccaaatggcgagtttctagaggtgtacgtcaacacatcactcgatgtgtgcgaagcgcgtgacccgaaaggcttgtacaaaaaggcgcgcgccggagaaattcgccaatttactgggattgattccgcctatgaagcgccgctcaatccggatatcgatttaccggcgggtgaaaaaagcgtggatgagttggtggcgcagtgcctacaggcgttagcagagcgtcatatcattcaacgttgggtataa

SEQ ID NO: 26049 - protein, 215 aa, Vibrio cholerae
MSKQADSLGFEQDAKPENVVWHRHAVDKAQRATLKQQRPAVLWFTGLSGAGKSTVAGALENRLAALGYHTYLLDGDNVRHGLCSDLGFSEQDRRENIRRIGELAKLMSDAGLIVLTAFISPHRAERQMVRDLLPNGEFLEVYVNTSLDVCEARDPKGLYKKARAGEIRQFTGIDSAYEAPLNPDIDLPAGEKSVDELVAQCLQALAERHIIQRWV

SEQ ID NO: 26050 - DNA, 624 bp, Vibrio vulnificus
  CDS (1)..(624): transl_table=11
atgagcagcgttatcgcgcaaaaagatgaaaatgtcgtttggcatcaacatgctgtgactaaaacgcagcgcgcagatttaaaacagcaaaagccagccgtgctttggtttacgggattgtctggtgcgggcaaatcgacagtggctggtgcgctggaaaatcggcttgctgaacaaggttttcatacttatctattggatggagacaacgtacgccacggcttgtgcagtgatcttggtttttcgacgcaagatcgtcgtgaaaacattcgccgtatcggtgagttagctaagttgatggctgatgcgggattgatcgtgttgacggcatttatttctcctcaccgcgctgagcgtcagttggtgcgtgatttattgccggaaggggagtttattgaagttttcgtcaatacgtcattagaagtgtgcgaacaacgcgatccaaaaggtttgtataaaaaagcacgtgcaggcgaaattgccaacttcacgggaatcgactctgaatatgaggtaccactcaatccagagattgacctgcctgcgggagaaaaaggcatcgaagcgctggtggatttgctggtggagcagctcactctgcgtggtgtgatttccccacgttag

SEQ ID NO: 26051 - protein, 207 aa, Vibrio vulnificus
MSSVIAQKDENVVWHQHAVTKTQRADLKQQKPAVLWFTGLSGAGKSTVAGALENRLAEQGFHTYLLDGDNVRHGLCSDLGFSTQDRRENIRRIGELAKLMADAGLIVLTAFISPHRAERQLVRDLLPEGEFIEVFVNTSLEVCEQRDPKGLYKKARAGEIANFTGIDSEYEVPLNPEIDLPAGEKGIEALVDLLVEQLTLRGVISPR

SEQ ID NO: 26052 - DNA, 642 bp, Yersinia pestis
  CDS (1)..(642): transl_table=11
gtgccagcccatcagttagatgaccataaccaagaaacgcggtcagacgatgagaatatcgtctggcacccccatgcgatcacccgacaggatcgcgaacaacagcacggtcatcagggcgtagttctttggtttaccggcctgtcgggttccgggaaatccactctggccggtgcgctggaacaagcgttgttcgctcgcggtgtcagtacttacttactggatggtgataacgtgcgccatggcctctgccgcgatttgggcttttctgacgctgatcgtcgtgaaaatatccggcgggttggcgaggtggctaaactgatggttgatgccggtctggtggtcttgacggcgtttatttcccctcatcgggctgaacggaaaatggtacaagatatgctggcatcgggtcagtttattgaggtatttgtcgatacgccgttagcaatttgtgaggcccgtgacccgaaaggcttatacaaaaaagcccgtgccggagagcttaaaaattttacagggatcgattcagtttatgaatcgcctgcgtctcctgatatccatttgcagggtgaacaattagtaacaaatttgattgaacaattgttagacgtactgcgtggtagagctattatcaaatcctaa

SEQ ID NO: 26053 - protein, 213 aa, Yersinia pestis
MPAHQLDDHNQETRSDDENIVWHPHAITRQDREQQHGHQGVVLWFTGLSGSGKSTLAGALEQALFARGVSTYLLDGDNVRHGLCRDLGFSDADRRENIRRVGEVAKLMVDAGLVVLTAFISPHRAERKMVQDMLASGQFIEVFVDTPLAICEARDPKGLYKKARAGELKNFTGIDSVYESPASPDIHLQGEQLVTNLIEQLLDVLRGRAIIKS

SEQ ID NO: 26054 - DNA, 831 bp, Arabidopsis thaliana
  CDS (1)..(831)
atgatcgccgccggagctaaatcgctattagggctttcgatggcttctccaaaagggattttcgatagcaattcaatgagtaattcaagatctgttgttgttgttcgtgcttgtgtttctatggatggatctcaaactctgagtcataacaaaaatggatctattcctgaggttaaatccattaacggtcacacgggacaaaagcaaggacctttgtctacggtcggaaactcgacaaatataaagtggcatgaatgttctgttgagaaagttgatagacagagattgcttgatcagaaaggatgtgtgatttgggtcaccggtcttagtggttcagggaagagtactttggcttgtgctttgaatcagatgttgtatcaaaaggggaagctttgttatattcttgatggtgataatgttaggcatggcttaaaccgtgatcttagctttaaagctgaggatcgtgcagagaatattcgtagagttggagaggttgctaagctttttgcggatgctggaataatctgcattgcgagtttgatatctccttatagaacagatagggacgcttgtcgaagtttgctccccgagggagattttgttgaggtgttcatggatgtaccgcttagtgtttgcgaggcgagggatccaaagggtctttacaagcttgctcgtgcaggaaagatcaaaggttttaccgggatcgatgacccttacgagccaccattgaactgcgagatttctctaggacgtgaaggaggaacttctcctatcgaaatggcggaaaaggtcgtcggatacttagataacaagggttatcttcaagcataa

SEQ ID NO: 26055 - protein, 276 aa, Arabidopsis thaliana
MIAAGAKSLLGLSMASPKGIFDSNSMSNSRSVVVVRACVSMDGSQTLSHNKNGSIPEVKSINGHTGQKQGPLSTVGNSTNIKWHECSVEKVDRQRLLDQKGCVIWVTGLSGSGKSTLACALNQMLYQKGKLCYILDGDNVRHGLNRDLSFKAEDRAENIRRVGEVAKLFADAGIICIASLISPYRTDRDACRSLLPEGDFVEVFMDVPLSVCEARDPKGLYKLARAGKIKGFTGIDDPYEPPLNCEISLGREGGTSPIEMAEKVVGYLDNKGYLQA

SEQ ID NO: 26056 - DNA, 882 bp, Arabidopsis thaliana
  CDS (1)..(882)
atggaaggattagctatcagagcatctcgaccgtcggttttctgttctattccaggtctcggcggcgattcccaccgaaaacctccaagtgacggtttcctcaagctgcctgcgtcgtctattccggcggacagccgaaaattagtagcgaattctacttcctttcatccaatctcagccgttaacgtctctgctcaagcttccctcaccgctgattttcccgccctttcagaaactatactgaaagagggaagaaataacggaaaagagaaagcagagaacatcgtgtggcacgagagttcgatatgcagatgcgacagacaacaacttcttcaacaaaagggttgtgtcgtttggatcactggtctcagtggttcagggaaaagcactgttgcttgtgcactaagtaaagcattgtttgaaagaggcaaacttacttacacactcgacggcgacaatgtccgtcacggccttaaccgtgacctcactttcaaagcagagcaccgcaccgaaaacattagaagaattggtgaggtggctaagttgtttgctgacgtcggagtcatttgtatagcaagtttgatttctccgtaccggagagacagagacgcgtgccggtccttgttacctgacggcgatttcgtcgaggtcttcatggacgttcctcttcatgtgtgcgagtcgagagatccaaaggggttgtacaagcttgcacgtgcaggcaaaatcaaaggcttcactggaatcgacgacccttacgaggcaccagtgaattgcgaggtagtgctgaaacacacaggagacgacgagtcgtgttcgccacgtcagatggctgagaacatcatctcttacctgcaaaacaaaggttatcttgagggctaa

SEQ ID NO: 26057 - protein, 293 aa, Arabidopsis thaliana
MEGLAIRASRPSVFCSIPGLGGDSHRKPPSDGFLKLPASSIPADSRKLVANSTSFHPISAVNVSAQASLTADFPALSETILKEGRNNGKEKAENIVWHESSICRCDRQQLLQQKGCVVWITGLSGSGKSTVACALSKALFERGKLTYTLDGDNVRHGLNRDLTFKAEHRTENIRRIGEVAKLFADVGVICIASLISPYRRDRDACRSLLPDGDFVEVFMDVPLHVCESRDPKGLYKLARAGKIKGFTGIDDPYEAPVNCEVVLKHTGDDESCSPRQMAENIISYLQNKGYLEG

SEQ ID NO: 26058 - DNA, 939 bp, Catharanthus roseus
  CDS (1)..(939)
atgattgggtccgtaaaacgaccggtggtttcgtgcgtgttgccggagtttgactttacggaatcgacggggttaggtaagaagtcaagctccgtcaagctgcctgttaatttcggggccttcggctccggtggtggagaggtgaaattgggttttttggcgccaattaaagcaacggagggttcaaagacgtcgtcatttcaagtcaatggaaaagttgacaattttcgtcatcttcaaccgtccgattgcaattccaatagcgattcaagtttaaataattgcaatggtttcccaggtaaaaagatattacaaacaactaccgttggaaactctactaatatactttggcataaatgtgctgtggaaaaaagtgaaaggcaggaacccctgcagcaaaggggctgtgttatatggattactggtcttagtggttcaggaaagagcaccttggcatgtgctttgagtcgaggcttacatgcaaagggaaaactaacctacattcttgatggtgataatgttcgacatggattgaacagtgatcttagttttaaagcagaagatcgagcggagaatattaggaggattggagaggttgcaaagctctttgctgatgctggagtcatttgcattgcaagtttgatatctccctacagaaagccccccgatgcctgtcgctctttgcttccagaaggggatttcattgaggtattcatggatgtccctctgaaagtctgcgaggcaagggaccctaagggcttatataagcttgcacgagctggtaaaatcaaaggctttactggaattgatgatccttacgagccgccacttaaatcagagattgttctacatcagaagcttggtatgtgtgattctccatgtgatttggctgatatagtgatatcatatctggaggaaaatggatatctaaaggcataa

SEQ ID NO: 26059 - protein, 312 aa, Catharanthus roseus
MIGSVKRPVVSCVLPEFDFTESTGLGKKSSSVKLPVNFGAFGSGGGEVKLGFLAPIKATEGSKTSSFQVNGKVDNFRHLQPSDCNSNSDSSLNNCNGFPGKKILQTTTVGNSTNILWHKCAVEKSERQEPLQQRGCVIWITGLSGSGKSTLACALSRGLHAKGKLTYILDGDNVRHGLNSDLSFKAEDRAENIRRIGEVAKLFADAGVICIASLISPYRKPPDACRSLLPEGDFIEVFMDVPLKVCEARDPKGLYKLARAGKIKGFTGIDDPYEPPLKSEIVLHQKLGMCDSPCDLADIVISYLEENGYLKA

SEQ ID NO: 26060 - DNA, 621 bp, Emericella nidulans
  CDS (1)..(621)
atggccacaaacatcacccaccacgccggcatcacgcgcaatgagcgcaaccagctccgcaagcagaaaggcctcacaatatggctgaccggcctctccgcctccggcaagtctaccattgccgttgagctggagcaccagcttctccagcgcggtctgcacgcctaccgcctcgacggcgacaacgtgcgcttcggcctgaacaaagatctcggtttctccgacgctgatcgcaatgagaacatccggcgcattgcagaagtcgcgaagctcttcgctgacagttcctcaatcgccatcacgagtttcatctctcctttccgggctgaccgtgataccgcgcggaaactgcacgaggtccctacgccgaatgatagcactggtttgccatttgtcgaggtattcgttgatgtgccgattgaggttgctgagaagagagatcccaaggggttgtacaagaaggcccgtgagggaatcatcaaggagttcacgggtattagcagtccgtatgaggcgcctgaaaacccggaggttcatgtgaagaatgtggatctaccgattcaggaggctgtcaagcagattattgactacttggatagcaagaagttgcttgatgcttag

SEQ ID NO: 26061 - protein, 206 aa, Emericella nidulans
MATNITHHAGITRNERNQLRKQKGLTIWLTGLSASGKSTIAVELEHQLLQRGLHAYRLDGDNVRFGLNKDLGFSDADRNENIRRIAEVAKLFADSSSIAITSFISPFRADRDTARKLHEVPTPNDSTGLPFVEVFVDVPIEVAEKRDPKGLYKKAREGIIKEFTGISSPYEAPENPEVHVKNVDLPIQEAVKQIIDYLDSKKLLDA

SEQ ID NO: 26062 - DNA, 636 bp, Penicillium chrysogenum
  CDS (1)..(636)
atgtctaccaacatcaccttccacgctagcgccctgacccgcagcgagcgcaccgagctgcgcaaccagcgaggtctcacaatctggctgaccggactctccgcctccggcaagtcaactctagccgtcgagctggagcaccagctcgtccgcgaccggcgtgtccacgcctaccgcctggacggcgacaacatccgcttcggactgaacaaggaccttggattcagcgaggccgaccgcaacgagaacatccgccgcattgccgaggtcgccaagctgttcgccgactccaactccatcgccattacttccttcatctcgccctaccggaaggatcgtgacactgcccgccagctgcacgaggttgccacgcccggcgaggagaccggtctgcctttcgtcgaggtctatgttgatgtccccgttgaggtggccgagcagcgtgaccccaagggtctgtacaagaaggctcgtgagggtgttattaaggagttcactggtatctcggctccttatgaggcaccggccaaccctgaggttcatgtgaagaactatgagttgcctgttcaggatgctgtgaagcagattattgattaccttgacaccaagggttacttgcctgccaagaaggagtaa

SEQ ID NO: 26063 - protein, 211 aa, Penicillium chrysogenum
MSTNITFHASALTRSERTELRNQRGLTIWLTGLSASGKSTLAVELEHQLVRDRRVHAYRLDGDNIRFGLNKDLGFSEADRNENIRRIAEVAKLFADSNSIAITSFISPYRKDRDTARQLHEVATPGEETGLPFVEVYVDVPVEVAEQRDPKGLYKKAREGVIKEFTGISAPYEAPANPEVHVKNYELPVQDAVKQIIDYLDTKGYLPAKKE

SEQ ID NO: 26064 - DNA, 609 bp, Saccharomyces bayanus
  CDS (1)..(609)
atggctactaatatcacttggcatccaaatcttacctacgacgaacgtaaggaattaagaaaacaagacggctgtactgtttggttgacaggtctaagtgcgtcaggaaaaagtacaatcgcttgtgcactggaacaactactgcttcaaaaaaacttatctgcctataggttggatggtgataacattcgtttcggtttgaataaagatttaggcttctcggaacaggatagaaatgaaaacattcgtagaattagtgaagtatccaagttattcgctgattcatgtgctgtatccatcacttcatttatatctccatatagagtcgatagagacagagcccgtgatttacataaggaagctggcttaaagtttatcgaaatttttgttgatgttccattagaagtcgctgagcaaagagaccctaagggtttgtataagaaagctagagaaggtgtgattaaagagtttaccggtatttcagctccttacgaggccccaaaggccccagagttgcatttaagaactgaccaaaagactgttgaagaatgcgcagctatcatttatgagtacttggtcaatgaaaagatcattcgcaagcatctataa

SEQ ID NO: 26065 - protein, 202 aa, Saccharomyces bayanus
MATNITWHPNLTYDERKELRKQDGCTVWLTGLSASGKSTIACALEQLLLQKNLSAYRLDGDNIRFGLNKDLGFSEQDRNENIRRISEVSKLFADSCAVSITSFISPYRVDRDRARDLHKEAGLKFIEIFVDVPLEVAEQRDPKGLYKKAREGVIKEFTGISAPYEAPKAPELHLRTDQKTVEECAAIIYEYLVNEKIIRKHL

SEQ ID NO: 26066 - DNA, 609 bp, Saccharomyces pastorianus
  CDS (1)..(609)
atggctactaatatcacttggcatccaaatcttacctacgacgaacgtaaggaattaagaaagcaagacggctgtaccgtttggttgaccggtctaagtgcgtcaggaaaaagtacaatagcttgtgcactggaacaattactgcttcaaaaaaacttatctgcttataggttagatggtgataacattcgttttggtttgaataaggatttgggcttctcagaaaaggacagaaatgaaaacattcgtagaattagtgaagtatccaagctattcgctgattcgtgtgctgtatccatcacttcatttatttccccatacagagtcgatagagacagagcccgtgatttacataaggaagcaggcttgaagttcattgaaatttttgttgatgttccattagaagtcgctgagcaaagagaccctaagggtttgtataagaaagccagagaaggtgtgattaaagagttcactggtatttcagctccttacgaagctccaaaggccccagagttgcatttaagaactgaccaaaagactgttgaagaatgtgctgctatcatttatgagtacctggtcaatgagaagattatccggaagcatctataa

SEQ ID NO: 26067 - protein, 202 aa, Saccharomyces pastorianus
MATNITWHPNLTYDERKELRKQDGCTVWLTGLSASGKSTIACALEQLLLQKNLSAYRLDGDNIRFGLNKDLGFSEKDRNENIRRISEVSKLFADSCAVSITSFISPYRVDRDRARDLHKEAGLKFIEIFVDVPLEVAEQRDPKGLYKKAREGVIKEFTGISAPYEAPKAPELHLRTDQKTVEECAAIIYEYLVNEKIIRKHL

SEQ ID NO: 26068 - DNA, 609 bp, Schizosaccharomyces pombe
  CDS (1)..(609)
atggctactaacattacatttcaccctggttccgtcactaaagaagaacgtatcaaatttgtgggtcatcctggtatgaccatttggatgactggattatctgcgtctggaaagtctacaatcgcttgtgctttggaacagtatttacttcagcgtggagttacaacttaccgtttggatggtgataatgttcgtttcggcttaaacagtgatcttggatttagtgaacaagatcgtaacgaaaacattcgtcgcataggtcatgttgccaagcttttcgcagatgcctgtgtagttgcagtaacttccttcatttctccttatcgcaaggatcgtgatcaagcacgcgaatttcataaaaaagatggacttccttttattgaggtttatgttgaatgtccagtggaagttgccgagcagcgtgatccaaagggtttgtacaagcgtgctcgtgctggtgagattaaagaatttacaggaatttctgctccctatgaggctcccatttctcctgaaatcgtggtttcttctcatactcaatcgattgaagagtgtgttgaaaaaatcgtcaattacttgttggaaaaggatttgattactttgaagtaa

SEQ ID NO: 26069 - protein, 202 aa, Schizosaccharomyces pombe
MATNITFHPGSVTKEERIKFVGHPGMTIWMTGLSASGKSTIACALEQYLLQRGVTTYRLDGDNVRFGLNSDLGFSEQDRNENIRRIGHVAKLFADACVVAVTSFISPYRKDRDQAREFHKKDGLPFIEVYVECPVEVAEQRDPKGLYKRARAGEIKEFTGISAPYEAPISPEIVVSSHTQSIEECVEKIVNYLLEKDLITLK

SEQ ID NO: 26070 - DNA, 609 bp, Saccharomyces cerevisiae
  CDS (1)..(609)
atggctactaatattacttggcatccaaatcttacttacgacgaacgcaaggcattgagaaaacaggacggttgtactatttggttaacaggtctaagtgcgtcaggtaaaagtacaatcgcctgtgcgctagaacagttactgctccaaaaaaacttgtctgcatatagattggatggtgacaacattcgttttggattgaacaaggatttgggtttctcagaaaaggacagaaatgaaaacattcgtagaattagcgaagtttctaagctatttgctgattcatgtgctatttcaatcacctcatttatctctccatacagagtcgacagagatagagctcgtgaactacataaggaggctggtttgaagttcattgaaatatttgttgatgttccattagaagtcgctgagcaaagggaccctaagggtttatacaagaaagctagggagggtgtaatcaaggagtttacaggtatttctgccccatatgaagcgccaaaagctccagagctacatttgagaaccgaccagaagacggttgaagaatgtgctaccattatttatgagtacttaatcagtgaaaaaatcatccgtaagcatttgtaa

SEQ ID NO: 26071 - protein, 202 aa, Saccharomyces cerevisiae
MATNITWHPNLTYDERKALRKQDGCTIWLTGLSASGKSTIACALEQLLLQKNLSAYRLDGDNIRFGLNKDLGFSEKDRNENIRRISEVSKLFADSCAISITSFISPYRVDRDRARELHKEAGLKFIEIFVDVPLEVAEQRDPKGLYKKAREGVIKEFTGISAPYEAPKAPELHLRTDQKTVEECATIIYEYLISEKIIRKHL

SEQ ID NO: 26072 - DNA, 1926 bp, Rhizobium meliloti
  CDS (1)..(1926): transl_table=11
atgtcgtatgttcaatctataccgccgcatgacattgaagcgcatctggccgagcacgacaacaagtcgatcctgagattcatcacttgcggctcggtcgacgacggcaaatcgaccctgatcgggcgactgctttacgatgcgaagctggtcttcgaagaccagctcgcaaacctcgggcgtgtcggctctcccggcgccgccaacggcaaggagatcgatctcgccttgcttctcgacgggcttgaggccgagcgcgagcagggcatcaccatcgacgtcgcctatcgctatttcgccacgtccaaacgcaagttcatcgtcgccgatacgcctggccacgaggaatatacgcgcaacatggtgaccggcgcttcgacggcggatctcgccatcatcctcatcgacagccggcagggcattctccagcagacccggcgccactcctatatagcctcactcctcggcatccgccatgtcgtgctggccgtcaacaagatcgatctcgtcgattttaaacaacaggtgtacgaggaaatcgtcgccgactacatggctttcgccaaagagctcggtttcgccagcatacggccaatcccgatctcggcgcgagacggcgacaacgtcatctcggcttccgccaataccccctggtacagaggggcggcgctgctcgaatatctggaaacggtcgaactcgatccgacggaccaggcaaagcctttccgcttcccggttcagatggtcatgcggccgaacgcggattttcgcggctatgccgggcagatctcctgcgggaggatttccgtgggcgatccggtcgtcgtcgcgaagaccgggcagcggacatcggtcaaggcgatcgtgacctatgacggggagcttgcgacggcaggggaaggcgaagcggtgacgctggtcctctctgacgaggtggatgcgtctcgcggcaatatgctcgtggcccctggtgcccggcccttcgtggcggaccagttccaggcgcatgtgatctggttcgatgcgaacccgatgatgccgggacgaagctatatcctgcgcacggagaccgacagcgtcagcgcgacggtcaccacgctcaagcaccaggtcaacatcaacagcttcatccgtgaggcggcgaagtcgctgcagatgaacgaagtgggtgtctgcaacatctcgacacaggcgccgattgccttcgacgcctacaatgacaaccgggcgacgggcaatttcatcatcgtcgaccgggtgacgaatgccacggttggtgcggggttgatcgattttccgctccggcgcgcagacaacgtccactggcatgcgctcgaggtgaacaagagcgcgcgtagcgccatgaaaaatcagctccctgccgttctctggttcaccgggctttccggctccggaaaatcgaccatcgcgaacgagctcgacaggatcctccacgctcagggcaagcatacttacctgctcgacggcgacaatgtgcgtcacggcctcaaccgggacctcggctttaccgaggaggaccgggtagagaacatccgccgcgtggcggaggtggccaagctcatggccgatgccggtctgatcgttctcgtctccttcatctcgccgttccgcgacgagcggcggatggcgcgggaattgatggaggagggcgagttcatcgagatattcgtcgacacgccgctcgacgagtgcgcgcgccgcgatccgaaggggctctacgagaaggcgctcgccggcaagatcgcgaacttcaccggcgtatcctcgtgctatgaggccccggaaaatccggaactccatatacgcaccgtcggccatcaaccgaacgacctggcgctcgcgatcgaggaattccttgaccgcaggattggaggacaaatgacgccgcttcaacgcccaacatag

SEQ ID NO: 26073 - protein, 641 aa, Rhizobium meliloti
MSYVQSIPPHDIEAHLAEHDNKSILRFITCGSVDDGKSTLIGRLLYDAKLVFEDQLANLGRVGSPGAANGKEIDLALLLDGLEAEREQGITIDVAYRYFATSKRKFIVADTPGHEEYTRNMVTGASTADLAIILIDSRQGILQQTRRHSYIASLLGIRHVVLAVNKIDLVDFKQQVYEEIVADYMAFAKELGFASIRPIPISARDGDNVISASANTPWYRGAALLEYLETVELDPTDQAKPFRFPVQMVMRPNADFRGYAGQISCGRISVGDPVVVAKTGQRTSVKAIVTYDGELATAGEGEAVTLVLSDEVDASRGNMLVAPGARPFVADQFQAHVIWFDANPMMPGRSYILRTETDSVSATVTTLKHQVNINSFIREAAKSLQMNEVGVCNISTQAPIAFDAYNDNRATGNFIIVDRVTNATVGAGLIDFPLRRADNVHWHALEVNKSARSAMKNQLPAVLWFTGLSGSGKSTIANELDRILHAQGKHTYLLDGDNVRHGLNRDLGFTEEDRVENIRRVAEVAKLMADAGLIVLVSFISPFRDERRMARELMEEGEFIEIFVDTPLDECARRDPKGLYEKALAGKIANFTGVSSCYEAPENPELHIRTVGHQPNDLALAIEEFLDRRIGGQMTPLQRPT

SEQ ID NO: 26074 - DNA, 1941 bp, Rhizobium sp
  CDS (1)..(1941): transl_table=11
atgcgccacatcatggcaaagagcctcgcacccaccgacggcgtccgcgactatctggcggcgcaggagaagaagtcgctgctgcgcttcctgacctgcggttccgtcgatgatggcaagtcgacgctgatcgggcgcctgctttccgacaccaagcagattttcgaggaccagctcgccgcgctcgaacgcgattcgcgcaagcacggcacgaccggcgacgacatcgatttcgcgctgctggtcgatggcctcgaggctgagcgcgagcaaggcatcaccatcgacgtcgcctaccgcttcttcgccacgccgaagcgcaagttcatcgttgccgacacgcctggccacgaacagtacacccgcaacatggcgaccggcgcgtcgaccgccgacctggccatcgtgctgatcgatgcccggcaaggggtgctgcgccagaccaggcgccattcgatcatcgcttcgctgctcggcatccggcacatcgtgctggccgtcaacaagatcgatcttgtcggattcgaccaggcggtcttcgaacgcatcaccgagtcctaccggcaattctcgcgcgatctcggcttccagaccatcgtgccgatcccgatgtcggcccgctacggcgacaacgtcaccagccgctcggaaagcatggaatggtattccggcccgacgctgatcgagcatctcgaaaccgtgtcggtcgaggaagcggtggtcgagctgccgttccggttcccggtccagtatgtcaaccgccccaatctcgactttcgcggctttgccggcacggtcgcctcgggttctgttgcacccggtgacgaggtcgtcgtcgccaagtccggcaaatcctcgcgcgtcaagcgcatcgtctcctatggcggcgacctggcccaggcagcggccggccaggccgtcacgctcgtccttgacgacgaggtcgagatctcacgcggcaacatgctggtttcgccggctgcacggccgcaggtcgccgaccaattcgccgccaacatcgtctggttcgacgaacacgctttgctgcccggccggtcctacatcctgcgcaccgagaccgaccagaccagcgccaccgtcaccgacctgaaataccggatcaacgtcaacgactttgcccatgaggcggccaagtcgctcgagatgaacgaagtcggcatctgcaacatctcgacgcgctcacccatcgccttcgataccttcgccgagaaccgcacgaccggcgccttcatcctgatcgaccgcatcaccaacgccaccgtcggcgccggcatgatcctgcattcgctgcggcgtgccgaaaacatccattggcagtcgctcgatgtcggcaagcgcgttcgcgccgatatgaagcatcagcggccggctgtcttctggttcaccggactttccggctcgggcaagtcgaccatagccaacctcttcgaaaagaaactcttcgccaccgggcgccatacctacatcctggatggcgacaacgtccgtcacggcctcaatcgcgatctcggctttaccgaggccgatcgcgtcgaaaacatccgccgtgtcgccgaagtggcgcggctgatggctgatgccggactgatcgtcatcgtctccttcatttcgccgttcagcgccgagcggcgcatggcccgcgagttgatggctgacggcgaattcgtcgaggtgttcgtcgacacgccgttcgaggaatgcgccaggcgcgatccgaagggcctgtatgcgcgggcgctgaatggcgaaatcaagaatttcaccggcgtcgattcaccctatgaagctccggaaaaaccggaaatccatctgaagacgctcggcagatcggccgaagagatggtagacgcgctggaacactggctgaacgagcgcgacattgcgcaaccacctcctgccgacaatggtggatccatctga

SEQ ID NO: 26075 - protein, 646 aa, Rhizobium sp
MRHIMAKSLAPTDGVRDYLAAQEKKSLLRFLTCGSVDDGKSTLIGRLLSDTKQIFEDQLAALERDSRKHGTTGDDIDFALLVDGLEAEREQGITIDVAYRFFATPKRKFIVADTPGHEQYTRNMATGASTADLAIVLIDARQGVLRQTRRHSIIASLLGIRHIVLAVNKIDLVGFDQAVFERITESYRQFSRDLGFQTIVPIPMSARYGDNVTSRSESMEWYSGPTLIEHLETVSVEEAVVELPFRFPVQYVNRPNLDFRGFAGTVASGSVAPGDEVVVAKSGKSSRVKRIVSYGGDLAQAAAGQAVTLVLDDEVEISRGNMLVSPAARPQVADQFAANIVWFDEHALLPGRSYILRTETDQTSATVTDLKYRINVNDFAHEAAKSLEMNEVGICNISTRSPIAFDTFAENRTTGAFILIDRITNATVGAGMILHSLRRAENIHWQSLDVGKRVRADMKHQRPAVFWFTGLSGSGKSTIANLFEKKLFATGRHTYILDGDNVRHGLNRDLGFTEADRVENIRRVAEVARLMADAGLIVIVSFISPFSAERRMARELMADGEFVEVFVDTPFEECARRDPKGLYARALNGEIKNFTGVDSPYEAPEKPEIHLKTLGRSAEEMVDALEHWLNERDIAQPPPADNGGSI

SEQ ID NO: 26076 - DNA, 1902 bp, Rhizobium sp
  CDS (1)..(1902): transl_table=11
atgtcgtatctccaatccgtgccgccgcacgatctggcggcgcatctcgccgaccacgacggcaagtcggtgctgcgcttcatcacctgcggttccgtcgacgatggcaagtcgacgctgatcggccggctgctcgtcgacgccaagctggtcttcgaggaccagttgacgaatctcggccgtgtcggctcttcgggcgccgtcaatggcggcgagatcgacctcgccttgctgctcgacgggctcgaggcggagcgcgagcagggcattaccatcgacgtcgcataccgctatttcgccacgtcgaaacgcaaattcatcgtcgccgacacgcccggccacgaggaatatacgcgcaacatggtgaccggcgcttcgacggccgacctggccgtcatcctgatcgacagccgccagggcattctccagcagacccggcgccattcctacatcgcctcgctgctcggcatccgccacgtcgtgctggcggtcaacaagatcgacctcgtcgagttccgacaatcggtctttgacgagatcgcccgtgactacaaggctttcgcgaagaagcttggctttgccagcatccagccgatcccgatcgccgcgcggttcggcgacaacgtgatctcggcatcaccgaacacgccctggtacaaggggccggcgctcctcgaatacctggaaacggtgcagctcgacccacccgcgacggagaggcccttccgctttccggttcaactggtgatgcggccgaacgcgaatttccgcggctatgccgggcagatcgcgtccggcagcgtttcggtcggcgatccggtcgttatcgcgaaatccggacagcgttcgtcggtcaaggcgatcgtcaccttcgacggcaatttgaccaccgccgccgagggcgaggccgtgacgctcgtgctggccgacgaggtcgacgcctcgcgcggcaacatgctggtggcgcccgccgcgaggcccttcgtggccgaccagttccaggcgcatgtcatctggttcgacgccaatccgatgcttcccgggcgcagctacatcctccggaccgagacggacagcgtcagcgcaacggtcaccgcgctcaagcaccaggtgaacatcaacagctttgcccgcgaggcggcgaaatccctgcagatgaacgaggtgggcgtctgcaacatctcgacgcaggcgccgatcgtcttcgacgcctacaaggagagcagggccacgggcaatttcgtcttcgtcgaccgggtgaccaacgcgacggtcggcgccggcatgatcgatttcccgctcaggcgcgccgacaacgtgcattggcaggcgaccgacgtcaacaagggggcgcggtcggcgatgaagagccagcggcccgccgtgctctggttcaccgggctttcgggctccggcaagtcgacgatcgccaacgcgctcgaccggctgctgcatgcccgcggcaagcacacctacatgctcgacggcgacaatgtgcgccacgggctcaaccgcgacctcggcttcaccgaagccgatcgcgtcgagaacatccgccgcgtcgccgaggtcgccaagctgatggccgatgccggcttgatcgtgctcgtctccttcatctcgccgttccgcggcgagcggcgcatggcccgcgaattgatggaggagggcgagttcatcgagatcttcgtcgacacgccgctggaggaatgcgcgcgccgcgacccgaaggccctttacgagaaggcgctcgccggcaagatcgccaatttcaccggcgtctcctcgccctacgaggcgccggagagcccggagctgcatctgaagacggtcgaagaggacccggtcgcactggcgctgaagatcgaggcattcctcgacagacaccgggaggagaaatga

SEQ ID NO: 26077 - protein, 633 aa, Rhizobium sp
MSYLQSVPPHDLAAHLADHDGKSVLRFITCGSVDDGKSTLIGRLLVDAKLVFEDQLTNLGRVGSSGAVNGGEIDLALLLDGLEAEREQGITIDVAYRYFATSKRKFIVADTPGHEEYTRNMVTGASTADLAVILIDSRQGILQQTRRHSYIASLLGIRHVVLAVNKIDLVEFRQSVFDEIARDYKAFAKKLGFASIQPIPIAARFGDNVISASPNTPWYKGPALLEYLETVQLDPPATERPFRFPVQLVMRPNANFRGYAGQIASGSVSVGDPVVIAKSGQRSSVKAIVTFDGNLTTAAEGEAVTLVLADEVDASRGNMLVAPAARPFVADQFQAHVIWFDANPMLPGRSYILRTETDSVSATVTALKHQVNINSFAREAAKSLQMNEVGVCNISTQAPIVFDAYKESRATGNFVFVDRVTNATVGAGMIDFPLRRADNVHWQATDVNKGARSAMKSQRPAVLWFTGLSGSGKSTIANALDRLLHARGKHTYMLDGDNVRHGLNRDLGFTEADRVENIRRVAEVAKLMADAGLIVLVSFISPFRGERRMARELMEEGEFIEIFVDTPLEECARRDPKALYEKALAGKIANFTGVSSPYEAPESPELHLKTVEEDPVALALKIEAFLDRHREEK

SEQ ID NO: 26078 - DNA, 1899 bp, Rhizobium tropici
  CDS (1)..(1899): transl_table=11
atgccatatcctttttcgatatcgccgcatgacatggaagagcatctggtccaagaggacaaaggaccggttcttcgattcattacctgcggttcggtcgatgacggcaaatcgaccttgatcgggcgactgctctgcgatgcgcaactggtcttcgaagaccaattggcagaccttcgccacgggggcatccgcggcggcaatggcgaggaaatcgatttctctctggtgctcgacggccttgaggcggagcgcgaacagggcatcaccatagatgttgcctatcgctatttctccacgtcgaagcgcaagttcatcgttgccgacacgccaggccacttcgaatatacgcgcaacatggcgacgggcgcatcaactgccgaccttgccgtcatcctcgtcgacagccgccaaggcatactccagcaaacacgcaggcattcctatctcgcctcgcttctcggcattcgccatgtcgtcctggctgtgaacaagatcgatctcatcgatttcagcgagccgatatttgatgccattgtggccgaatacgtgcgcttctcggcgaagctgggttttgccagcgtaatggccattccgatgtccgcccgcttcggagacaatgttgtttcgaaatcggggaaattaccctggtatcaaggctccccgcttcttgaatatctggaaacggtggaactcgacgcacctgacaggcaagaaccctttcgttttcctgttcagctcgtcatgcggccgaatgcggattttcgaggctacgcgggccggatcgcatccggaaaaattgcggtcggcgatccggtgatcgttgcaaaatcaggtctgcgatcgtcggtcagggcgatcattgcccctgatggcaaccagatatctgccgcagaaggggaaccggtaaccttggttcttgccgacgaggtagatgtctcgaggggcgacatgctggttgaccccgcctcaagaccttttgtctcggaccaatttcaggcgcatcttatttggttcgatgccaatccgatgctccccggacgaagctatctcttgcggacggagacggacagtgtcagcgccacggtgactgtgctcaagcaccaactaaatgtcgacagcttcgttcgcgaaccggccaaactgcttcagatgaacgaggtgggcgtctgcaacatcatgacgcaacgaccgatcgtctttgacgcctacaaggaaaataggtcaaccggcaatttcatcatcgtcgatagggtaagcagcgcgaccgtcggcgccggcatgattgatttcccgcttcgtcgtgccgacaacgttcattggcaggcgctcgacgtcgacaaggccgcgcggtcggctctcaagaaccaaaagcctgctgtcctttggctcaccggtctgtccggttcgggcaagtcgacgatcgccaatgcactcgaagcgcttctgcatacttgcggcaagcatacctatctattggacggagataacgtacgccacgggcttaatcgtgaccttggctttaccgcagttgatcgggtcgagaacatacgccgcgtcgctgaggtcgccaagttgatggcggacgcagggctgatcgtaatttgctccttcatctcgcccttccgagacgagcggcgtatggcgcgcgagctcatgggcgaaggcgagttcatcgaaatctttgttgacacgcctttagacgaatgtgcgcgccgagatccgaaagggctttataagaaggcctttgccggaaacattgccaatttcaccggcgtctcgtctccctatgaggctccggagaatccggaacttcacctcaaaaccatgggccaggagccagcgaggttagcgcttcagatagaagagttccttcgaagccgaatggaggagaaatag

SEQ ID NO: 26079 - protein, 632 aa, Rhizobium tropici
MPYPFSISPHDMEEHLVQEDKGPVLRFITCGSVDDGKSTLIGRLLCDAQLVFEDQLADLRHGGIRGGNGEEIDFSLVLDGLEAEREQGITIDVAYRYFSTSKRKFIVADTPGHFEYTRNMATGASTADLAVILVDSRQGILQQTRRHSYLASLLGIRHVVLAVNKIDLIDFSEPIFDAIVAEYVRFSAKLGFASVMAIPMSARFGDNVVSKSGKLPWYQGSPLLEYLETVELDAPDRQEPFRFPVQLVMRPNADFRGYAGRIASGKIAVGDPVIVAKSGLRSSVRAIIAPDGNQISAAEGEPVTLVLADEVDVSRGDMLVDPASRPFVSDQFQAHLIWFDANPMLPGRSYLLRTETDSVSATVTVLKHQLNVDSFVREPAKLLQMNEVGVCNIMTQRPIVFDAYKENRSTGNFIIVDRVSSATVGAGMIDFPLRRADNVHWQALDVDKAARSALKNQKPAVLWLTGLSGSGKSTIANALEALLHTCGKHTYLLDGDNVRHGLNRDLGFTAVDRVENIRRVAEVAKLMADAGLIVICSFISPFRDERRMARELMGEGEFIEIFVDTPLDECARRDPKGLYKKAFAGNIANFTGVSSPYEAPENPELHLKTMGQEPARLALQIEEFLRSRMEEK

SEQ ID NO: 26080 - DNA, 1833 bp, Urechis caupo
  CDS (1)..(1833)
atggcgtttctaccgaacggacagctcgccacgaacgtaactttccagactcagcacgtatcgcgagccaagagaggccaggttctcggtcagcgtggtggattccgaggatgcaccgtctggtttacaggtctctcgggagctggtaagacgaccatctctttcgccctggaggagtacctggtcagccagggaatccccacatacagtctggatggtgacaacgtgcgtcatggactcaacaagaacctgggcttcactcaggaagaccgtgaggagaacatccgtcgtatctcagaggttgccaagctcttcgctgatggtggtattgtctgtctgaccagcttcatctccccattcaagagggacagggatctggcccgcagtctgcatgagcaggcaggacttcccttctttgagtgctttgtcgacacgcccctagatgtctgtgaacagcgtgatgttaagggattgtacaagaaagccagagctggccagatcaaaggctttactggcattgaccagcagtacgagtccccagacgccccagaaatccagctatatgctggcaacaagagcattgatgagtgtgtccaagaagttgtctccctcctccagaaaaacggggtagtacctgagtccgctgtcaatatcgtgaaagagctctttgttcctgagagtggtttggaacatgccaaggctgaaattgttgatttaccaacaatggaaataaccaagttggatacgcagtgggttcaagtgctgtcagagggatgggccaccccactcaccggcttcatgcgagaacgtgaatatctccaatctcagcactttggctgcctcctggatggtggcgtcaccaaccaatcgatcccaattgttctgccagtccatacggcagacaaggatcgtcttgaaggctcgtctgcatttgccctcagctatgagggcaagagaattgcgatcctgcgtacaccagagttttatgaacaccgcaaagaggagagatgctcccgccagtttggcacaagcaatgcaggccaaccttatgtcaagatgattatggagagtggagactggttggtgggaggtgacctggaggtgttggagcgtatcacctggaatgatggcctcgatgaatacagacttactcccaatgagctgcgtgccaagttcagagcactcaatgctgatgcagtatttgccttccagctacgtaaccccgtgcacaatggacatgctctgctgatgactgacacacggagacgcctcaccgagagaggatataaaaaaccagtgctgctgctccatccgctcggtggctggaccaaggatgatgatgtacctcttgcctggcgaatgaaacagcaccaggctattttagatgagaaagtgctagacccagactacactgtcatggccatcttcccatcacccatgatgtatgccggaccaacagaagtacaatggcacgctaaagctcggatgtcaacaggggccaacttctacattgtggggcgtgatccagcaggaatgccacacccagaaaccaaacaggatctatacaatgccacacacggagccaaggtattgaccatggcaccagggttaacacagcttgaaatcgtaccattcagagtggctgcctacaacaaaacaaaatcagccatggatttctatgatccagagcgacatgatgagttcatgtttatctctggcactaaaatgaggggcatggccagagcaggagaaactcctcccaatggcttcatggcccccagtgcctggaagatcatggtggaatactacaagaccaaggcgcaacagtcttaa

SEQ ID NO: 26081 - protein, 610 aa, Urechis caupo
MAFLPNGQLATNVTFQTQHVSRAKRGQVLGQRGGFRGCTVWFTGLSGAGKTTISFALEEYLVSQGIPTYSLDGDNVRHGLNKNLGFTQEDREENIRRISEVAKLFADGGIVCLTSFISPFKRDRDLARSLHEQAGLPFFECFVDTPLDVCEQRDVKGLYKKARAGQIKGFTGIDQQYESPDAPEIQLYAGNKSIDECVQEVVSLLQKNGVVPESAVNIVKELFVPESGLEHAKAEIVDLPTMEITKLDTQWVQVLSEGWATPLTGFMREREYLQSQHFGCLLDGGVTNQSIPIVLPVHTADKDRLEGSSAFALSYEGKRIAILRTPEFYEHRKEERCSRQFGTSNAGQPYVKMIMESGDWLVGGDLEVLERITWNDGLDEYRLTPNELRAKFRALNADAVFAFQLRNPVHNGHALLMTDTRRRLTERGYKKPVLLLHPLGGWTKDDDVPLAWRMKQHQAILDEKVLDPDYTVMAIFPSPMMYAGPTEVQWHAKARMSTGANFYIVGRDPAGMPHPETKQDLYNATHGAKVLTMAPGLTQLEIVPFRVAAYNKTKSAMDFYDPERHDEFMFISGTKMRGMARAGETPPNGFMAPSAWKIMVEYYKTKAQQS

SEQ ID NO: 26082 - DNA, 1038 bp, Oryza sativa
  CDS (1)..(1038)
atggaggcctctctcccgtttcaccaccaccaccccgctgcctcctccaccgcggcgcatcacgcggcccgcctcactcctcctcctcctccgcgagacccgcgtgccactgcccgctgggtgccccccgcggccgcgcccgtgcggagccggagcccggcaaatctagggttgccgccccatcctccccgacgcctccgcctccgcctcgcgccgccgaggataaccgctgcagtcacgggagggccgcgtcgcccccgccgccgagccccgcctcccttggaatgcgccggcggcagcagcagcagcctacgacgaccgcgtgaggaggaggaggaggaggaggaggaggagcgctcttcgacggcgcacgcgggggtgagcctagtgggcgagaacaaagttttgcaaatgtcatcaattgtgccgaaggcgtccaatatcttctggcatgattgtgcagttggccaggctgatcggcagaagctactgaagcagaaaggttgcgttgtttggatcacaggacttagtggttcaggtaaaagtaccctggcatgcacattagatcgagagctccatacaagagggaagctttcttatgttcttgatggtgataatttaagacatggtttgaacaaggatcttggctttaaggcggaagaccgtgctgaaaatatacgcagagttggtgaggtagcaaagctattcgcagatgcaggcctagtatgcattgcaagtttcatatctccgtataggagagaccgtgagtcttgtcgtgcattattgtcagatggtagctttattgaagttttcttgaacatgcccttggaattgtgtgagtcaagggatcctaagggcctttataagcttgctcgtgcaggaaaaataaagggttttactggaattgatgacccttatgaatcaccattaaactctgagattgagatcaaagaagtggatggtgtatgcccttcaccatcggacatggcaggacaagtagtcacttatctagaggagaaagggtttctgcatgattag

SEQ ID NO: 26083 - protein, 345 aa, Oryza sativa
MEASLPFHHHHPAASSTAAHHAARLTPPPPPRDPRATARWVPPAAAPVRSRSPANLGLPPHPPRRLRLRLAPPRITAAVTGGPRRPRRRAPPPLECAGGSSSSLRRPREEEEEEEEEERSSTAHAGVSLVGENKVLQMSSIVPKASNIFWHDCAVGQADRQKLLKQKGCVVWITGLSGSGKSTLACTLDRELHTRGKLSYVLDGDNLRHGLNKDLGFKAEDRAENIRRVGEVAKLFADAGLVCIASFISPYRRDRESCRALLSDGSFIEVFLNMPLELCESRDPKGLYKLARAGKIKGFTGIDDPYESPLNSEIEIKEVDGVCPSPSDMAGQVVTYLEEKGFLHD

SEQ ID NO: 26084 - DNA, 915 bp, Oryza sativa
  CDS (1)..(915)
atgcttgccagggatctccccatcccgtgctccggcgccggcggccgccgtgcaccggcggctgctgccgatggccgcctcgccggaggggtactgaggccaccgtggggaggagtagctgccggcgtgaggctcgtcgcagcggcgaggccaatgagcgtcgtgacggcggcggcggccggaagcagctgggacaggaaggctggccggtcggaggcggccgtgccggcggcggcgccggtcgacgggaaggacgacgacgatgtgttgccagttttaaacaagctcatgacctcaactgtcggtaaatcaacaaacatccgatggcatgactgcccagtaaaccagcttgacagacaaaagttgctgaaccagaagggctgtgttgtttggatcactggcctaagtggttcaggaaaaagcacccttgcatgtgcactgagccgtgagctgcactcaagagggcatctgacctatgttcttgacggcgacaatctccggcacggcctgaacaaagatctcagcttcaaagccaaggatcgtgccgaaaatatacgcagagttggagaagtggcaaagctgtttgcagatgctggattgatctgcattactagtttgatatcaccctataagagtgatcgaagcgcctgccgcaaattactacccaattcttcgttcattgaggtgttcctgaatgtcccacttgaagtatgtgaagaaagggatccaaaaggcctgtacaagcttgctcgtgccggcaaaatcaaaggctttacgggaatagatgatccttatgaaacaccttcagattgtgagattgtgatacagtgcaaagttggggactgcccttcacctaaatcaatggctgatcaagtagtgtcatatcttgaagccaatggattctttcagaactag

SEQ ID NO: 26085 - protein, 304 aa, Oryza sativa
MLARDLPIPCSGAGGRRAPAAAADGRLAGGVLRPPWGGVAAGVRLVAAARPMSVVTAAAAGSSWDRKAGRSEAAVPAAAPVDGKDDDDVLPVLNKLMTSTVGKSTNIRWHDCPVNQLDRQKLLNQKGCVVWITGLSGSGKSTLACALSRELHSRGHLTYVLDGDNLRHGLNKDLSFKAKDRAENIRRVGEVAKLFADAGLICITSLISPYKSDRSACRKLLPNSSFIEVFLNVPLEVCEERDPKGLYKLARAGKIKGFTGIDDPYETPSDCEIVIQCKVGDCPSPKSMADQVVSYLEANGFFQN

SEQ ID NO: 26086 - DNA, 822 bp, Brassica napus
  CDS (1)..(822)
atgattgctgccggagctaaatcgatgctgggtcttttaattgcatcgcccaaaggagtttccgacagcaattcgagatctgtcggtgttcttcgtgcctgcgtttccatggaaggatcccaaacgatgagccataacaaaaacggatctattcctgagcttaaagctgttaatggccacacaggacaaaaacaaggaccgttgtctacggtcggaaactcgacgaacataaagtggcatgagtgtcctgtcgagaaagttgatagacagaggttgcttgaccagaagggatgtgtgatttgggtcactggtcttagtggttcagggaagagcactttggcttgtgctttgaaccagaagttgtaccaaaagggaaagctttgttatgttcttgacggtgataacgtaaggcatggtttaaaccgtgatctcagctttaaagcggaagatcgtgccgagaacattcgtagagtcggagaggttgctaagcttttcgctgacgctgggatcatctgcattgcaagtttaatttctccttacagaatagacagggacgcttgtcggtctttgcttcctgaaggagactttgttgaggtgtacatggatgtatcgcttgaggtttgtgaggctagggatccaaagggtctctacaagcttgctcgtgcaggaaagatcaaaggtttcaccgggattgatgatccttatgagccaccattgaattgcgagatttctctaggtcaagaaggaacaggaacttcaccgatcgaaatggcggaaacagtcgttgcgtacttagaacacaagggttaccttaatgcataa

SEQ ID NO: 26087 - protein, 273 aa, Brassica napus
MIAAGAKSMLGLLIASPKGVSDSNSRSVGVLRACVSMEGSQTMSHNKNGSIPELKAVNGHTGQKQGPLSTVGNSTNIKWHECPVEKVDRQRLLDQKGCVIWVTGLSGSGKSTLACALNQKLYQKGKLCYVLDGDNVRHGLNRDLSFKAEDRAENIRRVGEVAKLFADAGIICIASLISPYRIDRDACRSLLPEGDFVEVYMDVSLEVCEARDPKGLYKLARAGKIKGFTGIDDPYEPPLNCEISLGQEGTGTSPIEMAETVVAYLEHKGYLNA

SEQ ID NO: 26088 - DNA, 624 bp, Glycine max
  CDS (1)..(624)
atggcaactctgagcaattcaactaatatcttttggcaagattgtcaaataggaaggcctgaaaggcagaagctacttaaccaaaagggatgtgttgtatggattactggactcagcggatcaggaaaaagcacattggcatgctccctaagcagagaactgcactcaaggggaaagttatcttatgtccttgatggagataaccttcggcatggactaaacaaggatcttggttttaaagctgaagatcgcactgaaaatattcgcagaactggagaagtggcaaaactcttcgctgatgctggtttaatatgtgttgctagtctgatatctccttacagaagagatcgagacacttgccgtgccatgttacctgatgcaaattttattgaggttttcatgaacatgcctctagaattgtgcgaggcacgagatccaaaaggcctctataagcttgctcgtgcagggaaaatcaaaggttttaccggcattgatgatccttatgaaccgcccataaattgtgagattgaaataaagcaggaaaatgggaattgtccaacacctactatgatggctggacaagtagttacttacttggagaataaaggatttcttgaatcttag

SEQ ID NO: 26089 - protein, 207 aa, Glycine max
MATLSNSTNIFWQDCQIGRPERQKLLNQKGCVVWITGLSGSGKSTLACSLSRELHSRGKLSYVLDGDNLRHGLNKDLGFKAEDRTENIRRTGEVAKLFADAGLICVASLISPYRRDRDTCRAMLPDANFIEVFMNMPLELCEARDPKGLYKLARAGKIKGFTGIDDPYEPPINCEIEIKQENGNCPTPTMMAGQVVTYLENKGFLES

SEQ ID NO: 26090 - DNA, 813 bp, Zea mays
  CDS (1)..(813)
atggcctcactccccgttcctcacactcttccgcgggcctcgccagcgatagtgggcgccgcgagggggagggccgcggtgcgcgtacgcactgccaccgcggcattgggcggtaggtgcggcggcggcggcggaatggagcagcgccacggggaggccccgcacagcccagtgaaggagaagcctgtaatgtcaaacattgggaaatcgactaatattttatggcacaattgcttgattggacaatctgatagacagaaattgctgggacaaaaaggctgtgtcgtatggataacaggactcagtggttcagggaaaagtactcttgcatgtgcactgagtcgtgagttgcattgcagaggccacctcacgtatgtacttgatggtgacaacctcagacatggcctaaatagagatttaagctttaaggcagaagaccgtgcagaaaatatacgaagagttggtgaagtggcaaagcttttttctgatgctggtgtcatatgcattgctagcttgatatctccatacaggagagatcgtgatgcatgccgtgctctacttccacattctaactttattgaagtatttattgatttgcccctaaaaatttgtgaagctcgtgatcctaaaggcctgtacaagcttgcacgtacaggaaagattaaaggtttcactggaattgatgatccatacgaaccaccaattaatggtgagatagtaattacgatgaaagatggggaatgcccttcacccaaagcaatggccaagcaagttctatgctaccttgaagagaacggatatttgcaagcttag

SEQ ID NO: 26091 - protein, 270 aa, Zea mays
MASLPVPHTLPRASPAIVGAARGRAAVRVRTATAALGGRCGGGGGMEQRHGEAPHSPVKEKPVMSNIGKSTNILWHNCLIGQSDRQKLLGQKGCVVWITGLSGSGKSTLACALSRELHCRGHLTYVLDGDNLRHGLNRDLSFKAEDRAENIRRVGEVAKLFSDAGVICIASLISPYRRDRDACRALLPHSNFIEVFIDLPLKICEARDPKGLYKLARTGKIKGFTGIDDPYEPPINGEIVITMKDGECPSPKAMAKQVLCYLEENGYLQA

SEQ ID NO: 26092 - DNA, 627 bp, Zea mays
  CDS (1)..(627)
atgtcatccaccgtgccgaagtcatcaaatatcttctggcatgattgtccagttggcaagactgatcgccagaagctactcaagcagaaaggttgtgttgtctggattacaggccttagtggttcaggtaaaagtaccttggcatgtacattaggccgtgagctccacacaagagggaagcttgcatatgtccttgacggtgataacttaagacatggtctgaacaaggatcttggcttcaaagctgaagaccgtgctgaaaatataaggagagttggtgaagtagcaaagttatttgcagatgcgggccttgtatgtattgcaagtttgatatctccatataggagagaccgtgaatcttgccgtgcattgttgtctgatagtagcttcattgaagttttcttgaacatgtccttggaattatgtgaagcaagagatccaaagggcctctataagcttgctcgtgcaggaaaaataaagggttttacaggaatagatgacccttatgaagcaccactgaattgtgagattgagatcaaagaggtagatggtgtatgccctccgcctgctgagatggcagggcaagttgttacttaccttgaggagaaaggcttcctgcacgagtag

SEQ ID NO: 26093 - protein, 208 aa, Zea mays
MSSTVPKSSNIFWHDCPVGKTDRQKLLKQKGCVVWITGLSGSGKSTLACTLGRELHTRGKLAYVLDGDNLRHGLNKDLGFKAEDRAENIRRVGEVAKLFADAGLVCIASLISPYRRDRESCRALLSDSSFIEVFLNMSLELCEARDPKGLYKLARAGKIKGFTGIDDPYEAPLNCEIEIKEVDGVCPPPAEMAGQVVTYLEEKGFLHE

SEQ ID NO: 26094 - DNA, 822 bp, Brassica napus
  CDS (1)..(822)
atgattgctgccggagctaaatcgatgctaggtctttcaattgcatctcccaaaggagtttccgacagcagttcgagatctgtcggtgttcttcgtgcctgtgtttccatggaaggatcccaaacgatgagccataacaaaaacggatctattcctgagcttaaagctgttaatggccacacaggacaaaaacaaggaccgttgtctacggtcggaaactcgacgaacataaagtggcatgagtgtcctgtcgagaaagttgatagacagaggttgcttgaccagaaaggatgtgtgatttgggtcactggtcttagtggttcagggaagagcactttggcttgtgctttgaaccagaagctgtaccaaaagggaaagctttgttatgttcttgacggtgataacgttaggcatggtttaaaccgtgatctcagctttaaagcggaagatcgtgccgagaacattcgtagagtcggagaggttgctaagcttttcgctgacgctggaatcatctgcattgcaagtttaatttctccttacagaatagacagggacgcttgtcgtactttgcttcctgagggagattttgttgaggtgttcatgaatgtaccgcttgaagtttgtgaggctagggatccaaagggtctgtacaagcttgcacgtgcaggaaagattaaaggttttaccgggattgatgacccttacgagccaccattgaactgtgagatttctctaggagaagaaggaacgggaacttctccgatcgaaatggctgaaacagtcgttgcatacttagaacacaagggttatcttaaggcataa

SEQ ID NO: 26095 - protein, 273 aa, Brassica napus
MIAAGAKSMLGLSIASPKGVSDSSSRSVGVLRACVSMEGSQTMSHNKNGSIPELKAVNGHTGQKQGPLSTVGNSTNIKWHECPVEKVDRQRLLDQKGCVIWVTGLSGSGKSTLACALNQKLYQKGKLCYVLDGDNVRHGLNRDLSFKAEDRAENIRRVGEVAKLFADAGIICIASLISPYRIDRDACRTLLPEGDFVEVFMNVPLEVCEARDPKGLYKLARAGKIKGFTGIDDPYEPPLNCEISLGEEGTGTSPIEMAETVVAYLEHKGYLKA

SEQ ID NO: 26096 - DNA, 834 bp, Brassica napus
  CDS (1)..(834)
atggatgttgcggcggtggggagatgtgccggaaggtgctatgtttctccggcgttcggagagtcgcggaatctgagactatcgctgtctgattcccggagcttggagcccgccggtttgaaatttcgcgggaaaagtcaacggagactgagcttcttccgtcggatcatggcgacagacgagtcgatttctgcgcggccaggtgaaacgcagcaaatcaacggaaacatcgtctggcattcttgtcccatcactaaatgcgatagacaagaactgattaaccaaaagggttgtgtgatttggattactggcttaagtggctcagggaaaagtagtctggcgtgtgctcttagccgagctttgtacaaccgtggaaagctctcgtatatccttgatggtgacaacgttagacatggtttaaacagcgatcttagtttcaaagcagaagatcgagctgaaaacattagaagagttggtgaagtggccagattgtttgcagatgctggaatcatctgtattgctagtctcatctctccttaccgaaaggaacgagctgcttgtcgtgcattgctaccactaggagatttcattgaggtgttcatggatgtgccactccacgtctgtgaggctagagacccaaagggcttgtacaagcgtgcacgcgctggggaaatcaaaggtttcacaggaatagatgacccttatgaaccacctttggattgcgagattgtgatacaaaacaacagagacgagaattcatcttcatctctttcggaaatggcggagattgttgtgtcctacttagaccagaatggatacctcaagccgtcgtag

SEQ ID NO: 26097 - protein, 277 aa, Brassica napus
MDVAAVGRCAGRCYVSPAFGESRNLRLSLSDSRSLEPAGLKFRGKSQRRLSFFRRIMATDESISARPGETQQINGNIVWHSCPITKCDRQELINQKGCVIWITGLSGSGKSSLACALSRALYNRGKLSYILDGDNVRHGLNSDLSFKAEDRAENIRRVGEVARLFADAGIICIASLISPYRKERAACRALLPLGDFIEVFMDVPLHVCEARDPKGLYKRARAGEIKGFTGIDDPYEPPLDCEIVIQNNRDENSSSSLSEMAEIVVSYLDQNGYLKPS

SEQ ID NO: 26098 - DNA, 834 bp, Brassica napus
  CDS (1)..(834)
atggatgttgcggcggtggggagatgtgccggaaggtgctatgtttctccggcgttcggagagtcgcggaatctgagactatcgctgtctgattcccggagcttggagcccgccggtttgaaatttcgcgggaaaagtcaacggagactgagcttcttccgtcggatcatggcgacagacgagtcgatttctgcgcggccaggtgaaacgcagcaaatcaacggaaacatcgtctggcattcttgtcccatcactaaatgcgatagacaagaactgattaaccaaaagggttgtgtgatttggattactggcttaagtggctcagggaaaagtagtctggcgtgtgctcttagccgagctttgtacaaccgtggaaagctctcgtatatccttgatggtgacaacgttagacatggtttaaacagcgatcttagtttcaaagcagaagatcgagctgaaaacattagaagagttggtgaagtggccagattgtttgcagatgctggaatcatctgtattgctagtctcatctctccttaccgaaaggaacgagctgcttgtcgtgcattgctaccacaaggagatttcattgaggtgttcatggatgtgccactccacgtctgcgaagctagagacccaaagggcttatacaagcgtgcacgcgctggggaaatcaaaggtttcacaggaatagacgacccttatgaaccacctttggattgcgagattgtgatacaaaacaacagagacgagaattcatcttcatctctttcggaaatggcggagattgttgtgacctacttagaccagaatggatacctcaagccgtcgtag

SEQ ID NO: 26099 - protein, 277 aa, Brassica napus
MDVAAVGRCAGRCYVSPAFGESRNLRLSLSDSRSLEPAGLKFRGKSQRRLSFFRRIMATDESISARPGETQQINGNIVWHSCPITKCDRQELINQKGCVIWITGLSGSGKSSLACALSRALYNRGKLSYILDGDNVRHGLNSDLSFKAEDRAENIRRVGEVARLFADAGIICIASLISPYRKERAACRALLPQGDFIEVFMDVPLHVCEARDPKGLYKRARAGEIKGFTGIDDPYEPPLDCEIVIQNNRDENSSSSLSEMAEIVVTYLDQNGYLKPS

SEQ ID NO: 26100 - DNA, 822 bp, Brassica napus
  CDS (1)..(822)
atgattgctgccggagctaaatcgatgctgggtcttttaattgcatcgcccaaaggagtttccgacagcaattcgagatctgtcggtgttcttcgtgcctgcgtttccatggaaggatcccaaacgatgagccataacaaaaacggatctattcctgagcttaaagctgttaatggccacacaggacaaaaacaaggaccgttgtctacggtcggaaactcgacgaacataaagtggcatgagtgtcctgtcgagaaagttgatagacagaggttgcttgaccagaagggatgtgtgatttgggtcactggtcttagtggttcagggaagagcactttggcttgtgctttgaaccagaagctgtaccaaaagggaaagctttgttatgttcttgacggtgataacgttaggcatggtttaaaccgtgatctcagctttaaagcggaagatcgtgccgagaacattcgtagagtcggagaggttgctaagcttttcgctgacgctgggatcatctgcattgcaagtttaatttctccttacagaatagacagggacgcttgtcggactttgcttcctgaaggagactttgttgaggtgtacatggatgtatcgcttgaggtttgtgaggctagggatccaaagggtctctacaagcttgctcgtgcaggaaagatcaaaggtttcaccgggattgatgacccttatgagccaccattgaattgcgagatttctctaggtcaagaaggaacaggaacttcaccgatcgaaatggcggaaacagttgttgcatacttagaacacaagggttaccttaatgcataa

SEQ ID NO: 26101 - protein, 273 aa, Brassica napus
MIAAGAKSMLGLLIASPKGVSDSNSRSVGVLRACVSMEGSQTMSHNKNGSIPELKAVNGHTGQKQGPLSTVGNSTNIKWHECPVEKVDRQRLLDQKGCVIWVTGLSGSGKSTLACALNQKLYQKGKLCYVLDGDNVRHGLNRDLSFKAEDRAENIRRVGEVAKLFADAGIICIASLISPYRIDRDACRTLLPEGDFVEVYMDVSLEVCEARDPKGLYKLARAGKIKGFTGIDDPYEPPLNCEISLGQEGTGTSPIEMAETVVAYLEHKGYLNA

SEQ ID NO: 26102 - DNA, 624 bp, Glycine max
  CDS (1)..(624)
atggcaactctgagcaattcaactaatatcttttggcaagattgtcaaataggaaggcctgaaaggcagaagctacttaaccaaaagggatgtgttgtatggattactggactcagcggatcaggaaaaagcacattggcatgctccctaagcagagaactgcactcaaggggaaagttatcttatgtccttgatggagataaccttcgacatggactaaacaaggatcttggttttaaagctgaagatcgcactgaaaatattcgcagaactggagaagtggcaaaactcttcgctgatgctggtttaatatgtgttgctagtctgatatctccttacagaagagatcgagacacttgccgtgccatgttacctgatgcaaattttattgaggttttcatgaacatgcctctagaattgtgcgaggcacgagatccaaaaggcctctataagcttgctcgtgcagggaaaatcaaaggttttaccggcattgatgatccttatgaaccacccataaactgtgagattgaaataaagcaggaaaatggggattgtccaacacctactatgatggctggacaagtagttacttacttggagaataaaggatttcttgaatcctag

SEQ ID NO: 26103 - protein, 207 aa, Glycine max
MATLSNSTNIFWQDCQIGRPERQKLLNQKGCVVWITGLSGSGKSTLACSLSRELHSRGKLSYVLDGDNLRHGLNKDLGFKAEDRTENIRRTGEVAKLFADAGLICVASLISPYRRDRDTCRAMLPDANFIEVFMNMPLELCEARDPKGLYKLARAGKIKGFTGIDDPYEPPINCEIEIKQENGDCPTPTMMAGQVVTYLENKGFLES

SEQ ID NO: 26104 - DNA, 624 bp, Zea mays
  CDS (1)..(624)
atgtcaaacattgggaaatcgactaatattttatggcacaattgcttgattggacaatctgatagacagaaattgctgggacaaaaaggctgtgtcgtatggataacaggactcagtggttcagggaaaagtactcttgcatgtgcactgagtcgtgagttgcattgcagaggccacctcacgtatgtacttgatggtgacaacctcagacatggcctaaatagagatttaagctttaaggcagaagaccgtgcagaaaatatacgaagagttggtgaagtggcaaagcttttcgctgatgctggtgtcatatgcattgctagcttgatatctccatacaggagagatcgtgatgcatgccgtgctctacttccacattctaactttattgaagtatttattgatttgcccctaaaaatttgtgaagctcgtgatcctaaaggcctatacaagcttgcacgtacaggaaagattaaaggtttcactggaattgatgatccatacgaaccaccaattaatggtgagatagtaattaagatgaaagatggggaatgcccttcacccaaagcaatggccaagcaagttctatgctaccttgaagagaacggatatttgcaagcttag

SEQ ID NO: 26105 - protein, 207 aa, Zea mays
MSNIGKSTNILWHNCLIGQSDRQKLLGQKGCVVWITGLSGSGKSTLACALSRELHCRGHLTYVLDGDNLRHGLNRDLSFKAEDRAENIRRVGEVAKLFADAGVICIASLISPYRRDRDACRALLPHSNFIEVFIDLPLKICEARDPKGLYKLARTGKIKGFTGIDDPYEPPINGEIVIKMKDGECPSPKAMAKQVLCYLEENGYLQA

SEQ ID NO: 26106 - DNA, 813 bp, Zea mays
  CDS (1)..(813)
atggcctcactccccgttcctcacactcttccgcgggcctcgccagcgatagtgggcgccgcgagggggagggccgcggtgcgcgtacgcactgccaccgcggcattgggcggtgggtgcggcggcggcggcggaatggagcagcgccacggggaggccccgcacagcccagtgaaggagaagcctgtaatgtcaaacattgggaaatcgactaatattttatggcacaattgcttgattggacaatctgatagacagaaattgctgggacaaaaaggctgtgtcgtatggataacaggactcagtggttcagggaaaagtactcttgcatgtgcactgagtcgtgagttgcattgcagaggccacctcacgtatgtacttgatggtgacaacctcagacatggcctaaatagagatttaagctttaaggcagaagaccgtgcagaaaatatacgaagagttggtgaagtggcaaagcttttcgctgatgctggtgtcatatgcattgctagcttgatatctccatacaggagagatcgtgatgcatgccgtgctctacttccacattctaactttattgaagtatttattgatttgcccctaaaaatttgtgaagctcgtgatcctaaaggcctatacaagcttgcacgtacaggaaagattaaaggtttcactggaattgatgatccatacgaaccaccaattaatggtgagatagtaattaagatgaaagatggggaatgcccttcacccaaagcaatggccaagcaagttctatgctaccttgaagagaacggatatttgcaagcttag

SEQ ID NO: 26107 - protein, 270 aa, Zea mays
MASLPVPHTLPRASPAIVGAARGRAAVRVRTATAALGGGCGGGGGMEQRHGEAPHSPVKEKPVMSNIGKSTNILWHNCLIGQSDRQKLLGQKGCVVWITGLSGSGKSTLACALSRELHCRGHLTYVLDGDNLRHGLNRDLSFKAEDRAENIRRVGEVAKLFADAGVICIASLISPYRRDRDACRALLPHSNFIEVFIDLPLKICEARDPKGLYKLARTGKIKGFTGIDDPYEPPINGEIVIKMKDGECPSPKAMAKQVLCYLEENGYLQA

SEQ ID NO: 26108 - DNA, 846 bp, Zea mays
  CDS (1)..(846)
atgctggcgagggctcctccgccgcggccgtgctccagcgccgtcagcggcgcttgcatcgcccgcggacatccaagagccggcggcgtagtcaagctcgtcgcggccaggccggggacgacgacgacgacggtcgtggcggcggcggcagaggccgcttctaacgggtcagcggcggcggccgtcgcagggatcagcagcagcagcagcagcgcgctggtgacctcgaccgtcgggaaatcgacgaacatcctgtggcatgagtgcgccatcgggcagaaggagcgacagggtctgctgaaccagaagggctgcgtcgtgtggatcactggcctaagcggttcagggaaaagcacgctcgcgtgcgcgctgagccgcgagctgcacggcagaggccacctcacgtacgtcctcgacggcgacaacctcaggcacgggctgaaccgggacctcagcttcggagcagaggaccgcgccgagaacatccgcagagtaggggaagtagcgaagctgttcgccgacgctggcctcgtctgcatcgcgagcctcatatcgccctacagaagcgaccgaagcgcgtgtcgcgatctgctgcccaagcactcgtttatagaggtgttcctggacgtgccgcttcaagtgtgcgaagccagggaccccaaaggcctctacaagctcgcacgcgccggcaaaatcaaagggttcaccggcatcgacgatccttacgaaccgccgtcggactgtgagatagtgatccggtgtaaagtcggcgactgcccttcgcctgaatcgatggctggtcacgttgtgtcgtaccttgagacgaatggtttcctccaggactag

SEQ ID NO: 26109 - protein, 281 aa, Zea mays
MLARAPPPRPCSSAVSGACIARGHPRAGGVVKLVAARPGTTTTTVVAAAAEAASNGSAAAAVAGISSSSSSALVTSTVGKSTNILWHECAIGQKERQGLLNQKGCVVWITGLSGSGKSTLACALSRELHGRGHLTYVLDGDNLRHGLNRDLSFGAEDRAENIRRVGEVAKLFADAGLVCIASLISPYRSDRSACRDLLPKHSFIEVFLDVPLQVCEARDPKGLYKLARAGKIKGFTGIDDPYEPPSDCEIVIRCKVGDCPSPESMAGHVVSYLETNGFLQD

SEQ ID NO: 26110 - DNA, 1026 bp, Zea mays
  CDS (1)..(1026)
atggacgcacacgcacgcctcccggcgcgcccaccccgcccgcgtgcgcgtgcgcgtgcccctgtccgcctcccgtttgccgcctccaccgcaacgcggcgcgcggggtggtggtgccctcgcgatcctcgtgtcgatcccagcggcaggggtgcctgtgcctttgcttctcctggccgttgcccgcgcctcgcggtcgcgcacctgaaccggagccccgcgtcaaatctagggttgcatccgcgccgccccctcctcccgagactcccagcggctggaaccagaacgagggtgacaggcgacgaaagctgcgagggacgccccctcgtcgaatgcactggcgaccgttccgtcgaggagcagccggagcacgcaggagttgagggaaaagctttgaaaatgtcatccaccgtgccgaagtcatcaaatatcttctggcatgattgtccagttggcaagactgatcgccagaagctactcaagcagaaaggttgtgttgtctggattacaggccttagtggttcaggtaaaagtaccttggcatgtacattaggccgtgagctccacacaagagggaagcttgcatatgtccttgacggtgataacttaagacatggtctgaacaaggatcttggcttcaaagctgaagaccgtgctgaaaatataaggagagttggtgaagtagcaaagttatttgcagatgcgggccttgtatgtattgcaagtttgatatctccatataggagagaccgtgaatcttgccgtgcattgttgtctgatagtagcttcattgaagttttcttgaacatgtccttggaattatgtgaagcaagagatccaaagggcctctataagcttgctcgtgcaggaaaaataaagggttttacaggaatagatgacccttatgaagcaccactgaattgtgagattgagatcaaagaggtagatggtgtatgccctccgcctgctgagatggcagggcaagttgttacttaccttgaggagaaaggcttcctgcacgagtag

SEQ ID NO: 26111 - protein, 341 aa, Zea mays
MDAHARLPARPPRPRARARAPVRLPFAASTATRRAGWWCPRDPRVDPSGRGACAFASPGRCPRLAVAHLNRSPASNLGLHPRRPLLPRLPAAGTRTRVTGDESCEGRPLVECTGDRSVEEQPEHAGVEGKALKMSSTVPKSSNIFWHDCPVGKTDRQKLLKQKGCVVWITGLSGSGKSTLACTLGRELHTRGKLAYVLDGDNLRHGLNKDLGFKAEDRAENIRRVGEVAKLFADAGLVCIASLISPYRRDRESCRALLSDSSFIEVFLNMSLELCEARDPKGLYKLARAGKIKGFTGIDDPYEAPLNCEIEIKEVDGVCPPPAEMAGQVVTYLEEKGFLHE

SEQ ID NO: 26112 - DNA, 20 bp, Artificial sequence
  primer
atgagtaccaacctgatgtc

SEQ ID NO: 26113 - DNA, 21 bp, Artificial sequence
  primer
tcatgccctctcccacttgtc

SEQ ID NO: 26114 - protein, 258 aa, Artificial sequence
  consensus sequence
  Variant (2)..(7): Xaa in position 2 to 7 is any amino acid
  Variant (8)..(16): Xaa in position 8 to 16 is any or no amino acid
  Variant (18)..(18): Xaa in position 18 is any amino acid
  Variant (24)..(24): Xaa in position 24 is any amino acid
  Variant (29)..(29): Xaa in position 29 is any amino acid
  Variant (31)..(35): Xaa in position 31 to 35 is any amino acid
  Variant (36)..(36): Xaa in position 36 is any or no amino acid
  Variant (38)..(40): Xaa in position 38 to 40 is any amino acid
  Variant (41)..(41): Xaa in position 41 is any or no amino acid
  Variant (43)..(47): Xaa in position 43 to 47 is any amino acid
  Variant (53)..(53): Xaa in position 53 is any amino acid
  Variant (55)..(55): Xaa in position 55 is any amino acid
  Variant (58)..(59): Xaa in position 58 to 59 is any amino acid
  Variant (60)..(77): Xaa in position 60 to 77 is any or no amino acid
  Variant (81)..(83): Xaa in position 81 to 83 is any amino acid
  Variant (86)..(86): Xaa in position 86 is any amino acid
  Variant (92)..(93): Xaa in position 92 to 93 is any amino acid
  Variant (97)..(97): Xaa in position 97 is any amino acid
  Variant (99)..(102): Xaa in position 99 to 102 is any amino acid
  Variant (104)..(110): Xaa in position 104 to 110 is any amino acid
  Variant (114)..(117): Xaa in position 114 to 117 is any amino acid
  Variant (119)..(120): Xaa in position 119 to 120 is any amino acid
  Variant (121)..(121): Xaa in position 121 is any or no amino acid
  Variant (123)..(127): Xaa in position 123 to 127 is any amino acid
  Variant (128)..(137): Xaa in position 128 to 137 is any or no amino acid
  Variant (139)..(139): Xaa in position 139 is any amino acid
  Variant (141)..(149): Xaa in position 141 to 149 is any amino acid
  Variant (152)..(152): Xaa in position 152 is any amino acid
  Variant (155)..(155): Xaa in position 155 is any amino acid
  Variant (160)..(161): Xaa in position 160 to 161 is any amino acid
  Variant (164)..(164): Xaa in position 164 is any amino acid
  Variant (166)..(166): Xaa in position 166 is any amino acid
  Variant (168)..(168): Xaa in position 168 is any amino acid
  Variant (169)..(169): Xaa in position 169 is any or no amino acid
  Variant (174)..(176): Xaa in position 174 to 176 is any amino acid
  Variant (179)..(179): Xaa in position 179 is any amino acid
  Variant (181)..(199): Xaa in position 181 to 199 is any amino acid
  Variant (200)..(257): Xaa in position 200 to 257 is any or no amino acid
RXXXXXXXXXXXXXXXWXTGLSGXGKSTXAXXXXXXLXXXXGXXXXXLDGDNXRXGLXXXXXXXXXXXXXXXXXXXXLGFXXXDRXENIRRXXEVAXLXXXXGXXXXXXXISPXXXXRXXXRXXXXXXXXXXXXXXXFXEXXXXXXXXXCEXRDXKGLYXXARXGXIXXFTGIXXXYEXPXXXXXXXXXXXXXXXXXXXXXXXXXXXXXXXXXXXXXXXXXXXXXXXXXXXXXXXXXXXXXXXXXXXXXXXXXXXXXL

SEQ ID NO: 26115 - protein, 22 aa, Artificial sequence
  protein pattern
  Variant (2)..(2): Xaa in position 2 is any amino acid
  Variant (4)..(4): Xaa in position 4 is Ile or Val
  Variant (5)..(5): Xaa in position 5 is Phe, His or Tyr
  Variant (6)..(8): Xaa in position 6 to 8 is any amino acid
  Variant (9)..(9): Xaa in position 9 is Ala, Asp, Pro or Ser
  Variant (10)..(10): Xaa in position 10 is Ile, Leu or Val
  Variant (11)..(12): Xaa in position 11 to 12 is any amino acid
  Variant (13)..(13): Xaa in position 13 is Ala or Cys
  Variant (15)..(15): Xaa in position 15 is any amino acid
  Variant (18)..(18): Xaa in position 18 is any amino acid
FXEXXXXXXXXXXEXRDXKGLY

SEQ ID NO: 26116 - protein, 12 aa, Artificial sequence
  protein pattern
  Variant (6)..(6): Xaa in position 6 is Ala, Cys or Ser
  Variant (9)..(9): Xaa in position 9 is Ser or Thr
  Variant (10)..(10): Xaa in position 10 is Ser, Thr or Val
  Variant (11)..(11): Xaa in position 11 is Ile, Leu or Val
  Variant (12)..(12): Xaa in position 12 is Ala, Cys, Gly, Ser or Thr
TGLSGXGKXXXX

SEQ ID NO: 26117 - protein, 16 aa, Artificial sequence
  protein pattern
  Variant (2)..(2): Xaa in position 2 is any amino acid
  Variant (3)..(4): Xaa in position 3 to 4 is any or no amino acid
  Variant (6)..(7): Xaa in position 6 to 7 is any or no amino acid
  Variant (9)..(9): Xaa in position 9 is any amino acid
  Variant (15)..(15): Xaa in position 15 is Ala, Ile or Val
  Variant (16)..(16): Xaa in position 16 is Ala, Gly, Ser or Thr
FXXXDXXRXENIRRXX

SEQ ID NO: 26118 - protein, 20 aa, Artificial sequence
  protein pattern
  Variant (2)..(2): Xaa in position 2 is any or no amino acid
  Variant (4)..(4): Xaa in position 4 is any amino acid
  Variant (6)..(6): Xaa in position 6 is any amino acid
  Variant (7)..(7): Xaa in position 7 is Ile or Leu
  Variant (8)..(9): Xaa in position 8 to 9 is any amino acid
  Variant (13)..(13): Xaa in position 13 is Ile or Val
  Variant (14)..(14): Xaa in position 14 is Asp, Ser or Thr
  Variant (15)..(16): Xaa in position 15 to 16 is any amino acid
  Variant (18)..(18): Xaa in position 18 is Asp, Glu or Gln
  Variant (19)..(19): Xaa in position 19 is any amino acid
AXRXGXXXXFTGXXXXYXXP

SEQ ID NO: 26119 - protein, 14 aa, Artificial sequence
  protein pattern
  Variant (6)..(6): Xaa in position 6 is Ile, Leu or Val
  Variant (8)..(8): Xaa in position 8 is any amino acid
  Variant (11)..(11): Xaa in position 11 is Cys or Asn
  Variant (12)..(12): Xaa in position 12 is any amino acid
  Variant (13)..(13): Xaa in position 13 is Asp, Gly, Asn or Pro
  Variant (14)..(14): Xaa in position 14 is Leu or Pro
LDGDNXRXGLXXXX

SEQ ID NO: 26120 - DNA, 1125 bp, Azotobacter vinelandii
  CDS (1)..(1125): transl_table=11
atgcagctggccttcatcctctacaagtactttcccttcggcgggctgcagcgcgacttcatgcgcatcgccctggaatgccagaagcgcggacacgccatccgtgtctacagcatgtcctgggagggcgagaccccgccgggcttcgaggtgctgatcgcgccgatcagggcgttgttcaaccaccgccgcaacgagaagttcaccgcctgggtgcgggccgacctggcgcggcgtcccgtggaccgggtggtcggcttcaacaagatgcccgggctggacgtctactacgccgccgacccctgctacgaggacaaggcgcagaccctgcgcaacccgctctatcgcctgtgggggcgctaccggcatttcgccggctacgagcgcgcggtgttcgcgccgcaggcgaagacacgcatattgatgatctccgaagtgcagcaaccattgttcgtcaagcattacggcacgccggcggagcgtttccacctgctgcctccgggcatctccgccgaccgccgcgcgccgcccgatgcggacgtgatccgcgccgacttccgccgcgagttcggcctggccggggacgacctgctgctggtgcagatcggctccggcttcaagaccaaggggctggaccgcagcctcaaggcgctcgccgcgctgcccggcgccctgaagaagcgcacccggctgatcgccatcggccaggacgatccgcgccccttccagttgcagatcaaggcgctcggcctgtccgggcgggtcgagattctcaaggggcgcagcgacatcccgcgctttctgctcggcgccgatctgctgatccacccggcctacaacgagaacaccggtaccgtgctgctcgaggcgctggtcgccggactgccggtgctggtcaccgatgtctgcggctatgcccactacatcgccgaggcgggttgcgggcaggtgctgcccagccccttcgagcaggagcgcctgaaccggacgctcgccgcgatgctcgaagacgatgggcagcgagcgctctatcggcgcaacggcctggcctacgccggaaccgccgacctctattccatgccgcagcgggccgccgatctgatcctgacggagcagggcgcgtga

SEQ ID NO: 26121 - protein, 374 aa, Azotobacter vinelandii
MQLAFILYKYFPFGGLQRDFMRIALECQKRGHAIRVYSMSWEGETPPGFEVLIAPIRALFNHRRNEKFTAWVRADLARRPVDRVVGFNKMPGLDVYYAADPCYEDKAQTLRNPLYRLWGRYRHFAGYERAVFAPQAKTRILMISEVQQPLFVKHYGTPAERFHLLPPGISADRRAPPDADVIRADFRREFGLAGDDLLLVQIGSGFKTKGLDRSLKALAALPGALKKRTRLIAIGQDDPRPFQLQIKALGLSGRVEILKGRSDIPRFLLGADLLIHPAYNENTGTVLLEALVAGLPVLVTDVCGYAHYIAEAGCGQVLPSPFEQERLNRTLAAMLEDDGQRALYRRNGLAYAGTADLYSMPQRAADLILTEQGA

SEQ ID NO: 26122 - DNA, 1122 bp, Pseudomonas aeruginosa; strain PAO1
  CDS (1)..(1122)
atgaccctggcgttcatcctctacaaatacttccccttcggcggcctgcagcgtgacttcatgcgcatcgccctggaatgccagcggcgcgggcacgacatccgcgtctatacgctgatctgggagggcgacgtgccggacggcttcgaagtgctggtggccccggtgcgctcgatcttcaaccaccggcgcaacgagaagttcaccgcgtgggtccgcgccgacctggacaggcgcccggtgcagcgggtgatcggcttcaacaagatgcccggactggatgtctactacgccgccgacgcctgtttcgaggaaaaggcccagaccttgcgcaacccgctgtaccgccagtggggccgctaccgccacttcgccggctacgaacgggcagtgttcgacccggcctcgaagaccgagatcctgatgatctccgaggtgcagcagccgctcttcgtcaagcactacggcacccaggccgagcgtttccatctgctgccgccggggatcagtcaggatcgccgggcgccggccaacgccgcggacgtgcgtgcggaattccgccgcgagttcggcctggaggaggacgacctgctgctggtgcagatcggttccggcttcaagaccaagggcctggatcgcagcctgaaggcgctgtccgcgctgcccaaggcgttgcgcaggcgtacccggctgatcgccatcggccaggacgatcccaagccgttcctgctacagatcgccgccctcggtctcaacgaccaggtacagatcctcaaggggcgcagcgatatcccgcgcttcctgctcggcgccgacctgctgatccacccggcctacaacgagaacaccggtacggtgctgctggaggcgctggtctccggcctgccggtgttggtgaccgatgtctgcggctacgcctactacatcgccgaggccgacgccgggcgggtgctgccgagtcccttcgagcaggacagtctcaaccgcctgctcgcggaaatgctggaggacgctccggcgcgcgccgcctggtcgcgcaatgggctggcctacgccgatcacgccgacctctacagcatgccgcagcgcgccgccgacctgatcctcggggaggcctcatga

SEQ ID NO: 26123 - protein, 373 aa, Pseudomonas aeruginosa; strain PAO1
MTLAFILYKYFPFGGLQRDFMRIALECQRRGHDIRVYTLIWEGDVPDGFEVLVAPVRSIFNHRRNEKFTAWVRADLDRRPVQRVIGFNKMPGLDVYYAADACFEEKAQTLRNPLYRQWGRYRHFAGYERAVFDPASKTEILMISEVQQPLFVKHYGTQAERFHLLPPGISQDRRAPANAADVRAEFRREFGLEEDDLLLVQIGSGFKTKGLDRSLKALSALPKALRRRTRLIAIGQDDPKPFLLQIAALGLNDQVQILKGRSDIPRFLLGADLLIHPAYNENTGTVLLEALVSGLPVLVTDVCGYAYYIAEADAGRVLPSPFEQDSLNRLLAEMLEDAPARAAWSRNGLAYADHADLYSMPQRAADLILGEAS

SEQ ID NO: 26124 - DNA, 1122 bp, Pseudomonas aeruginosa PAO1
  CDS (1)..(1122): transl_table=11
atgaccctggcgttcatcctctacaaatacttccccttcggcggcctgcagcgtgacttcatgcgcatcgccctggaatgccagcggcgcgggcacgacatccgcgtctataccctgatctgggagggcgacgtgccggacggcttcgaagtgctggtggccccggtgcgctcgatcttcaaccaccggcgcaacgagaagttcaccgcgtgggtccgcgccgacctggacaggcgcccggtgcagcgggtgatcggcttcaacaagatgcccggactggatgtctactacgccgccgacgcctgtttcgaggaaaaggcccagaccttgcgcaacccgctgtaccgccagtggggccgctaccgccacttcgccggctacgaacgggcagtgttcgacccggcctcgaagaccgagatcctgatgatctccgaggtgcagcagccgctcttcgtcaagcactacggcacccaggccgagcgtttccatctgctgccgccggggatcagccaggatcgccgggcgccggccaacgccgcggacgtgcgtgcggaattccgccgcgagttcggcctggaggaggacgacctgctgctggtgcagatcggttccggcttcaagaccaagggcctggatcgcagcctgaaggcgctgtccgcgctgcccaaggcgttgcgcaggcgtacccggctgatcgccatcggccaggacgatcccaagccgttcctgctacagatcgccgccctcggtctcaacgaccaggtacagatcctcaaggggcgcagcgatatcccgcgcttcctgctcggcgccgacctgctgatccacccggcctacaacgagaacaccggtacggtgctgctggaggcgctggtctccggcctgccggtgttggtgaccgatgtctgcggctatgcccactacatcgccgaggccgacgccgggcgggtgctgccgagtcccttcgagcaggacagtctcaaccgcctgctcgcggaaatgctggaggacgctccggcgcgcgccgcctggtcgcgcaatggcctggcctacgccgatcacgccgacctctacagcatgccgcagcgcgccgccgacctgatcctcggggaggcctcatga

SEQ ID NO: 26125 - protein, 373 aa, Pseudomonas aeruginosa PAO1
MTLAFILYKYFPFGGLQRDFMRIALECQRRGHDIRVYTLIWEGDVPDGFEVLVAPVRSIFNHRRNEKFTAWVRADLDRRPVQRVIGFNKMPGLDVYYAADACFEEKAQTLRNPLYRQWGRYRHFAGYERAVFDPASKTEILMISEVQQPLFVKHYGTQAERFHLLPPGISQDRRAPANAADVRAEFRREFGLEEDDLLLVQIGSGFKTKGLDRSLKALSALPKALRRRTRLIAIGQDDPKPFLLQIAALGLNDQVQILKGRSDIPRFLLGADLLIHPAYNENTGTVLLEALVSGLPVLVTDVCGYAHYIAEADAGRVLPSPFEQDSLNRLLAEMLEDAPARAAWSRNGLAYADHADLYSMPQRAADLILGEAS

SEQ ID NO: 26126 - DNA, 1125 bp, Escherichia coli O157:H7 EDL933
  CDS (1)..(1125): transl_table=11
atgatcgttgctttttgtttatataaatattttccctttggcggtttgcagcgcgattttatgcgtattgctcagacagtcgccgcccgaggtcatcatgttcgggtttatacccagtcgtgggaaggcgaatgccctgatgtatttgaactgatcaaagtgccggttaaatcgcataccaatcacgggcgcaatgcggagtattttgcctgggtgcaaaaacatttacgcgaacatcccgtcgataaagtcgttggattcaacaaaatgccggggctggacgtttattatgccgctgatgtttgttatgccgagaaagtcgcgcaggaaaaaggctttttctatcacctgacgtcacgttatcgccattatgccgcctttgagcgggcaaccttcgaacagggcaagccgacacagctgctgatgctgacagataagcaaatcgccgatttccagaaacattatcagactgaagcggagcgttttcatattctaccaccggggatttatcctgatcgtaaatatagccagcagccagctaatagccgtgaaatcttccgtaagaagaatggaataaccgaacaacaatatttattgttgcaggtcggttcagacttcacgcgtaaaggtgtcgatcgttccattgaagcacttgcttcgttaccggattcgctgcgccacaacacattgctatatgttgttggacaggataaaccgcgaaaatttgaggcgctggcagaaaaacgcggcgtgcgcagtaatgttcacttcttctcggggcgcaacgatgtctcggaattaatggcggcggcggatttattactgcatcctgcctaccaggaagcagcgggaattgtgctactggaagcgattactgcaggattaccggtactaacaacagccgtttgtggctatgcgcattatattgtcgacgccaattgcggcgaggctattgctgagccattccgccaggaaacattgaatgagattttacgcaaagcgttaacgcaatcttcattgcgccaggcctgggcggaaaatgcgcgacattatgctgatacacaagatttatacagtctgccagagaaagcggcggatatcataacgggtggtctggatggttga

SEQ ID NO: 26127 - protein, 374 aa, Escherichia coli O157:H7 EDL933
MIVAFCLYKYFPFGGLQRDFMRIAQTVAARGHHVRVYTQSWEGECPDVFELIKVPVKSHTNHGRNAEYFAWVQKHLREHPVDKVVGFNKMPGLDVYYAADVCYAEKVAQEKGFFYHLTSRYRHYAAFERATFEQGKPTQLLMLTDKQIADFQKHYQTEAERFHILPPGIYPDRKYSQQPANSREIFRKKNGITEQQYLLLQVGSDFTRKGVDRSIEALASLPDSLRHNTLLYVVGQDKPRKFEALAEKRGVRSNVHFFSGRNDVSELMAAADLLLHPAYQEAAGIVLLEAITAGLPVLTTAVCGYAHYIVDANCGEAIAEPFRQETLNEILRKALTQSSLRQAWAENARHYADTQDLYSLPEKAADIITGGLDG

SEQ ID NO: 26128 - DNA, 1125 bp, Salmonella enterica subsp. enterica serovar Typhi str. CT18
  CDS (1)..(1125): transl_table=11
atgagagttgccttttgcttatataaatattttccttttggcggtctgcagcgtgattttatgcatattgctcaaaccgtggcggcgcgaggtcatcaggttcgtgtttatactcagtcatgggaaggggaatgcccggataactttgaattaatccgcgtgccggttaaatcccggacgaaccacggtcgtaacgcagaatattatgcctgggtgcaacaccatttgcgcgaccatcctgtcgatcgggtggttgggttcaataagatgccaggccttgatgtgtattacgccgcagacgtgtgttacgccgaaaaagtcgcacaggaaaaaggatttttctatcgcctgacatcacgctatcggcattatgctgcttttgaacgcgccacgtttgaacacggcaagcagacgcaactattaatgctgacgaataagcagattgctgacttccaaaaacattatcagactgaagcggagcgttttcatattcttcctccggggatttacccggatagaaaatatagccaacagatcccgaacagtcgtcaaatttatcgtcagaaaaatggtatctcagaacagcaaaaattactgttgcaagtagggtctgactttacccgtaaaggtgtggatcgctctattgaagcgctggcatcgctacccgaatctttacggcaaaatacggtgctctgtgttgtcgggcaggataagccgaagaagtttgcagcactggctgaaagaagcggcgtcggcacgaatgtgcattttttctccggacgtaatgatattgcggagttaatggcggcagccgaccttttactgcatccagcctatcaggaagctgctggtattgttttgctggaagccattactgctggtttgccggtgttgacaaccgcggtgtgcggttatgcacattatattgtggatgcaaactgtggcgaagcgatgacggaacctttccgccaggatgcgctaaatgaggttttactcagagcgctgacacagccttccttacgcagcgcctgggctgaaaatgcgcggtattatgctgatacccaggatttatacagcttaccggagaaggccgcagatattatcacaggtgatttagatggttga

SEQ ID NO: 26129 - protein, 374 aa, Salmonella enterica subsp. enterica serovar Typhi str. CT18
MRVAFCLYKYFPFGGLQRDFMHIAQTVAARGHQVRVYTQSWEGECPDNFELIRVPVKSRTNHGRNAEYYAWVQHHLRDHPVDRVVGFNKMPGLDVYYAADVCYAEKVAQEKGFFYRLTSRYRHYAAFERATFEHGKQTQLLMLTNKQIADFQKHYQTEAERFHILPPGIYPDRKYSQQIPNSRQIYRQKNGISEQQKLLLQVGSDFTRKGVDRSIEALASLPESLRQNTVLCVVGQDKPKKFAALAERSGVGTNVHFFSGRNDIAELMAAADLLLHPAYQEAAGIVLLEAITAGLPVLTTAVCGYAHYIVDANCGEAMTEPFRQDALNEVLLRALTQPSLRSAWAENARYYADTQDLYSLPEKAADIITGDLDG

SEQ ID NO: 26130 - DNA, 1125 bp, Salmonella typhimurium LT2
  CDS (1)..(1125): transl_table=11
atgagagttgccttttgcttatataaatattttccttttggcggtctgcagcgtgattttatgcgcattgcccaaaccgtggcggcgcgagggcatcaggttcgtgtttatactcagtcatgggaaggggaatgcccggataactttgaattaatccgcgtgccggttaaatcccggacgaaccacggtcgtaacgcagaatattatgcctgggtgcaacaccatttgcgcgaccaccctgtcgatcgggtggttggattcaataagatgccgggccttgatgtgtattacgccgcagacgtgtgttacgccgaaaaagtcgcacaggaaaaaggatttttctatcgcctgacatcacgctatcggcattatgctgcttttgaacgcgccacgtttgaacacggcaagccgacgcaactattaatgctgacgaataagcagattgctgacttccaaaaacattatcagactgaagcggagcgtttccatattcttcctccggggatttacccggacagaaaatatagccaacagatcccaaacagtcgtcaaatttatcgtcagaaaaatggtatctcagaacagcaaaaattactgttgcaagtagggtctgactttacccgtaaaggtgtggatcgctctattgaagcgctggcatcgctacccgaatctttacggcaaaatacggtgctctatgttgtcgggcaggataagccgaagaagtttgcagcactggctgaaagaagcggcgtcggcacgaatgtgcattttttctccggacgtaatgatatcgcggagttaatggcggcagccgaccttttactgcatccagcctatcaggaagctgctggtattgttttgctggaagccattactgctggtttgccggtgctgacaaccgcggtgtgcggttatgcacattatattgtggatgcaaactgtggcgaagcgatgactgaaccattccgccaggatgcgctaaatgaggttttactcaaagcgctgacacagccttccttacgcaacgcctgggctgaaaatgcgcggtattatgctgatacccaggatttatacagcttaccggagaaggccgcggatattattacaggtgatttagatggttga

SEQ ID NO: 26131 - protein, 374 aa, Salmonella typhimurium LT2
MRVAFCLYKYFPFGGLQRDFMRIAQTVAARGHQVRVYTQSWEGECPDNFELIRVPVKSRTNHGRNAEYYAWVQHHLRDHPVDRVVGFNKMPGLDVYYAADVCYAEKVAQEKGFFYRLTSRYRHYAAFERATFEHGKPTQLLMLTNKQIADFQKHYQTEAERFHILPPGIYPDRKYSQQIPNSRQIYRQKNGISEQQKLLLQVGSDFTRKGVDRSIEALASLPESLRQNTVLYVVGQDKPKKFAALAERSGVGTNVHFFSGRNDIAELMAAADLLLHPAYQEAAGIVLLEAITAGLPVLTTAVCGYAHYIVDANCGEAMTEPFRQDALNEVLLKALTQPSLRNAWAENARYYADTQDLYSLPEKAADIITGDLDG

SEQ ID NO: 26132 - DNA, 1221 bp, Streptomyces coelicolor A3(2)
  CDS (1)..(1221): transl_table=11
atgaggatcgccatggtgtccgagcacgcgagcccgctcgccgcgctcggcggcgtcgacgccggtggacagaacgtctacgtggcccgtctcgccgaggagctggcgggacgcggccacgacgtcacggtctacacccgccgggacgccaccgacctgcccgcccgggtgccgctgcccggcggcgcggtcgtggaacacgtgccggccgggccgcccgtgaccgtccccaaggacgagctcttcccccacatgcccgccttcggcgcccacctggcccgcgcctgggcccgggaacggcccgacgtggtgcacgcccacttctggatgtccggcatggcctcgcagatcggcgcggccccgcacggcatccccctcgtccagaccttccacgccctcggcaccgtcaagcgccgccaccagggcatgcgcgacaccagcccctacgagcgcatcggcatcgaacggcagctcggccggacctgcgaacgggtcctggccacctgcaccgacgaggtcgtcgaactcggcgacatgggcgtcccggcccggcaggtctccgtcgtgccctgcggcgtggacgccgagcacttccaccccgccgccgacaccggccgcacccccgaacgacgcctgcggcaccggctgctcgcctgcggacgactcgtcccccgcaagggctacgaccaggccgtccgcgccctggcccacatccccgacgccgaactcctcatcgccggaggcccgccggccggtgccctggagaccgagcccgaggcccggcgcctgaccggcatcgcccgccgcgccggcgtcgccgaccgggtccggctgctcggcgcggtcgaccccgacgacatgcccgccctgctccgcagctccgacctggtgctgtgcaccccggtgtacgagccgttcggcatcgtgccgctggaggccatggcgtgcggtgtacccgtcctcgccaccgacgtcggcggccaccgcgactccgtcgccgacggcgtcaccggccgcctggtcgccccgcaggaccccggggccgtcgcggcggccgcccgcgaactcctcgccgacgaacggctgcgccgccagtacggcaggaacggccgcgaacgcgtcctgcggcactacacctgggcgcgcgtcgccgacggcgcggaacaggtctaccggctgacccgctccgagcacgcgctgtcgacggaggtggcgtcatga

SEQ ID NO: 26133 - protein, 406 aa, Streptomyces coelicolor A3(2)
MRIAMVSEHASPLAALGGVDAGGQNVYVARLAEELAGRGHDVTVYTRRDATDLPARVPLPGGAVVEHVPAGPPVTVPKDELFPHMPAFGAHLARAWARERPDVVHAHFWMSGMASQIGAAPHGIPLVQTFHALGTVKRRHQGMRDTSPYERIGIERQLGRTCERVLATCTDEVVELGDMGVPARQVSVVPCGVDAEHFHPAADTGRTPERRLRHRLLACGRLVPRKGYDQAVRALAHIPDAELLIAGGPPAGALETEPEARRLTGIARRAGVADRVRLLGAVDPDDMPALLRSSDLVLCTPVYEPFGIVPLEAMACGVPVLATDVGGHRDSVADGVTGRLVAPQDPGAVAAAARELLADERLRRQYGRNGRERVLRHYTWARVADGAEQVYRLTRSEHALSTEVAS

SEQ ID NO: 26134 - DNA, 1125 bp, Shigella flexneri 2a str. 301
  CDS (1)..(1125): transl_table=11
atgatcgttgctttttgtttatataaatattttccctttggcggtttgcagcgcgattttatgcgtattgctcagacagtcgccgcccgaggtcatcatgttcgggtttatacccagtcgtgggaaggcgaatgccctgatgtatttgaagtgatcaaagtgccggttaaatcgcataccaatcacgggcgcaatgcggagtattttgcctgggtgcaaaaacatttacgcgaacatcccgtcgataaagtcgttggattcaacaaaatgccggggctggacgtttattatgccgctgatgtttgttatgccgagaaagtagcgcaggaaaaaggctttttctatcgcctgacgtcacgttatcgccattatgccgcctttgagcgggcaaccttcgaacagggcaagccgacacagctgctgatgctgacagataagcaaatcgccgatttccagaaacattatcagactgaagcggagcgttttcatattctgccaccggggatttatcctgatcgtaaatatagccagcagccagccaatagccgtgaaatcttccgtaagaagaatggaataaccgaacaacaatatttattgttgcaggtcggttcagacttcacgcgtaaaggtgccgatcgttccattgaagcacttgcttcgttaccggattcgctgcgccacaacacattgctatatgttgttgggcaggataaaccgcgaaaatttgaggcactggcagaaaaacgcggcgtgcgcagtaatgttcacttcttctcggggcgcaacgatgtctcggaattaatggcggcggcggatttattactgcatcctgcctaccaggaagcggcgggaattgtgctgctggaagcgattactgcaggattaccggtactaacaactgccgtttgtggctatgcgcattatattgtcgacgctaattgcggcgaggctattgctgagccattccgccaggaaacattgaatgagattttacgcaaagcgttaacgcaatcttcattgcgccaggcttgggcggaaaatgcgcgacattatgctgatacacaagatttatacagtctgccagagaaagcggcggatatcataacgggtggtctggatggttga

SEQ ID NO: 26135 - protein, 374 aa, Shigella flexneri 2a str. 301
MIVAFCLYKYFPFGGLQRDFMRIAQTVAARGHHVRVYTQSWEGECPDVFEVIKVPVKSHTNHGRNAEYFAWVQKHLREHPVDKVVGFNKMPGLDVYYAADVCYAEKVAQEKGFFYRLTSRYRHYAAFERATFEQGKPTQLLMLTDKQIADFQKHYQTEAERFHILPPGIYPDRKYSQQPANSREIFRKKNGITEQQYLLLQVGSDFTRKGADRSIEALASLPDSLRHNTLLYVVGQDKPRKFEALAEKRGVRSNVHFFSGRNDVSELMAAADLLLHPAYQEAAGIVLLEAITAGLPVLTTAVCGYAHYIVDANCGEAIAEPFRQETLNEILRKALTQSSLRQAWAENARHYADTQDLYSLPEKAADIITGGLDG

SEQ ID NO: 26136 - DNA, 1125 bp, Pseudomonas putida KT2440
  CDS (1)..(1125): transl_table=11
atgcaactggctttcgtgctttacaaatatttccccttcggcgggctgcagcgcgatttcatgcgcattgccctggaatgccagaagcggggccaccagatccgtgtgtatacgctgatctgggagggtgacattccgccgggcttcgaagtgctggtggcgccggtgaaggcgattttcaaccaccgccgcaacgagaagctcagcgcctggatggccgccgacctggccaagcgcccggtcgaccgcctgatcggcttcaacaagatgccagggctggacgtgtactacgccgccgacggctgcttcgaagacaaggcgcagaccctgcgcggtgggctgtaccgccgctggggccgctaccggcactttgccgagtacgagcgtgcggtgtttgccaaggacgcccataccgaagtgctgatgatttccgaagtgcagcagccgctgttcatcaagcattacggcaccccggtagaacgtttccacctcctgccgccaggcatttcccaggatcgccgtgcgccggccaatgccgccgagatccgcgctgagttccgcaaggaattcaacctgggggatgacgacctgctgctggtgcagattggctcaggcttcaagaccaaaggcgtggaccgcagcctcaaggcactggctgcgctgccgtcagccctgcgcaaacgcaccaggctgatggtgatcggccaggacgaccccaaggtattccagctgcaaagcgctaccctgggcttgggcgaccaggtgcagtttctcaagggccgcagcgatatcccgcgcttcctgctgggcgccgacctgctgattcacccggcgtacaacgagaataccggtacggtgctgctcgaagcgttggtcgccggcttgccggtgctggtgtccaaggtgtgcggttatgcccactacattgccgaggccgacagcggcctggtgctggacgagccgttcgaacaagagcagctcaacggctatctgcagcgcatgctcgaagacccgcaggcgcgtgccagctggtcgcgcaatggcctggcatttgctgatagcgccgatctgtacagcatgccgcagcatgctgccgacgtgatcctggggcaaaaaaccgcatga

SEQ ID NO: 26137 - protein, 374 aa, Pseudomonas putida KT2440
MQLAFVLYKYFPFGGLQRDFMRIALECQKRGHQIRVYTLIWEGDIPPGFEVLVAPVKAIFNHRRNEKLSAWMAADLAKRPVDRLIGFNKMPGLDVYYAADGCFEDKAQTLRGGLYRRWGRYRHFAEYERAVFAKDAHTEVLMISEVQQPLFIKHYGTPVERFHLLPPGISQDRRAPANAAEIRAEFRKEFNLGDDDLLLVQIGSGFKTKGVDRSLKALAALPSALRKRTRLMVIGQDDPKVFQLQSATLGLGDQVQFLKGRSDIPRFLLGADLLIHPAYNENTGTVLLEALVAGLPVLVSKVCGYAHYIAEADSGLVLDEPFEQEQLNGYLQRMLEDPQARASWSRNGLAFADSADLYSMPQHAADVILGQKTA

SEQ ID NO: 26138 - DNA, 1122 bp, Pseudomonas syringae pv. tomato str. DC3000
  CDS (1)..(1122): transl_table=11
atgcaactggcttttgtactctacaaatactttccatttggcggcctgcaacgcgatttcatgcgcattgcgctggaatgtcagcagcgcggccatcaaattcgcgtttacacgctgatctgggaaggcgacgtgccgcccggttttgaagtgctggtggctccggtcaaggcgttcttcaatcaccggcgcaacgaaaagctcactgcgtggatggaagcggacctggctgtacgcccggtggaccgtctgatcggtttcaacaagatgccagggctggacgtgtattacgccgctgacggttgtttcgaggacaaggcgcaaaacctgcgcagcccgctgtatcgcaagtggggacggtatcgccatttcgccgattacgagcgcgccgtgttcgccagggactcgaaaacccaggtcttgatgatctccgaagtgcagcaaccgctgttcatcaaacattacgacaccccgttgtcgcgcttccacctgctgccaccgggcatttcccaggaccgtcgcgcaccgccagacgctgccgccattcgcgccgactttcgcaaggagttcggccttgccgacgatgaccggttattggtgcaaatcggctccggtttcaagaccaagggcgtagatcgcagcctgaaagcacttgcggctttgccggcaaacatgaagaaacacactcgcttgtttgtaatcggccaggacgaccccaaagtattccagttgcagagcgctgcgctggggttgggcgatcaggtgacgttcatgaaagggcgcagcgatattccgcgcttcctgctcggtgccgacttgctgatccacccggcctacaacgaaaacaccggcacggtattgctcgaagcactggtggccgggctgccggtactggtcagcgcagtgtgtggttacgcccattatattgccgaggccgattgcgggcgggttctggatgagccgttcgatcaggtgcagctcaatcgctatttgaccgacatgcttcaggatgatgctgcacgcggcgcctggagtcgcaacggtctggcctttgctgacacagcagacctttacagcatgccgcaacacgctgcggatgtgattctggcggagcactattga

SEQ ID NO: 26139 - protein, 373 aa, Pseudomonas syringae pv. tomato str. DC3000
MQLAFVLYKYFPFGGLQRDFMRIALECQQRGHQIRVYTLIWEGDVPPGFEVLVAPVKAFFNHRRNEKLTAWMEADLAVRPVDRLIGFNKMPGLDVYYAADGCFEDKAQNLRSPLYRKWGRYRHFADYERAVFARDSKTQVLMISEVQQPLFIKHYDTPLSRFHLLPPGISQDRRAPPDAAAIRADFRKEFGLADDDRLLVQIGSGFKTKGVDRSLKALAALPANMKKHTRLFVIGQDDPKVFQLQSAALGLGDQVTFMKGRSDIPRFLLGADLLIHPAYNENTGTVLLEALVAGLPVLVSAVCGYAHYIAEADCGRVLDEPFDQVQLNRYLTDMLQDDAARGAWSRNGLAFADTADLYSMPQHAADVILAEHY

SEQ ID NO: 26140 - DNA, 1143 bp, Chromobacterium violaceum ATCC 12472
  CDS (1)..(1143): transl_table=11
atgacacgcttggccattgtccgtcagaaatacaaccccgctggcggtgccgagcgctttgtcagccgcgcgctggctgctttgcgcgataagggcgaactggaggtgtcgttgatcgcgcgccgctgggagcctgtggagggcgtcaaggcttatcaggttgatggcccttatctgggcaatgtctggcgggattggagctttgcccggaaagcccggcggatatggctgcgggaagggttcgatcttgtccagtcgcatgaacgcataccggggtgtgatgtttatcgggcaggagatggcgttcatcgtcgttggctgcaactgaggcggcagggcatgtcggcatggggccggtttgtattgtggtgcaacccctaccatcattatatccagcgggctgagtccgagatgttccatcacccccggttgaagcgggtgatctgcaactctcagatggtaaaacgcgagatacagcaatatttcggcctgtccgatcagcagatcgtcgtcatctacaacggggtggacttgcagtccttccatccaggccttcgttccgagcataggcaggcgatgcgcagccagtggggcgtgcctggcgatgcgccgctgctgctgtatgtcggttccggcttcgagcgcaaaggcgtggcgcgcgccttgaaggcattgcaggcgaatccaggagcgtggctgatggtggtggggggtgacaagcggctggctcgctaccgccgattggctgacgaattgggcgtggatgcccgggtggtttttgccggcgcgcaaggagaggtcaggcctttttatggcatggcggatgctttcattctgcctacattgtatgaccctttccccaacgtttgcgtcgaggcgcttgccagcggcttgccggttctgacaacgcgtcagtgtggcgcggcggagttcgtcagacagggagaaaacggttgggtatgcgatgcgttcgacgaggaggcgctggcccgaagcgtggctgagtggttatccgttagccggaactggccggttctggcggaggcggctcggcgcagcgtggaagggttgagcttgggggcgatggcggagcggatgttgaactgttaccgggatttgttgtcggttagcgctgttgcttga

SEQ ID NO: 26141 - protein, 380 aa, Chromobacterium violaceum ATCC 12472
MTRLAIVRQKYNPAGGAERFVSRALAALRDKGELEVSLIARRWEPVEGVKAYQVDGPYLGNVWRDWSFARKARRIWLREGFDLVQSHERIPGCDVYRAGDGVHRRWLQLRRQGMSAWGRFVLWCNPYHHYIQRAESEMFHHPRLKRVICNSQMVKREIQQYFGLSDQQIVVIYNGVDLQSFHPGLRSEHRQAMRSQWGVPGDAPLLLYVGSGFERKGVARALKALQANPGAWLMVVGGDKRLARYRRLADELGVDARVVFAGAQGEVRPFYGMADAFILPTLYDPFPNVCVEALASGLPVLTTRQCGAAEFVRQGENGWVCDAFDEEALARSVAEWLSVSRNWPVLAEAARRSVEGLSLGAMAERMLNCYRDLLSVSAVA

SEQ ID NO: 26142 - DNA, 1119 bp, Rhodopseudomonas palustris CGA009
  CDS (1)..(1119): transl_table=11
atgaagatcgcgctggcgatcgtgtcgctgttcccgagcggcgggctgcagcgagactgcatgggcatcgcccggcggctgatggcgcgcggccacgacgtcaccatcctggcttcacggcggcagggcgagctgccgaccgacctgaagattgagctgctgccggtcagcgcctggagcaatcacggccgcgaccagcgcttcgccgaagcggcggcgcagcgcaaaccggcattcgaccggctcgccggcttcggcaagctgctcgatctcgacgtgctgtactgcgccgatggctgtgacaaggcgcgtccggcgcggtggtccgatcgcttcaccgcgcgtcgccggatcaagcttgggctggaggccgcgagtttcgcgcctgggcggtcgacgcagtgcctgctgctcagccagaaccagctcgacagcttccaacaggcctggggcaccgaatcggagcggctggcgctgatgccgccgacgatcgatcccggccggcggcatcccgagtttcgcgccgacggcagccgcgagcggatccgcggcgagctcggcgtcgtcggcgataccgtcgtctggctggcggtggcggcgcatccgctgaccaaggggctcgaccgcgcggtggcggcgcttgcggcgttcccagaggcgcggctggtggtggccggcgttgccgacgacagcaagcaggggcggctgatgcgccggctcgcggccgacgccaaggtctcggaccgcatcacgctgctcggcatgcgccgcgacattcccgaattgatggcaggggccgatgttctgatccatccggcccgggtcgacaccaccggcactgcgatcctggaggcggtggtcaacggcctgccggtgatcaccaccgcggtgtgcggctatgcgcgccacgtcgcagcagccgatgccggcgtggtgctgccggagccgtttgggcccggcaacctgagcgaggcgctgcgtcaggcgtcggcaccggggcgccgtgcgtcatggagcgagaacggcgcccgctatggcgccagccacgatctctattccgggctcgactgcgccgccgcgatcatcgccggcgagactgcgggcacgccgctgtcctga

SEQ ID NO: 26143 - protein, 372 aa, Rhodopseudomonas palustris CGA009
MKIALAIVSLFPSGGLQRDCMGIARRLMARGHDVTILASRRQGELPTDLKIELLPVSAWSNHGRDQRFAEAAAQRKPAFDRLAGFGKLLDLDVLYCADGCDKARPARWSDRFTARRRIKLGLEAASFAPGRSTQCLLLSQNQLDSFQQAWGTESERLALMPPTIDPGRRHPEFRADGSRERIRGELGVVGDTVVWLAVAAHPLTKGLDRAVAALAAFPEARLVVAGVADDSKQGRLMRRLAADAKVSDRITLLGMRRDIPELMAGADVLIHPARVDTTGTAILEAVVNGLPVITTAVCGYARHVAAADAGVVLPEPFGPGNLSEALRQASAPGRRASWSENGARYGASHDLYSGLDCAAAIIAGETAGTPLS

SEQ ID NO: 26144 - DNA, 1119 bp, Erwinia carotovora subsp. atroseptica SCRI1043
  CDS (1)..(1119): transl_table=11
atgaaaatcgcattctgcgtctataaatactttccttttggcggattacagcgtgattttctgagcatcgcacaaacctgccaaaaacagggtcacgacattcgcgtttacaccagcgagtggcaaggcgacaagccggaaggattcgacatcgttctcgttcccatatcaggccttggcaaccacactcgccatcgccatttttccgactggatacataaccatttacaacaacgtcctgtcgaccgagttgtcgggtttagcaaaatgccaggactggacttctactatgccgcagaaggatgtacggcagaaaaagcggttcaggaaaaaggcttcttttatcgactaacaccccgctaccgcggatatgcggcacttgaacgagatgtgttcgataaaaacagccacacgcgtatgctgatgctgaccccgcgtcaaattgcccatttccagaagcattacggcacacaggatgagcgcttctttatgctgccaccgggtatttcgcaggatagaaagtacagcgcacactctccagatacgcgttcacagttccgtcagcagcaccatctggatgaaaacggatttgttctattacaagtcggttctgacttcaaacgtaaaggcgttggtcgtagcctgaccgctatcgccagcctgcctcaggaactgcgtcaacgcgtaacgctgttagttgtcggccaagacgatcccaaaccctttaaacagcaggctgaacaactcggtattggtaaacaaatacaattcttctcaggccgagatgatattcctgacttcatggcagcagcagacctgttacttcatccagctcatcaggaagccgcaggaatcgtcttgctagaagctatcgcagcagggttaccgatactcgttaccgatgcatgtggttatgcttcttatattgagcgctctcaggccggacaagtcataccagaaccgtttagccagacggcactgaaccacgagttactacacgcactcagtcagccagaaacgcttaaacaatgggcacaaaatgcccgccattttgccgatacagaagatatttatagcctgccagaaaaagcagcgcagttgattattgaatcaatatga

SEQ ID NO: 26145 - protein, 372 aa, Erwinia carotovora subsp. atroseptica SCRI1043
MKIAFCVYKYFPFGGLQRDFLSIAQTCQKQGHDIRVYTSEWQGDKPEGFDIVLVPISGLGNHTRHRHFSDWIHNHLQQRPVDRVVGFSKMPGLDFYYAAEGCTAEKAVQEKGFFYRLTPRYRGYAALERDVFDKNSHTRMLMLTPRQIAHFQKHYGTQDERFFMLPPGISQDRKYSAHSPDTRSQFRQQHHLDENGFVLLQVGSDFKRKGVGRSLTAIASLPQELRQRVTLLVVGQDDPKPFKQQAEQLGIGKQIQFFSGRDDIPDFMAAADLLLHPAHQEAAGIVLLEAIAAGLPILVTDACGYASYIERSQAGQVIPEPFSQTALNHELLHALSQPETLKQWAQNARHFADTEDIYSLPEKAAQLIIESI

SEQ ID NO: 26146 - DNA, 1122 bp, Azoarcus sp. EbN1
  CDS (1)..(1122): transl_table=11
atgcagctcgcgttctgcctgtacaagtacttcccgttcggcggcctgcagcgcgacttcctgcgcatcgcgctggcatgccaggcgcgcggccacgcgatccgcgtctacacgctcgaatggcacggcgaagtgccggccggcttcgaagtgctgcgagtcccggtgcaggcgatcacgaacccgcgccgcaacgagaaattcaccgactgggtgcagcaggacttggcacgccgccccgccgaccgggtcgtcggcttcaacaagatgcccgggctcgacgtctattacgctgccgacccgtgcttcgaggacaaggcgcgcacgctgcgcaacccgctgtaccgcgtcagcgggcgctaccggcatttttcggcgtacgagcgggcggtgttcgcgcctgaagtccacaccgagatcctgctgatctcggccgcgcagcagccgctcttcatgacgcactacggcactccggcgcgccgtttccacctgttgccgcccggcatcgctcccgaccgtcgcgctccgcccaatgccgcgcagatccgtgccgccttccggcgcgagttcagcctcgaagaggacgacctcttggtcgtgcagatcggctccggcttcaagaccaaaggcctcgaccgcagcctgcgggcgctcgcggcgctgcccgaaatgctgaaagagcgcacgcggctgattgcgatcggacaggacgaccccaagccgttcctcgtgcagctgcacacgctcggccttgggaaccgcgtcagcatcctgcagggacgcgacgacatcccgcgcttcctgctcggcgccgacctcttgattcaccctgcctacaacgagaacaccgggacagtgctgctcgaagcgatcgtcgccggcctgccggtgctcgcaagcgccgcctgcggctacgcgcactacatcgccgacgccgatgccggagaagtcgtcccggcaccgttcgagcaggccgcgctcgaccgcctgctcgccgcgatgctcgcggacagcgaaaaccgcgcacgctggagcgccaacggcctcgcgttcgcggagcacgccgacctctacagcctgcccgagcgcgctgcggacgtgatcctgcagggacgcggatga

SEQ ID NO: 26147 - protein, 373 aa, Azoarcus sp. EbN1
MQLAFCLYKYFPFGGLQRDFLRIALACQARGHAIRVYTLEWHGEVPAGFEVLRVPVQAITNPRRNEKFTDWVQQDLARRPADRVVGFNKMPGLDVYYAADPCFEDKARTLRNPLYRVSGRYRHFSAYERAVFAPEVHTEILLISAAQQPLFMTHYGTPARRFHLLPPGIAPDRRAPPNAAQIRAAFRREFSLEEDDLLVVQIGSGFKTKGLDRSLRALAALPEMLKERTRLIAIGQDDPKPFLVQLHTLGLGNRVSILQGRDDIPRFLLGADLLIHPAYNENTGTVLLEAIVAGLPVLASAACGYAHYIADADAGEVVPAPFEQAALDRLLAAMLADSENRARWSANGLAFAEHADLYSLPERAADVILQGRG

SEQ ID NO: 26148 - DNA, 1122 bp, Pseudomonas syringae pv. syringae B728a
  CDS (1)..(1122): transl_table=11
atgcaactggcttttgtactctacaaatacttcccgttcggtggcctgcaacgcgacttcatgcgcatcgcgctggagtgtcagcagcgcggtcatcaggtccgtgtctataccctgatctgggaaggcgatgtgccgcccggtttcgaggtgctggtggcgccggtcaaggcgttcttcaaccatcggcgcaacgaaaagctcagtgcctggatggaggcggacctggccaaacgcccggtggaccgcctgatcggtttcaacaagatgcccggtctggatgtgtattacgccgccgacggctgcttcgaggacaaggcgcagaacctgcgcagcccgctctatcgcaagtggggccgttaccgccactttgccgactacgagcgcgcagtgtttgccagggactcgaaaacccaggtgttgatgatctccgaagtgcagcagccgctgttcatcaagcattacgacaccccgccgtcgcgcttccatttgctgccgccgggtatttcccaggatcgccgcgcgccgccggatgcacctgacattcgtgcaggctttcgcaaggaattcggccttgccgacgatgacctgttattggtgcagatcggctccggtttcaagaccaagggcgtggatcgcagcctcaaggcgctcgcggctctgcctgccgagctgaagaagcgcacgcgactgtttgtaatcggtcaggacgatcccaaagtattccaactgcagagcgcggcgctcggcctgggtgatcaggtgacctttatgaaagggcgcagcgatattccgcgttttctgctgggctccgacctgctgattcatccggcctacaacgaaaacaccgggaccgtgctgctcgaagcgctggttgccggtttgccggtcctggtcagcgcggtctgtggttacgctcactatattgccgaggccgattgcgggcgggtgctggatgagccgttcgatcaggcgcagctcaatcgctacctgtcggagatgcttctggacaacgccgcacgcagcgcgtggtcgcgcaacggcctgacctttgccgacacggcagacctttacagcatgccgcaacacgctgcggatgtgattctggcggagcactattga

SEQ ID NO: 26149 - protein, 373 aa, Pseudomonas syringae pv. syringae B728a
MQLAFVLYKYFPFGGLQRDFMRIALECQQRGHQVRVYTLIWEGDVPPGFEVLVAPVKAFFNHRRNEKLSAWMEADLAKRPVDRLIGFNKMPGLDVYYAADGCFEDKAQNLRSPLYRKWGRYRHFADYERAVFARDSKTQVLMISEVQQPLFIKHYDTPPSRFHLLPPGISQDRRAPPDAPDIRAGFRKEFGLADDDLLLVQIGSGFKTKGVDRSLKALAALPAELKKRTRLFVIGQDDPKVFQLQSAALGLGDQVTFMKGRSDIPRFLLGSDLLIHPAYNENTGTVLLEALVAGLPVLVSAVCGYAHYIAEADCGRVLDEPFDQAQLNRYLSEMLLDNAARSAWSRNGLTFADTADLYSMPQHAADVILAEHY

SEQ ID NO: 26150 - DNA, 1125 bp, Pseudomonas fluorescens Pf-5
  CDS (1)..(1125): transl_table=11
atgcaattggcttttgtcctttataagtatttccccttcggcggcctgcagcgcgatttcatgcgcatcgccctggagtgccagcggcgcgggcatcagatccgtgtctacaccctgatctgggaaggcgatgtccctcccggtttcgaagtgctggtggcgccggtcaaggcgctgttcaaccatcgtcgcaatgaaaagctcagcgcctggatggaggccgacctggccaagcgcccggtggaccggctggtgggtttcaacaagatgccggggctggacgtgtactacgccgccgatggctgtttcgaggacaaggcacagaacctgcggcactccctgtaccggcgctggggccgttaccggcactttgccgagtacgagcgcgcggtgttcgccaaggacgccaagaccgagatcctgatgatctccgaggtccagcagccgctgttcatcaagcactacgacaccccgctggagcgtttccacctgctgccgccggggatcgcccaggaccgccgggcaccggccaacgccgccgagatccgggcggattttcgtcgcgaattcaagctcaaggatgacgacctgctgctggtgcagatcggttccgggttcaagaccaagggtgtggaccgcagcctcaaggccctggcggcattgccctcggcgctgaaaaaacgcacccggctgtttgtaatcggccaggacgaccccaaggtattccaggtgcaaagtgctgcgctggggttgagcgaccaggtgcagttcatgaagggccgcagcgatatcccgcggttcctgctgggcgccgacctgctgattcacccggcctacaacgaaaacaccggcaccgtattgctggaggccctggtggccggcctgccggtgctggtcagcgcggtctgcggttatgcccattacattgccgaggcccagagcggcctggtgctggatgagccgctggaacaggcgcagctcaatcaatacctcaccaccatgttgaccgacgacgctgcacgcgcgacctggagccgaaatggcctggcgttcgccgagacggccgacctttacagcatgccgcagcacgctgcggatgtgattctggcggagcaacaccgatga

SEQ ID NO: 26151 - protein, 374 aa, Pseudomonas fluorescens Pf-5
MQLAFVLYKYFPFGGLQRDFMRIALECQRRGHQIRVYTLIWEGDVPPGFEVLVAPVKALFNHRRNEKLSAWMEADLAKRPVDRLVGFNKMPGLDVYYAADGCFEDKAQNLRHSLYRRWGRYRHFAEYERAVFAKDAKTEILMISEVQQPLFIKHYDTPLERFHLLPPGIAQDRRAPANAAEIRADFRREFKLKDDDLLLVQIGSGFKTKGVDRSLKALAALPSALKKRTRLFVIGQDDPKVFQVQSAALGLSDQVQFMKGRSDIPRFLLGADLLIHPAYNENTGTVLLEALVAGLPVLVSAVCGYAHYIAEAQSGLVLDEPLEQAQLNQYLTTMLTDDAARATWSRNGLAFAETADLYSMPQHAADVILAEQHR

SEQ ID NO: 26152 - DNA, 1122 bp, Pseudomonas syringae pv. phaseolicola 1448A
  CDS (1)..(1122): transl_table=11
atgcaactggcttttgtactctacaaatactttccgttcggcggtctgcaacgcgatttcatgcgcattgctctggagtgccagcagcgcggccaccagatccgcgtctacaccctgatctgggaaggcgatgtgccgcccggttttgaagtgctggtagcgccggtcaaggcgttcttcaatcatcgacgcaatgaaaagctcacggcgtggatggaagcagacctggccaggcgcccggtggaccgtctgatcggtttcaacaagatgcccggtctggatgtgtattacgccgccgacggctgcttcgaggacaaggcgcagaacctgcgcagcccgctgtatcgcaagtggggccgttatcgccactttgctgactacgagcgcgcggtgttcgccaaagactcgaaaactcaggtgttgatgatctccgaagtacagcagccgctgttcatcaagcactaccacaccccggcgtcgcgctttcacttgctgccaccgggcatttcccaggatcgccgcgcaccgccggacgcgcctgacatccgtgcgggctttcgcaaggaattcgggcttgccgacaatgacctgttattggtgcagatcggctccggtttcaagacaaagggcgtcgatcgcagcctgaaggcgctggcagccttgcctgccgagctcaagaaacgcacacggctgtttgtaatcggtcaggacgaccccaaagtattccagttgcagagcgctgcgctgggcctgggcgagcaggtgacgttcatgaaagggcgcagcgatattccgcgctttctgctgggcgccgacctgctgattcatccggcttacaacgagaacactggcaccgtattgcttgaagcactggtcgccggtttgccggttctggtcagcgcagtctgcggctacgcccattacatagccgaagctgactgcgggcgggtgctggacgagccgttcgatcaggtgcagctcaatcgctacctgtcggacatgcttgaggatgatggcgcacgcagcgcatgggggcgcaatggtcttgcctttgctgacacagcggacctttacagcatgccgcaacacgctgcggatgtgattctggcggagcactattga

SEQ ID NO: 26153 - protein, 373 aa, Pseudomonas syringae pv. phaseolicola 1448A
MQLAFVLYKYFPFGGLQRDFMRIALECQQRGHQIRVYTLIWEGDVPPGFEVLVAPVKAFFNHRRNEKLTAWMEADLARRPVDRLIGFNKMPGLDVYYAADGCFEDKAQNLRSPLYRKWGRYRHFADYERAVFAKDSKTQVLMISEVQQPLFIKHYHTPASRFHLLPPGISQDRRAPPDAPDIRAGFRKEFGLADNDLLLVQIGSGFKTKGVDRSLKALAALPAELKKRTRLFVIGQDDPKVFQLQSAALGLGEQVTFMKGRSDIPRFLLGADLLIHPAYNENTGTVLLEALVAGLPVLVSAVCGYAHYIAEADCGRVLDEPFDQVQLNRYLSDMLEDDGARSAWGRNGLAFADTADLYSMPQHAADVILAEHY

SEQ ID NO: 26154 - DNA, 1122 bp, Pseudomonas fluorescens PfO-1
  CDS (1)..(1122): transl_table=11
atgcaattggcttttgtcctgtacaagtatttcccgttcggcggtttgcagcgcgacttcatgcgcatcgccctcgaatgccagaagcgcggccatcaaattcgcgtctacaccctgatctgggaaggcgacgtgccgcccggtttcgaagtgctggtggcgccggtcaaggcgttcttcaatcaccggcgcaatgaaaagctcagcgcgtggatggaagcggacctggccaagcgtccagtggatcgcctgatcggcttcaacaaaatgccggggctggacgtctactacgccgccgacggctgcttcgaagacaaggcgcagaacctgcgcaattccctgtatcgccgctggggccgttatcgccacttcgctgaatacgagcgcgcggtgttcgccaaggatgcgaagactgaagtgctgatgatttccgaagtgcagcagccgctgttcatcaagtattacgacacgccgctggaacgcttccacctgctgccgccgggcattgcccaggatcgtcgccgtccggcggatgccgaccagattcgcgccggtttccgcgccgaattcaatctgaaggacgacgaactgctgctggtgcagatcggctccgggttcaagaccaagggtgtcgatcgcagcctcaaaacactggccgcattgcccgccgagctgaagaaacgcacccggctgtttgtaatcggccaggatgaccccaaattgttccagatgcagagtgcgacgctgggcctgggcgacaacgtgacgttcctcaaggggcgcagcgatatcccgcgtttcctgctcggcgccgatctgttgatccacccggcgtacaacgaaaacaccggtacggtgctgcttgaagcgctggtcgccgggttgccggtgctggtcagcgcggtctgcggttacgcccattacatcgccgaggccgacgccggacgagtgctggacgagccgttcgatcaggcgcaactgacgcaatacctgactgacatgttgaacgacgacgctgcacgggcggcctggagccgcaacggtctggccttcgccgagacggccgacctctacagcatgccgcagcacgcggccgatgtgattctggcggagcacgcttaa

SEQ ID NO: 26155 - protein, 373 aa, Pseudomonas fluorescens PfO-1
MQLAFVLYKYFPFGGLQRDFMRIALECQKRGHQIRVYTLIWEGDVPPGFEVLVAPVKAFFNHRRNEKLSAWMEADLAKRPVDRLIGFNKMPGLDVYYAADGCFEDKAQNLRNSLYRRWGRYRHFAEYERAVFAKDAKTEVLMISEVQQPLFIKYYDTPLERFHLLPPGIAQDRRRPADADQIRAGFRAEFNLKDDELLLVQIGSGFKTKGVDRSLKTLAALPAELKKRTRLFVIGQDDPKLFQMQSATLGLGDNVTFLKGRSDIPRFLLGADLLIHPAYNENTGTVLLEALVAGLPVLVSAVCGYAHYIAEADAGRVLDEPFDQAQLTQYLTDMLNDDAARAAWSRNGLAFAETADLYSMPQHAADVILAEHA

SEQ ID NO: 26156 - DNA, 1176 bp, Methylobacillus flagellatus KT
  CDS (1)..(1176): transl_table=11
ttgaagtttgctttcctgatcttcaagtatttcccttatggcggcatgcagcgcgacatgctgcgcactgctacccggcttgctgaggcggggcattccgtggatatctttaccatgtcatgggatggcgagatgccgcaggttggcgctgcccatggcaggatatctgtgcacatcatgccggcaaaaggctggttcaatttccggaaataccaggacttcattcgtcaggcacaagcccgcattgcctgtgaattcaatgtcgacttgatcgtaggatacaatcgcatgggcggtctggacgtgtattttgccgccgacccctgttttatcgagcgggcccatacccagcgtaattggctgtatcgcttgacgccgcgctaccgctggttccagcgtacagaacaggtcattttctcaccgcaaggcaagacgcaggtattgatggtggatatggcggaaaaagctgtattccagcgctggtatcacactcaggacgaccgctttcactacatcccgccctatctttctggcgagcgactgcaattgcatgaccgcgcggaaatgcgtgcctatttgcggaatgcgttcaacctgccaccggagacgaagatcgccctgctggtcggttcagggttctatatgaagggattggatcgcgcggtgcatgcattggcgagcctacccgcggacatgcgccaggacttcaagctgattgccatcgggcaggataagccagcgcccttcatcaggatggcaagcaagctcaaggtggcggacaacctgatcatttcacgcggcaggcccgacatcccgcaattgatgcaaggtgcagatttctacctgcatccggcctaccgggagaataccggtctggtcatcctggaggcgatggcgagtggcgtgccggtactggcgacggccagctgcggttatgcggtgcatgtccagaaggccgatgccgggcaagtggtaccgttgccgtttgagcaggcggtgttgaaccggatgctggaggaaatggtatcgcttgtgcatgcaagggatgctcggctggagaagtggcgcgacaacggcttgcggcatgcacacaggttgatgacggagaacgatggtagtgccgaggctgcgatcatgctccggattgccgggaaaaagcaggaggacgcgatatga

SEQ ID NO: 26157 - protein, 391 aa, Methylobacillus flagellatus KT
MKFAFLIFKYFPYGGMQRDMLRTATRLAEAGHSVDIFTMSWDGEMPQVGAAHGRISVHIMPAKGWFNFRKYQDFIRQAQARIACEFNVDLIVGYNRMGGLDVYFAADPCFIERAHTQRNWLYRLTPRYRWFQRTEQVIFSPQGKTQVLMVDMAEKAVFQRWYHTQDDRFHYIPPYLSGERLQLHDRAEMRAYLRNAFNLPPETKIALLVGSGFYMKGLDRAVHALASLPADMRQDFKLIAIGQDKPAPFIRMASKLKVADNLIISRGRPDIPQLMQGADFYLHPAYRENTGLVILEAMASGVPVLATASCGYAVHVQKADAGQVVPLPFEQAVLNRMLEEMVSLVHARDARLEKWRDNGLRHAHRLMTENDGSAEAAIMLRIAGKKQEDAI

SEQ ID NO: 26158 - DNA, 1134 bp, Alkalilimnicola ehrlichei MLHE-1
  CDS (1)..(1134): transl_table=11
atgcacctggccttcgccctgttcaagtacttcccccacggcggcctgcagcgcaacttccggcgcatcaccgagctggcgctggagcgcggccatcgggtcgatgtctacaccctggcctggagtggctggacgccggaacatccgaacctgacggtggaggtggtgaaggtgcccggctggcgcaaccacacccgctaccgccgctttggtacccacgtgcagaaacgcctggcggacaacccgcccgaccgggtggtgggcttcaacaagatgccggggctcgatgtctactacaacgccgacccctgcttcgtggagcgggcgcaggcgcgccacccgctctaccgctggtcggggcgctaccgccagcacgccgcctttgagcaggccgtcttccgcgccgacgcccgcaaccacatcctgctgctatccgaagcggagaagccgctcttccagcgctggtacgccacccccgacgaccgtttccacctgatgccgccctacgtctccaccgaccgcttcgccggccccgaggccccgcacatcggcgccggcctgcgccgggagctgggcctgggcgaggcggaccgcatgctgctgatggtgggctccgacttccgtcgcaagggggtggatcgcagcatccgtgcactggccgccctgcccgaatcgccgcggcgacgcacccatctctatgtgctgggcaagggtcgtgcggcaacccaggaagccctggcccgggggctcggcgtggcggaccaggtgcacttcctgcagggccgggacgacgtggcacgcttcctcttcgccgccgacctgctgctccacccggcctaccaggagaacaccggcaccgccattgtcgaggccatcgccgccgggttgcccgcactggtgaccgggaattgcggctacgccttccacattgagcgcgccggcagcggccgggtcctgccaccgcccttcacccaggcggccatggacgaggccctggcttcgatgatcgacagccccgagcaaccccgctggcgcgaatacgcccggacctacgcccgccggaccgaactgggcagccgcgccgagcacgccctgcgggtcatcgaaggcccccgctacggggagcatgggtga

SEQ ID NO: 26159 - protein, 377 aa, Alkalilimnicola ehrlichei MLHE-1
MHLAFALFKYFPHGGLQRNFRRITELALERGHRVDVYTLAWSGWTPEHPNLTVEVVKVPGWRNHTRYRRFGTHVQKRLADNPPDRVVGFNKMPGLDVYYNADPCFVERAQARHPLYRWSGRYRQHAAFEQAVFRADARNHILLLSEAEKPLFQRWYATPDDRFHLMPPYVSTDRFAGPEAPHIGAGLRRELGLGEADRMLLMVGSDFRRKGVDRSIRALAALPESPRRRTHLYVLGKGRAATQEALARGLGVADQVHFLQGRDDVARFLFAADLLLHPAYQENTGTAIVEAIAAGLPALVTGNCGYAFHIERAGSGRVLPPPFTQAAMDEALASMIDSPEQPRWREYARTYARRTELGSRAEHALRVIEGPRYGEHG

SEQ ID NO: 26160 - DNA, 1122 bp, Pseudomonas aeruginosa UCBPP-PA14
  CDS (1)..(1122): transl_table=11
atgaccctggcgttcatcctctacaaatacttccccttcggcggcttgcagcgtgacttcatgcgcatcgccctggaatgccagcggcgcgggcacgacatccgcgtctatacgctgatctgggagggcgacgtgccggacggcttcgaagtgctggtggccccggtgcgctcgatcttcaaccaccggcgcaacgagaagttcaccgcgtgggtccgcgccgacctggccaggcgcccggtgcagcgggtgatcggcttcaacaagatgcccggactggatgtctactacgccgccgacgcctgtttcgaggaaaaggcccagaccttgcgcaacccgctgtaccgccagtggggccgctaccgccacttcgccggctacgaacgggcagtgttcgacccggcctcgaagaccgagatcctgatgatctccgaggtgcagcagccgctcttcgtcaagcactacggcacccaggccgagcgtttccatctgctgccgccggggatcagccaggatcgccgggcgccggccaacgccgcggacgtgcgtgcggaattccgccgcgagttcggcctggaggaggacgacctgctgctggtgcagattggctccggcttcaagaccaagggcctggatcgcagcctgaaggcgctggccgcgctgcccaaggcgttgcgcaggcgtacccggctgatcgccatcggccaggacgatcccaagccgttcctgctacagatcgccgccctcggtctcaacgaccaggtacagatcctcaagggtcgcagcgatatcccgcgcttcctgctcggcgccgacctgctgatccacccggcctacaacgagaacaccggtacggtgctgctggaggcgctggtctccggcctgccggtgttggtgaccgatgtctgcggctatgcccactacatcgccgaggccgacgccgggcgggtgctgccgagtccgttcgagcaggacagtctcaaccgcctgctcgcggaaatgctggaggacgctccggcgcgcgccgcctggtcgcgcaatggcctggcctacgccgatcacgccgacctctacagcatgccgcagcgcgccgccgacctgatcctcggggaggcctcatga

SEQ ID NO: 26161 - protein, 373 aa, Pseudomonas aeruginosa UCBPP-PA14
MTLAFILYKYFPFGGLQRDFMRIALECQRRGHDIRVYTLIWEGDVPDGFEVLVAPVRSIFNHRRNEKFTAWVRADLARRPVQRVIGFNKMPGLDVYYAADACFEEKAQTLRNPLYRQWGRYRHFAGYERAVFDPASKTEILMISEVQQPLFVKHYGTQAERFHLLPPGISQDRRAPANAADVRAEFRREFGLEEDDLLLVQIGSGFKTKGLDRSLKALAALPKALRRRTRLIAIGQDDPKPFLLQIAALGLNDQVQILKGRSDIPRFLLGADLLIHPAYNENTGTVLLEALVSGLPVLVTDVCGYAHYIAEADAGRVLPSPFEQDSLNRLLAEMLEDAPARAAWSRNGLAYADHADLYSMPQRAADLILGEAS

SEQ ID NO: 26162 - DNA, 1203 bp, Magnetococcus sp. MC-1
  CDS (1)..(1203): transl_table=11
atggtctacggcataacaccttgcctcccaaccgggctatgctactctaggcacacctgtgaccccagaggaaacttacccatgcgtgtggccataattcgacaaaaatataccgattttgggggcgcggagcgttttctcaaacgggcggtagatgccctttcccaacgcggggtagccatcaccatgctggcccgagcgtggccccctgcggctgaccgccgcattatcaacccccgctattggagccgcactgaaagggatcgtggttttgccgctgcggtctgcgcccacctgcagcaagagtcctttgaccttgtgcaatcccacgagcgcattgcctgctgtgatctataccgggccggtgatggggtacaccgagagtggctaatccagcgggctaggatcttaggctggcaggccaaagtggccgatcaaatgccctaccaccgttatattttgcaggctgaagagcgcctctttcattcaccccagctcaaagcggtggtgtgcaactccgccatggtcaagcaggagttgatggaccattttagactacctgcgcaaaagctccatgtcatctattcaggcattgattgtgcgcggtttcatcccgatctcaaagcccatcgcagcgccgtacggcagcagtggcagatccccttagaggcccccctgctcctatttgtcggctcaggttttgcccgcaagggggtcaatgccctgctgcaagcgatgacccttatgcggcagagcgcctatctcttgattgtgggcaaggataagcagcaagcccgttttcagcgccgcgccaaacagttgggcctagcccagcgggtacgtttttgcgggccacaacagagtgtattgcccttctatggagccgctgacggggtcgttttacccaccctttacgacccctttcccaatgtggccttagaggccatggcgtgcggcttgcccttgctcagttccaccaaatgtggggccgtggatttggtggaatcggggtacaatggctggctatgcgatgccctagaccaccacaccatggcgacccagttggatgccctgtgcgaccctcacatggcggtacccatgggtcaagcggcccgccaaacagtcttaccccttacattggatgccatggccaccagaatggagagcctttacacctcgctgctggattctccccttccataa

SEQ ID NO: 26163 - protein, 400 aa, Magnetococcus sp. MC-1
MVYGITPCLPTGLCYSRHTCDPRGNLPMRVAIIRQKYTDFGGAERFLKRAVDALSQRGVAITMLARAWPPAADRRIINPRYWSRTERDRGFAAAVCAHLQQESFDLVQSHERIACCDLYRAGDGVHREWLIQRARILGWQAKVADQMPYHRYILQAEERLFHSPQLKAVVCNSAMVKQELMDHFRLPAQKLHVIYSGIDCARFHPDLKAHRSAVRQQWQIPLEAPLLLFVGSGFARKGVNALLQAMTLMRQSAYLLIVGKDKQQARFQRRAKQLGLAQRVRFCGPQQSVLPFYGAADGVVLPTLYDPFPNVALEAMACGLPLLSSTKCGAVDLVESGYNGWLCDALDHHTMATQLDALCDPHMAVPMGQAARQTVLPLTLDAMATRMESLYTSLLDSPLP

SEQ ID NO: 26164 - DNA, 1134 bp, Azoarcus sp. BH72
  CDS (1)..(1134): transl_table=11
atgcagctcgccttctgcctctacaagtacttcccctacggcggcctgcagcgcgacttcctgcgcatcgccctcacctgccagcagcgcggccacgcgatccgcgtctatgcgctggagtggcacggtgaagtgccgcccggcttcgagctggtcaaggtgccggtcagcgccttcgccaaccaccgccgctacgccaagttcacccgctgggtggaggccgacatcgcgcgccggccggtggatcgcctggtcggcttcaacaagatgccggggctggacgtctattacgccgccgacccctgcttcgagcacaaggcgcgcacgctgcgcaaacccctgtaccgctatggcccgcgctaccgccacttcgccgcctacgagcgcgcggtgttcgcgcccgagggcaagaccgagatcctgatgatctcgaccacccagcagccgctgttcgcccagtattacggcacgccggcgcgccgcttccacctgctgccgccgggcatcgcgccggaccgccgcgcgccgcccgacgccgccgaacgccgcgccgccgcgcgcgcgcgttttggcagcgagttcggcctgcatgctgacgatctcctgctggtgcagatcggttccgacttcccgcgcaaggggctggaccgcagcatcgccgcgctggcggcgctgcccgaaccgctgaagcgccgcgcgcggctggtggcgctcggcgccgacgacgcccggcccttcctcgaacaggcccaccggctcggcatcggcgagcgggtccacattcccggcggacgcgacgacgtgccggatttcctgctcgcggccgacgcgctgctgcacccggcgcgccacgagaacaccggcaccgtgctgctcgaagccctggtcgccgggctgccggtcatcgccagcgcggcctgcggctacgcgcactacatcgaagacgccgacgccggcctggtcgtccccgagcccttcgcgcagaccgcgctcgaccgcgcgctcgccacactgctgggcgacgacgaaggccgcgcgcgctgccagcgcaacgcgctcgcctttgccgaccgcgccgacctctacagcctgcccgagcgggcggccgacatcatcctgggccggcgcggatga

SEQ ID NO: 26165 - protein, 377 aa, Azoarcus sp. BH72
MQLAFCLYKYFPYGGLQRDFLRIALTCQQRGHAIRVYALEWHGEVPPGFELVKVPVSAFANHRRYAKFTRWVEADIARRPVDRLVGFNKMPGLDVYYAADPCFEHKARTLRKPLYRYGPRYRHFAAYERAVFAPEGKTEILMISTTQQPLFAQYYGTPARRFHLLPPGIAPDRRAPPDAAERRAAARARFGSEFGLHADDLLLVQIGSDFPRKGLDRSIAALAALPEPLKRRARLVALGADDARPFLEQAHRLGIGERVHIPGGRDDVPDFLLAADALLHPARHENTGTVLLEALVAGLPVIASAACGYAHYIEDADAGLVVPEPFAQTALDRALATLLGDDEGRARCQRNALAFADRADLYSLPERAADIILGRRG

SEQ ID NO: 26166 - DNA, 1203 bp, Nostoc punctiforme PCC 73102
  CDS (1)..(1203): transl_table=11
atgaaactttgtattgttactcataaaattaaaaaaggtgatgggcagggacgagtaaactatgaggttgctaatgaagcaattcgtcgtggtcatcaactaacattattagctagtgaagtcgcaccagaattagaagctaatagtcaagttaattggattccaattccagtcaaagattatccgacagaatttgtacgtaatttcgtatttgcccaaaaaagtacagattggttacggaaacatcgctctgagattgatttagttaaagtcaatggcgcaattaatctggctgcggctgatgtgaatgctgtacattttgtccatagttcatggttgcgatcgcctgttcatatttctcgcaaccgccgtgatttttatggtttttaccaatggctgtttacggcttttaatgcccgttgggaaaaacaggctttccaaaaagcgcaggttgtcgtagcagtatcagaaaaagtagcccacgaattagtcaacattggtgtgccgcgttctcgcattcgcgtaattgtcaatggcgttgacttagacgagtttactcctggtgaaagcgatcgccaaaagttgggtttaccggagaatgtcaccctggcattattcgccggagatatccgcacacccagaaagaacttagatacagtactgcacgccttggtgaaagttcccgatttacatttggtggtagtgggacacacccaaaatagccctttcccgcagttagcagcatcattagggttaagtaaacgcgtgcattttgtaggatttcgccgtgatatcccccaaattatgcaagcagtagatttatttgtttttccttcccgatacgaagcttgcagcctcgtattgttagaagcactttcttcaggactgccagtaattactgccacagccaccgggggcggagagttggtgacaccagaatgtggcatcgtcttatccaactcagatgatagtgatgctttggctctggcattgctgactttggtgagtagtcccaccctcataaagcaaatgggcaaagctgctcgttctgtggcagaacaacatagctggactactatggcacaaacttatgtggatctattcgaggagttaagcaagaatgcggaacaccgttctgataccaacttatcgccgtccacaagacctatcacgctgccttttagcgctacagaagcaaattaa

SEQ ID NO: 26167 - protein, 400 aa, Nostoc punctiforme PCC 73102
MKLCIVTHKIKKGDGQGRVNYEVANEAIRRGHQLTLLASEVAPELEANSQVNWIPIPVKDYPTEFVRNFVFAQKSTDWLRKHRSEIDLVKVNGAINLAAADVNAVHFVHSSWLRSPVHISRNRRDFYGFYQWLFTAFNARWEKQAFQKAQVVVAVSEKVAHELVNIGVPRSRIRVIVNGVDLDEFTPGESDRQKLGLPENVTLALFAGDIRTPRKNLDTVLHALVKVPDLHLVVVGHTQNSPFPQLAASLGLSKRVHFVGFRRDIPQIMQAVDLFVFPSRYEACSLVLLEALSSGLPVITATATGGGELVTPECGIVLSNSDDSDALALALLTLVSSPTLIKQMGKAARSVAEQHSWTTMAQTYVDLFEELSKNAEHRSDTNLSPSTRPITLPFSATEAN

SEQ ID NO: 26168 - DNA, 1122 bp, marine gamma proteobacterium HTCC2143
  CDS (1)..(1122): transl_table=11
atgaaaatggcgttttgcctctttaaatactttccgtttggagggctccagcgcgacatgttagctatagcgaaagcgtgtatgaaccgtggtcatactgtcgaggttttctgtggcctgtgggaaggtgatagccctgaaaacatttcagtgaatatcgttaatattacgggctttacaaatcagcggcgtaatcggtcattttatgagggtgtgcaagaacgtttagcgaaggcagattttgatttagtgtttggatttaataagatgccggggctcgacgtctactatgcggcagattcctgttttgcaaccaaggcctatgaaaagaaaggtctactctatcgattgacaaagcgtgctagggaatcacttaaatatgaaagtgcagtgttttctcgagagtctacaacgcaggttctattgatcgcagaaaaagagaagtcgaaatttcaacgctattataaaacgccggatcaaaggctacacttactgccaccaggaatcgccaaaaatagaattctacccaacaattatttggcagtaagaactcagtttagagaagaatttgatattcaacctgacgaaaaattactgcttgctctggggtcaggttttaaaacaaagggcctcgatagatctattagggcgctaagtgggctctcagataaggaaaaagctaacactaaattgtttgtggttggcaaggataatcctgcatcatttattaagcttgccaaaaagcttaatgtcgagtctatgatcacgtttttttccgggcgagatgatgcaaaccggtttttaatgggtagcgatctacttattcatcctgcctattttgaaaatactgggacggtattacttgaggctatggtgtctgggttgcctgttttaacaaccgatgtatgtggctacgcatattatgtcgcagatgagggtatgggcgttgttgatgcgtcgccttttgatcaatccagttttaataagaatctagcgtcattactctgcgaacctcgggatatttggtttgataaagggaggagattttcggagaccgccgatatctatgatttatctaaccacgtagctgagctgttggaaggatttgtgttgcagagctag

SEQ ID NO: 26169 - protein, 373 aa, marine gamma proteobacterium HTCC2143
MKMAFCLFKYFPFGGLQRDMLAIAKACMNRGHTVEVFCGLWEGDSPENISVNIVNITGFTNQRRNRSFYEGVQERLAKADFDLVFGFNKMPGLDVYYAADSCFATKAYEKKGLLYRLTKRARESLKYESAVFSRESTTQVLLIAEKEKSKFQRYYKTPDQRLHLLPPGIAKNRILPNNYLAVRTQFREEFDIQPDEKLLLALGSGFKTKGLDRSIRALSGLSDKEKANTKLFVVGKDNPASFIKLAKKLNVESMITFFSGRDDANRFLMGSDLLIHPAYFENTGTVLLEAMVSGLPVLTTDVCGYAYYVADEGMGVVDASPFDQSSFNKNLASLLCEPRDIWFDKGRRFSETADIYDLSNHVAELLEGFVLQS

SEQ ID NO: 26170 - DNA, 1125 bp, Escherichia coli B
  CDS (1)..(1125): transl_table=11
atgatcgttgcattttgtttatataaatattttccctttggcggtttgcagcgcgattttatgcgtattgctcagacagtcgccgcccgaggtcatcatgttcgggtttatacccagtcgtgggaaggcgaatgccctgatgtatttgaactgatcaaagtgccggttaaatcgcataccaatcacgggcgcaatgcggagtattttgcctgggtgcaaaaacatttacgcgaacatcccgtcgataaagtcgttggattcaacaaaatgccggggctggacgtttattatgccgctgatgtttgttatgccgagaaagtagcgcaggagaaaggctttttctatcgcctgacgtcacgttatcgccattatgccgcctttgagcgggcaaccttcgaacagggtaagccgacacagctgctgatgctgacagataagcaaatcgccgatttccagaaacattatcagactgaagcggagcgttttcatattctgccaccggggatttatcctgatcgtaaatatagccagcagccagccaatagccgtgaaatcttccgtaagaagaatggaataaccgaacaacaatatttattgttgcaggtcggttcagacttcacgcgtaaaggtgtcgatcgttccattgaagcacttgcttcgttaccggattcgctgcgccacaacacattgctatatgttgttgggcaggataaaccgcgaaaatttgaggcactggcagaaaaacgcggcgtgcgcagtaatgttcacttcttctcggggcgcaacgatgtctcggaattaatggcggcggcggatttattactgcatcctgcctaccaggaagcggcgggaattgtgctgctggaagcgattactgcaggattaccggtactaacaacagccgtttgtggctatgcgcattatattgtcgaggccaattgcggcgaggctattgttgagccattccgccaggaaacattgaatgagattttacgcaaagcgttaacgcaatcttcattgcgccaggcctgggcggaaaatgcgcgacattatgctgatacacaagatttatacagtctgccagagaaagcggcggatatcataacgggtggtctggatggttga

SEQ ID NO: 26171 - protein, 374 aa, Escherichia coli B
MIVAFCLYKYFPFGGLQRDFMRIAQTVAARGHHVRVYTQSWEGECPDVFELIKVPVKSHTNHGRNAEYFAWVQKHLREHPVDKVVGFNKMPGLDVYYAADVCYAEKVAQEKGFFYRLTSRYRHYAAFERATFEQGKPTQLLMLTDKQIADFQKHYQTEAERFHILPPGIYPDRKYSQQPANSREIFRKKNGITEQQYLLLQVGSDFTRKGVDRSIEALASLPDSLRHNTLLYVVGQDKPRKFEALAEKRGVRSNVHFFSGRNDVSELMAAADLLLHPAYQEAAGIVLLEAITAGLPVLTTAVCGYAHYIVEANCGEAIVEPFRQETLNEILRKALTQSSLRQAWAENARHYADTQDLYSLPEKAADIITGGLDG

SEQ ID NO: 26172 - DNA, 1125 bp, Pseudomonas putida GB-1
  CDS (1)..(1125): transl_table=11
atgcaactggctttcgtgctttacaaatatttccccttcggcgggctgcagcgcgatttcatgcgcattgccctggaatgccagaagcggggccaccagatccgtgtgtacacgttgatctgggagggtgacattccgccgggcttcgaagtgctggtggcgccggtgaaagcgattttcaaccaccgccgcaatgagaaactcagtgcctggatggccgccgacctggccaagcgcccggtcgaccgcctgatcggcttcaacaaaatgccgggcctggatgtgtactacgctgccgacggctgcttcgaggacaaggcgcagaccttgcgcggtggcttgtaccgccgctggggccgctaccggcactttgccgagtatgagcgcgcggtgttcgccaaggacgcccataccgaagtgttgatgatttccgaagtgcagcagccgctgttcatcaagcactacggcaccccggtggaacgcttccacctgctgccaccgggtatttcccaggaccgccgtgcgccggccaatgccgccgagattcgcgccgagttccgcaaggaattcaacctgggcgaggatgacctgctgctggtgcagattggttcgggcttcaagaccaagggtgtggaccgcagcctcaaggccctggccgcgctgccgtcggccctgcgcaaacgcacgaagctgatggtgatcggccaggacgaccccaaggtgttccagctgcaaagcgccaccctgggcctgggcgaccaggtgcagttcctcaagggccgcagcgacattccgcgcttcctgctgggtgccgacctgctgattcacccggcgtacaacgagaacaccggtacagtgctgctcgaagcgctggtggccggtctgccggtgctggtgtccaaggtgtgcggctacgcccactacatcgccgaggccgacagtggcctggtgctggacgagccgttcgagcaggaacagctcaacggttacttgcagcgcatgctcgaagacccgcaggcccgcgccagctggtcgcgcaacggcctggcatatgcagaaaccgccgatctgtacagcatgccgcagcatgctgccgacgtgatcctggggcagaaaaccgcatga

SEQ ID NO: 26173 - protein, 374 aa, Pseudomonas putida GB-1
MQLAFVLYKYFPFGGLQRDFMRIALECQKRGHQIRVYTLIWEGDIPPGFEVLVAPVKAIFNHRRNEKLSAWMAADLAKRPVDRLIGFNKMPGLDVYYAADGCFEDKAQTLRGGLYRRWGRYRHFAEYERAVFAKDAHTEVLMISEVQQPLFIKHYGTPVERFHLLPPGISQDRRAPANAAEIRAEFRKEFNLGEDDLLLVQIGSGFKTKGVDRSLKALAALPSALRKRTKLMVIGQDDPKVFQLQSATLGLGDQVQFLKGRSDIPRFLLGADLLIHPAYNENTGTVLLEALVAGLPVLVSKVCGYAHYIAEADSGLVLDEPFEQEQLNGYLQRMLEDPQARASWSRNGLAYAETADLYSMPQHAADVILGQKTA

SEQ ID NO: 26174 - DNA, 1125 bp, Escherichia coli
  CDS (1)..(1125): transl_table=11
atgatcgtggcattttgcttatataaatattttccatttggtgggctacagcgtgactttatgcgtattgcctcaacagttgccgcacggggccaccatgttcgggtatatacacagtcgtgggaaggcgattgcccggaagcatttgagcttattcgcgtaccggttaaatcccatactaaccatggacgtaatgcagaatattatgcctgggttcaaaaccatctgaaggcacatcccgctgatcgcgttgttggctttaataagatgcctgggctggatgtttattttgccgccgatgtctgttatgccgagaaagtggcgcaagaaaagggatttttctatcgtttaacatcgcgctatcgccattatgctgcattcgagcgagcgactttcgaacatggtaaatcgacgaaacttatgatgttgaccgataagcaaatcgccgattttcagaagcattaccaaactgaaccagaacgttttcaaattcttccccctggtatctatcctgacagaaaatacaacgcgcaaatcccaaacagtcgtgaaatttatcgccagaaaaatggcatcactgaacaacaaaacttattgctgcaggttggttcagattttggtcgtaaaggtgtggatcgctcaattgaagctttggcatcgttaccagaatcgttacgccataatacgttgttgtttgttgttggccaggataaaccgcgtaaatttgaagtgctggcagaaaaactcggtgtgcgtagtaaagtgcatttcttttccgggcggaatgatgtgtctgaattaatggcagccgctgatttattaatgcatcccgcttatcaggaggctgcaggtattgttctccttgaggcaattgccgcgggattacctgtgttgacgactgcggtatgcggatacgcacactatatcacagatgctaattgtggaacggtcatcgctgaacctttctcccaggaacaattaaatgacgttttacgtaaagcgttaactcaatctccattgcgcatggcctgggcggagaatgctcggtattacgccgatactcaggatttatacagcctgccggagaaagcggcagatatcattacaggtggtttagatggttga

SEQ ID NO: 26175 - protein, 374 aa, Escherichia coli
MIVAFCLYKYFPFGGLQRDFMRIASTVAARGHHVRVYTQSWEGDCPEAFELIRVPVKSHTNHGRNAEYYAWVQNHLKAHPADRVVGFNKMPGLDVYFAADVCYAEKVAQEKGFFYRLTSRYRHYAAFERATFEHGKSTKLMMLTDKQIADFQKHYQTEPERFQILPPGIYPDRKYNAQIPNSREIYRQKNGITEQQNLLLQVGSDFGRKGVDRSIEALASLPESLRHNTLLFVVGQDKPRKFEVLAEKLGVRSKVHFFSGRNDVSELMAAADLLMHPAYQEAAGIVLLEAIAAGLPVLTTAVCGYAHYITDANCGTVIAEPFSQEQLNDVLRKALTQSPLRMAWAENARYYADTQDLYSLPEKAADIITGGLDG

SEQ ID NO: 26176 - DNA, 1125 bp, Salmonella enterica subsp
  CDS (1)..(1125): transl_table=11
atgagagttgctttttgcttatataaatatttcccttttggcggtctgcagcgtgattttatgcgcattgcccaaaccgtggcggcgcgtggacatcaggttcgtgtttatgctcagacctgggaaggagagtgcccggataactttgaattaatccgcgtgcctgttaaatcccggacaaatcacggtcgtaacgcagaatattacgcctgggtgcaacatcatttacgcgatcaccctgtcgatcgggttgttgggttcaataaaatgccgggccttgatgtgtattatgccgcagatgtgtgttatgccgaaaaagtcgcacaggaaaaaggctttttctatcgtctgacatcacgctaccggcattatgctgcttttgaacgcgccacgtttgaacacggcaagcggacgcaactattgatgctgacaaataagcagcttgctgatttccaaaaacattatcagactgaagcggaacgtttctatattcttcctccggggatttacccggacagaaaatatagccaacagatcccgaacagccgtcaaatctatcgtcagaaaaacgggatctcagaacagcaaaaattactgttgcaagtagggtctgacttcacccgtaaaggtgtggatcgctctattgaagcgctggcatcgctacccgaatctttacggcaaaatacggtgctctatgttgtcgggcaggataagccgaagaagtttgcagcactggctgaaagaagcggcgtcggcacgaatgtgcattttttctccggacgtaatgatatcgcggaattaatggcggcagccgatcttttactgcatccagcctatcaggaggctgctggtattgttttgctggaagccattactgctggtttgcctgtattaacctccgcggtgtgcggttatgcgcactatgttatggatgcaaactgtggcgaagcgattgctgaacctttccgtcaggaagcgctaaatgagattttactcaaagcgttgacacagccttccttacgtagcgcttgggcagaaaatgcgcggcattatgctgatacccaagatttatacagcttgccggagaaggccgcggatattattacaggtgatttagatggttga

SEQ ID NO: 26177 - protein, 374 aa, Salmonella enterica subsp
MRVAFCLYKYFPFGGLQRDFMRIAQTVAARGHQVRVYAQTWEGECPDNFELIRVPVKSRTNHGRNAEYYAWVQHHLRDHPVDRVVGFNKMPGLDVYYAADVCYAEKVAQEKGFFYRLTSRYRHYAAFERATFEHGKRTQLLMLTNKQLADFQKHYQTEAERFYILPPGIYPDRKYSQQIPNSRQIYRQKNGISEQQKLLLQVGSDFTRKGVDRSIEALASLPESLRQNTVLYVVGQDKPKKFAALAERSGVGTNVHFFSGRNDIAELMAAADLLLHPAYQEAAGIVLLEAITAGLPVLTSAVCGYAHYVMDANCGEAIAEPFRQEALNEILLKALTQPSLRSAWAENARHYADTQDLYSLPEKAADIITGDLDG

SEQ ID NO: 26178 - DNA, 1122 bp, Pseudomonas aeruginosa
  CDS (1)..(1122): transl_table=11
atgaccctggcgttcatcctctacaaatacttccccttcggcggcctgcagcgtgacttcatgcgcatcgccctggaatgccagcggcgcgggcacgacatccgcgtctataccctgatctgggagggcgacgtgccggacggcttcgaagtgctggtggccccggtgcgctcgatcttcaaccaccggcgcaacgagaagttcaccgcgtgggtccgcgccgacctggacaggcgcccggtgcagcgggtgatcggcttcaacaagatgcccggactggatgtctactacgccgccgacgcctgtttcgaggaaaaggcccagaccttgcgcaacccgctgtaccgccagtggggccgctaccgccacttcgccggctacgaacgggcagtgttcgacccggcctcgaagaccgagatcctgatgatctccgaggtgcagcagccgctcttggtcaagcactacggcacccaggccgagcgtttccatctgctgccgccggggatcagccaggatcgccgggcgccggccaacgccgcggacgtgcgtgcggaattccgccgcgagttcggcctggaggaggacgacctgctgctggtgcagatcggttccggcttcaagaccaagggcctggatcgcagcctgaaggcgctgtccgcgctgcccaaggcgttgcgcaggcgtacccggctgatcgccatcggccaggacgatcccaagccgttcctgctacagatcgccgccctcggtctcaacgaccaggtacagatcctcaaggggcgcagcgatatcccgcgcttcctgctcggcgccgacctgctgatccacccggcctacaacgagaacaccggtacggtgctgctggaggcgctggtctccggcctgccggtgttggtgaccgatgtctgcggctatgcccactacatcgccgaggccgacgccgggcgggtgctgccgagtcccttcgagcaggacagtctcaaccgcctgctcgcggaaatgctggaggacgctccggcgcgcgccgcctggtcgcgcaatggcctggcctacgccgatcacgccgacctctacagcatgccgcagcgcgccgccgacctgatcctcggggaggcctcatga

SEQ ID NO: 26179 - protein, 373 aa, Pseudomonas aeruginosa
MTLAFILYKYFPFGGLQRDFMRIALECQRRGHDIRVYTLIWEGDVPDGFEVLVAPVRSIFNHRRNEKFTAWVRADLDRRPVQRVIGFNKMPGLDVYYAADACFEEKAQTLRNPLYRQWGRYRHFAGYERAVFDPASKTEILMISEVQQPLLVKHYGTQAERFHLLPPGISQDRRAPANAADVRAEFRREFGLEEDDLLLVQIGSGFKTKGLDRSLKALSALPKALRRRTRLIAIGQDDPKPFLLQIAALGLNDQVQILKGRSDIPRFLLGADLLIHPAYNENTGTVLLEALVSGLPVLVTDVCGYAHYIAEADAGRVLPSPFEQDSLNRLLAEMLEDAPARAAWSRNGLAYADHADLYSMPQRAADLILGEAS

SEQ ID NO: 26180 - DNA, 1125 bp, Escherichia coli
  CDS (1)..(1125): transl_table=11
atgatcgttgctttttgtttatataaatattttccctttggcggtttgcagcgcgattttatgcgtattgctcagacagtcgccgcccgaggtcatcatgttcgggtttatgcccagtcgtgggaaggcgaatgccctgatgtatttgaactgatcaaagtgccggttaaatcgcataccaatcacgggcgcaatgcggagtattttgcttgggtgcaaaaacatttacgtgaacatcccgtcgatagagttgttggattcaacaaaatgccggggctggacgtttattatgccgctgatgtttgttatgccgagaaagtagcgcaggagaaaggctttttctatcgccttacgtcacgttatcgccattatgccgcctttgagcgggcaaccttcgaacagggcaagccgacacagctgctgatgctgacagataagcaaatcgccgatttccagaaacattatcagactgaagcggagcgttttcatattctaccaccggggatttatcctgatcgtaaatatagccagcagccagccaatagccgtgaaatcttccgtaagaagaatggaataaccgaacaacaatatttattgttgcaggttggttcagacttcacgcgtaaaggtgtcgatcgttccattgaagcacttgcttcgttaccggattcgctgcgccacaacacattgctatatgttgttgggcaggataaaccgcgaaaatttgaggcgctggcagaaaaacgcggcgtgcgcagtaatgttcacttcttctcggggcgcaacgatgtctcggaattaatggcggcggcggatttattactgcatcctgcctaccaggaagccgcgggaattgtactgctggaagcgataactgcaggattaccggtactaacaacagccgtttgtggctatgcgcattatattgtcgacgccaattgcggcgaggctattgctgagccattccgccaggaaacattgaatgagattttacgcaaagcgttaacgcaatcttcattgcgccaggcctgggcggaaaatgcgcgacattatgctgatacacaagatttatacagtctgccagagaaagcggcggacatcataacgggtggtctggatggttga

SEQ ID NO: 26181 - protein, 374 aa, Escherichia coli
MIVAFCLYKYFPFGGLQRDFMRIAQTVAARGHHVRVYAQSWEGECPDVFELIKVPVKSHTNHGRNAEYFAWVQKHLREHPVDRVVGFNKMPGLDVYYAADVCYAEKVAQEKGFFYRLTSRYRHYAAFERATFEQGKPTQLLMLTDKQIADFQKHYQTEAERFHILPPGIYPDRKYSQQPANSREIFRKKNGITEQQYLLLQVGSDFTRKGVDRSIEALASLPDSLRHNTLLYVVGQDKPRKFEALAEKRGVRSNVHFFSGRNDVSELMAAADLLLHPAYQEAAGIVLLEAITAGLPVLTTAVCGYAHYIVDANCGEAIAEPFRQETLNEILRKALTQSSLRQAWAENARHYADTQDLYSLPEKAADIITGGLDG

SEQ ID NO: 26182 - DNA, 1125 bp, Escherichia coli
  CDS (1)..(1125): transl_table=11
atgatcgtggcgttttgtttatataaatattttccatttggtgggcttcaacgtgactttatgcgcattgcatcaacagttgccgcacggggccaccatgttcgggtatatacacagtcgtgggaaggcgattgcccgaaagcatttgagcttattcaggtgccagttaagtcccataccaaccatggacgcaatgcagaatattatgcctgggtacaaaatcatctcaaagagcatcccgcagatcgcgttgttgggtttaataagatgcctggcctggatgtttattttgccgctgatgtttgttacgccgagaaagttgcgcaagaaaaaggttttttatatcgtttaacatcacgatatcgccattatgccgcatttgagcgagcgactttcgagcagggtaaatcgacgaaacttatgatgctgaccgataagcaaatcgccgatttccagaagcattatcaaactgaacctgaacgttttcaaattcttcctcccggtatttatccggacagaaaatacagtgagcaaatcccaaacagccgtgaaatttatcgccagaaaaatggcataaaagagcaacaaaacttattactgcaggttggatcagattttggccgtaaaggtgtagatcgctcaattgaagctttggcatcgttaccggaatcattacgtcacaatacgcttttatttgttgttggtcaggataagccgcgaaaatttgaagcgctggcagaaaaactcggcgtgcggagcaatgtgcatttcttctccggtcgcaatgatgtgtcagaattaatggcagccgctgatttattactgcatcccgcttatcaggaagccgcgggtatcgttcttctagaagcgatcactgctgggttacctgttttaacaacagcggtatgtgggtacgcgcattatattgcggatgccaattgtggaacggtcatcgctgaacctttctctcaggaacaattaaatgaagttttacgtaaagcgttaactcagtcgccattgcgaatggcctgggcggagaatgctcgccattatgccgatactcaggatttgtatagcttgccagaaaaagccgcggatatcattacaggtggtttagatggttga

SEQ ID NO: 26183 - protein, 374 aa, Escherichia coli
MIVAFCLYKYFPFGGLQRDFMRIASTVAARGHHVRVYTQSWEGDCPKAFELIQVPVKSHTNHGRNAEYYAWVQNHLKEHPADRVVGFNKMPGLDVYFAADVCYAEKVAQEKGFLYRLTSRYRHYAAFERATFEQGKSTKLMMLTDKQIADFQKHYQTEPERFQILPPGIYPDRKYSEQIPNSREIYRQKNGIKEQQNLLLQVGSDFGRKGVDRSIEALASLPESLRHNTLLFVVGQDKPRKFEALAEKLGVRSNVHFFSGRNDVSELMAAADLLLHPAYQEAAGIVLLEAITAGLPVLTTAVCGYAHYIADANCGTVIAEPFSQEQLNEVLRKALTQSPLRMAWAENARHYADTQDLYSLPEKAADIITGGLDG

SEQ ID NO: 26184 - DNA, 21 bp, Artificial sequence
  primer
atgcagctggccttcatcctc

SEQ ID NO: 26185 - DNA, 21 bp, Artificial sequence
  primer
tcacgcgccctgctccgtcag

SEQ ID NO: 26186 - protein, 419 aa, Artificial sequence
  consensus sequence
  Variant (2)..(3): Xaa in position 2 to 3 is any amino acid
  Variant (6)..(8): Xaa in position 6 to 8 is any amino acid
  Variant (13)..(13): Xaa in position 13 is any amino acid
  Variant (14)..(21): Xaa in position 14 to 21 is any or no amino acid
  Variant (28)..(29): Xaa in position 28 to 29 is any amino acid
  Variant (33)..(37): Xaa in position 33 to 37 is any amino acid
  Variant (40)..(40): Xaa in position 40 is any amino acid
  Variant (42)..(44): Xaa in position 42 to 44 is any amino acid
  Variant (47)..(49): Xaa in position 47 to 49 is any amino acid
  Variant (51)..(51): Xaa in position 51 is any amino acid
  Variant (53)..(54): Xaa in position 53 to 54 is any amino acid
  Variant (56)..(59): Xaa in position 56 to 59 is any amino acid
  Variant (60)..(70): Xaa in position 60 to 70 is any or no amino acid
  Variant (72)..(76): Xaa in position 72 to 76 is any amino acid
  Variant (78)..(79): Xaa in position 78 to 79 is any amino acid
  Variant (81)..(91): Xaa in position 81 to 91 is any amino acid
  Variant (92)..(97): Xaa in position 92 to 97 is any or no amino acid
  Variant (99)..(101): Xaa in position 99 to 101 is any amino acid
  Variant (102)..(104): Xaa in position 102 to 104 is any or no amino acid
  Variant (106)..(108): Xaa in position 106 to 108 is any amino acid
  Variant (119)..(121): Xaa in position 119 to 121 is any amino acid
  Variant (123)..(123): Xaa in position 123 is any amino acid
  Variant (127)..(127): Xaa in position 127 is any amino acid
  Variant (129)..(137): Xaa in position 129 to 137 is any amino acid
  Variant (138)..(147): Xaa in position 138 to 147 is any or no amino acid
  Variant (150)..(152): Xaa in position 150 to 152 is any amino acid
  Variant (156)..(160): Xaa in position 156 to 160 is any amino acid
  Variant (162)..(162): Xaa in position 162 is any amino acid
  Variant (164)..(164): Xaa in position 164 is any amino acid
  Variant (166)..(170): Xaa in position 166 to 170 is any amino acid
  Variant (171)..(172): Xaa in position 171 to 172 is any or no amino acid
  Variant (174)..(175): Xaa in position 174 to 175 is any amino acid
  Variant (177)..(185): Xaa in position 177 to 185 is any amino acid
  Variant (187)..(189): Xaa in position 187 to 189 is any amino acid
  Variant (191)..(191): Xaa in position 191 is any amino acid
  Variant (193)..(195): Xaa in position 193 to 195 is any amino acid
  Variant (198)..(200): Xaa in position 198 to 200 is any amino acid
  Variant (205)..(206): Xaa in position 205 to 206 is any amino acid
  Variant (209)..(216): Xaa in position 209 to 216 is any amino acid
  Variant (217)..(218): Xaa in position 217 to 218 is any or no amino acid
  Variant (220)..(222): Xaa in position 220 to 222 is any amino acid
  Variant (224)..(227): Xaa in position 224 to 227 is any amino acid
  Variant (228)..(237): Xaa in position 228 to 237 is any or no amino acid
  Variant (240)..(242): Xaa in position 240 to 242 is any amino acid
  Variant (245)..(245): Xaa in position 245 is any amino acid
  Variant (247)..(248): Xaa in position 247 to 248 is any amino acid
  Variant (249)..(249): Xaa in position 249 is any or no amino acid
  Variant (252)..(252): Xaa in position 252 is any amino acid
  Variant (256)..(257): Xaa in position 256 to 257 is any amino acid
  Variant (260)..(261): Xaa in position 260 to 261 is any amino acid
  Variant (264)..(266): Xaa in position 264 to 266 is any amino acid
  Variant (267)..(271): Xaa in position 267 to 271 is any or no amino acid
  Variant (273)..(275): Xaa in position 273 to 275 is any amino acid
  Variant (277)..(277): Xaa in position 277 is any amino acid
  Variant (279)..(282): Xaa in position 279 to 282 is any amino acid
  Variant (283)..(286): Xaa in position 283 to 286 is any or no amino acid
  Variant (288)..(294): Xaa in position 288 to 294 is any amino acid
  Variant (296)..(299): Xaa in position 296 to 299 is any amino acid
  Variant (301)..(304): Xaa in position 301 to 304 is any amino acid
  Variant (307)..(307): Xaa in position 307 is any amino acid
  Variant (308)..(309): Xaa in position 308 to 309 is any or no amino acid
  Variant (311)..(317): Xaa in position 311 to 317 is any amino acid
  Variant (322)..(322): Xaa in position 322 is any amino acid
  Variant (326)..(327): Xaa in position 326 to 327 is any amino acid
  Variant (329)..(330): Xaa in position 329 to 330 is any amino acid
  Variant (332)..(332): Xaa in position 332 is any amino acid
  Variant (338)..(340): Xaa in position 338 to 340 is any amino acid
  Variant (346)..(349): Xaa in position 346 to 349 is any amino acid
  Variant (354)..(358): Xaa in position 354 to 358 is any amino acid
  Variant (360)..(361): Xaa in position 360 to 361 is any amino acid
  Variant (363)..(366): Xaa in position 363 to 366 is any amino acid
  Variant (367)..(367): Xaa in position 367 is any or no amino acid
  Variant (370)..(370): Xaa in position 370 is any amino acid
  Variant (372)..(373): Xaa in position 372 to 373 is any amino acid
  Variant (375)..(377): Xaa in position 375 to 377 is any amino acid
  Variant (379)..(381): Xaa in position 379 to 381 is any amino acid
  Variant (383)..(388): Xaa in position 383 to 388 is any amino acid
  Variant (389)..(394): Xaa in position 389 to 394 is any or no amino acid
  Variant (396)..(397): Xaa in position 396 to 397 is any amino acid
  Variant (399)..(402): Xaa in position 399 to 402 is any amino acid
  Variant (404)..(406): Xaa in position 404 to 406 is any amino acid
  Variant (411)..(414): Xaa in position 411 to 414 is any amino acid
  Variant (417)..(418): Xaa in position 417 to 418 is any amino acid
MXXAFXXXKYFPXXXXXXXXXGGLQRDXXRIAXXXXXRGXHXXXVYXXXWXGXXPXXXXXXXXXXXXXXXPXXXXXNXXRXXXXXXXXXXXXXXXXXLXXXXXXDXXXGFNKMPGLDVXXXYXAADXCXXXXXXXXXXXXXXXXXXXYRXXXRYRXXXXXEXAXFXXXXXXXTXXLXXXXXXXXXFXXXYXTXXXRFXXXPPGIXXDRXXXXXXXXXXRXXXRXXXXXXXXXXXXXXLLXXXGSXFXXXKGXDRSXXALXXLPXXXXXXXXLXXXGXDXXXXXXXXFXXXXXXXGXXXXVXXXXGRXXXDXXXXXXXADLLXHPAXXEXXGXVLLEAXXXGLPVLXXXXCGYAXXXXXAXXGXXXXXPFXQXXLXXXLXXXLXXXXXXXXXXXXWXXNXXXXAXXXDLYSXXXXAAXXI

SEQ ID NO: 26187 - protein, 51 aa, Artificial sequence
  protein pattern
  Variant (2)..(2): Xaa in position 2 is Asp, Asn or Ser
  Variant (4)..(4): Xaa in position 4 is Ala, Ile or Val
  Variant (5)..(5): Xaa in position 5 is Ala, Asn, Pro or Ser
  Variant (6)..(6): Xaa in position 6 is Asp, Glu or Arg
  Variant (7)..(7): Xaa in position 7 is Phe or Leu
  Variant (8)..(8): Xaa in position 8 is Leu or Met
  Variant (9)..(9): Xaa in position 9 is any amino acid
  Variant (10)..(10): Xaa in position 10 is Ala or Gly
  Variant (11)..(11): Xaa in position 11 is Ala or Ser
  Variant (13)..(13): Xaa in position 13 is Ala or Leu
  Variant (15)..(15): Xaa in position 15 is Ile, Leu or Met
  Variant (19)..(20): Xaa in position 19 to 20 is any amino acid
  Variant (22)..(22): Xaa in position 22 is Ala or Asn
  Variant (23)..(23): Xaa in position 23 is Ala or Thr
  Variant (25)..(25): Xaa in position 25 is any amino acid
  Variant (26)..(27): Xaa in position 26 to 27 is any or no amino acid
  Variant (29)..(30): Xaa in position 29 to 30 is any or no amino acid
  Variant (33)..(33): Xaa in position 33 is Ile, Leu or Met
  Variant (34)..(34): Xaa in position 34 is Ala, Thr or Val
  Variant (35)..(35): Xaa in position 35 is Ala or Ser
  Variant (39)..(39): Xaa in position 39 is Ala, Ile or Val
  Variant (40)..(40): Xaa in position 40 is Ile or Leu
  Variant (41)..(41): Xaa in position 41 is Ala, Thr or Val
  Variant (42)..(42): Xaa in position 42 is Ser or Thr
  Variant (43)..(43): Xaa in position 43 is any amino acid
  Variant (44)..(44): Xaa in position 44 is Ala, Asn or Val
  Variant (49)..(49): Xaa in position 49 is any amino acid
  Variant (50)..(50): Xaa in position 50 is His or Tyr
  Variant (51)..(51): Xaa in position 51 is Ile or Val
RXDXXXXXXXXDXLXHPAXXEXXGXXXVXXEAXXXGLPXXXXXXCGYAXXX

SEQ ID NO: 26188 - protein, 23 aa, Artificial sequence
  protein pattern
  Variant (2)..(2): Xaa in position 2 is Phe or Tyr
  Variant (4)..(4): Xaa in position 4 is Lys or Arg
  Variant (6)..(6): Xaa in position 6 is Gly or Pro
  Variant (12)..(12): Xaa in position 12 is any amino acid
  Variant (13)..(13): Xaa in position 13 is any or no amino acid
  Variant (15)..(15): Xaa in position 15 is any or no amino acid
  Variant (17)..(17): Xaa in position 17 is any amino acid
  Variant (19)..(19): Xaa in position 19 is Phe or Tyr
  Variant (20)..(21): Xaa in position 20 to 21 is any amino acid
  Variant (22)..(22): Xaa in position 22 is Lys or Arg
  Variant (23)..(23): Xaa in position 23 is Ala or Val
GXNXMXGLDVYXXAXDXCXXXXX

SEQ ID NO: 26189 - protein, 19 aa, Artificial sequence
  protein pattern
  Variant (2)..(3): Xaa in position 2 to 3 is any amino acid
  Variant (4)..(6): Xaa in position 4 to 6 is any or no amino acid
  Variant (9)..(10): Xaa in position 9 to 10 is any amino acid
  Variant (11)..(11): Xaa in position 11 is Ile, Leu or Met
  Variant (14)..(14): Xaa in position 14 is any amino acid
  Variant (15)..(15): Xaa in position 15 is Ile, Leu or Val
  Variant (16)..(17): Xaa in position 16 to 17 is any amino acid
  Variant (18)..(18): Xaa in position 18 is Asp or Glu
YXXXXXRFXXXPPXXXXXR

SEQ ID NO: 26190 - protein, 26 aa, Artificial sequence
  protein pattern
  Variant (3)..(3): Xaa in position 3 is any or no amino acid
  Variant (5)..(6): Xaa in position 5 to 6 is any or no amino acid
  Variant (9)..(9): Xaa in position 9 is Asp or Gly
  Variant (11)..(12): Xaa in position 11 to 12 is any amino acid
  Variant (15)..(15): Xaa in position 15 is Ala, Leu or Val
  Variant (16)..(16): Xaa in position 16 is Ala, Asp or Gly
  Variant (18)..(18): Xaa in position 18 is Ala or Ser
  Variant (19)..(19): Xaa in position 19 is Ile, Leu or Val
  Variant (20)..(20): Xaa in position 20 is any amino acid
  Variant (21)..(21): Xaa in position 21 is Ala or Thr
  Variant (22)..(22): Xaa in position 22 is Ile or Leu
  Variant (23)..(23): Xaa in position 23 is Ala, Gln or Ser
  Variant (24)..(24): Xaa in position 24 is Ala or Ser
  Variant (25)..(25): Xaa in position 25 is any amino acid
LLXVXXGSXFXXKGXXRXXXXXXXXP

SEQ ID NO: 26191 - protein, 15 aa, Artificial sequence
  protein pattern
  Variant (2)..(2): Xaa in position 2 is any amino acid
  Variant (3)..(3): Xaa in position 3 is Leu or Val
  Variant (4)..(4): Xaa in position 4 is Phe or Tyr
  Variant (9)..(9): Xaa in position 9 is Phe, His or Tyr
  Variant (15)..(15): Xaa in position 15 is Asp or Asn
FXXXKYFPXGGLQRX

SEQ ID NO: 26192 - protein, 13 aa, Artificial sequence
  protein pattern
  Variant (4)..(4): Xaa in position 4 is any amino acid
  Variant (5)..(5): Xaa in position 5 is Phe, His or Tyr
  Variant (6)..(6): Xaa in position 6 is Ala, Gln or Ser
  Variant (7)..(8): Xaa in position 7 to 8 is any amino acid
  Variant (10)..(10): Xaa in position 10 is Gln or Arg
  Variant (11)..(11): Xaa in position 11 is Ala, Asp or Val
  Variant (12)..(12): Xaa in position 12 is any amino acid
RYRXXXXXEXXXF

SEQ ID NO: 26193 - protein, 25 aa, Artificial sequence
  protein pattern
  Variant (2)..(2): Xaa in position 2 is Asp or Glu
  Variant (3)..(3): Xaa in position 3 is any amino acid
  Variant (5)..(5): Xaa in position 5 is any amino acid
  Variant (6)..(6): Xaa in position 6 is Ala, Asp, Gly, Asn or Val
  Variant (7)..(7): Xaa in position 7 is Phe, Ile or Leu
  Variant (8)..(8): Xaa in position 8 is any amino acid
  Variant (9)..(9): Xaa in position 9 is Ile, Leu or Val
  Variant (10)..(11): Xaa in position 10 to 11 is any amino acid
  Variant (12)..(12): Xaa in position 12 is Ala, Leu or Val
  Variant (13)..(13): Xaa in position 13 is Asn or Pro
  Variant (14)..(14): Xaa in position 14 is Ile or Val
  Variant (15)..(15): Xaa in position 15 is any amino acid
  Variant (16)..(16): Xaa in position 16 is Ala, Gly or Ser
  Variant (17)..(18): Xaa in position 17 to 18 is any amino acid
  Variant (20)..(20): Xaa in position 20 is any amino acid
  Variant (21)..(21): Xaa in position 21 is any or no amino acid
  Variant (23)..(24): Xaa in position 23 to 24 is any amino acid
  Variant (25)..(25): Xaa in position 25 is Glu, His, Lys or Arg
GXXPXXXXXXXXXXXXXXNXXRXXX

SEQ ID NO: 26194 - protein, 27 aa, Artificial sequence
  protein pattern
  Variant (2)..(2): Xaa in position 2 is any amino acid
  Variant (3)..(3): Xaa in position 3 is Ala or Val
  Variant (4)..(4): Xaa in position 4 is Ile, Leu or Val
  Variant (6)..(6): Xaa in position 6 is any amino acid
  Variant (8)..(8): Xaa in position 8 is any amino acid
  Variant (9)..(10): Xaa in position 9 to 10 is any or no amino acid
  Variant (12)..(13): Xaa in position 12 to 13 is any or no amino acid
  Variant (15)..(22): Xaa in position 15 to 22 is any amino acid
  Variant (23)..(23): Xaa in position 23 is Ile, Leu or Val
  Variant (24)..(26): Xaa in position 24 to 26 is any amino acid
  Variant (27)..(27): Xaa in position 27 is Ile, Leu or Val
LXXXGXDXXXPXXFXXXXXXXXXXXXX

SEQ ID NO: 26195 - protein, 20 aa, Artificial sequence
  protein pattern
  Variant (2)..(3): Xaa in position 2 to 3 is any or no amino acid
  Variant (5)..(5): Xaa in position 5 is any amino acid
  Variant (6)..(6): Xaa in position 6 is Ala or Val
  Variant (7)..(7): Xaa in position 7 is Ile, Leu, Met or Val
  Variant (8)..(9): Xaa in position 8 to 9 is any amino acid
  Variant (11)..(11): Xaa in position 11 is Phe or Leu
  Variant (12)..(12): Xaa in position 12 is any amino acid
  Variant (14)..(15): Xaa in position 14 to 15 is any amino acid
  Variant (16)..(16): Xaa in position 16 is Leu or Met
  Variant (17)..(17): Xaa in position 17 is Asp, Asn or Thr
  Variant (18)..(19): Xaa in position 18 to 19 is any amino acid
AXXGXXXXXPXXQXXXXXXL

SEQ ID NO: 26196 - DNA, 798 bp, Azotobacter vinelandii
  CDS (1)..(798): transl_table=11
atgacagcccgaccggaaggcgaccaggacatgcccctggtcgcgcacctgaccgaactgcgcacacgcctgctgcgctgcgtactggcagtgttgctgatcttcatcgcactcgttcccttcgcccaggaaatctacaccctggtctcggcgccgctgcgcgcctatctgccggagggcgcgaccatgatcgccaccggcgtggcctcgccgttcctgaccccgttcaagctgaccgcctgggtggcgctgtttctcagcgttccggtgatcctgcatcaggcctggggcttcatcgcgccggggctttaccggcaggaaaagcgcatcgccctgccgttgctggcttccagcatcgccctgttctacatcggcatgtccttcgtctatttcctggtcttcccgctgatgttccacttcttcgccagcgtcacccccgaaggcgtggcgatgatgaccgacatcaacgaatacctggacttcgtcctcaccctgttcttcgccttcggcgtggccttcgagattccggtggcgaccttcctgatcgtctggatcggcctggtcgacgtggaggcgctgaagaaaagccgcccttacgtgatcgtcggctgcttcgtggtcggcatgatcctcacgccgccggatgtcttctcccagaccctgctggcggtgccgatgtggctgctgttcgaggtcggcatcctgttcggcgccatggtccgccgcgacgccggggaaaccggcgacggcaccgccctggccggccgtgggcacgacgaccagccgccccgggcatga

SEQ ID NO: 26197 - protein, 265 aa, Azotobacter vinelandii
MTARPEGDQDMPLVAHLTELRTRLLRCVLAVLLIFIALVPFAQEIYTLVSAPLRAYLPEGATMIATGVASPFLTPFKLTAWVALFLSVPVILHQAWGFIAPGLYRQEKRIALPLLASSIALFYIGMSFVYFLVFPLMFHFFASVTPEGVAMMTDINEYLDFVLTLFFAFGVAFEIPVATFLIVWIGLVDVEALKKSRPYVIVGCFVVGMILTPPDVFSQTLLAVPMWLLFEVGILFGAMVRRDAGETGDGTALAGRGHDDQPPRA

SEQ ID NO: 26198 - DNA, 780 bp, Klebsiella pneumoniae subsp. pneumoniae MGH 78578; identical to SEQ ID NO: 12708
  CDS (1)..(780): transl_table=11

SEQ ID NO: 26199 - protein, 259 aa, Klebsiella pneumoniae subsp. pneumoniae MGH 78578; identical to SEQ ID NO: 12709

SEQ ID NO: 26200 - DNA, 810 bp, Xanthobacter autotrophicus Py2
  CDS (1)..(810): transl_table=11
atgagcgacgaggacgatatcgacgcctccaaggccccgctcatcgagcacctcatcgaactgcggtcgcggctcatcaagtcgctgatcgcgttcctgatcgccttcttcatctgcttcatgttcgccaagcagatctacaatattctgttgtggccctatgagtttgcatccggtttcgcgccgggcatcaagctcatctacacggcgccgcaggaattcctgttcacccagatcaagcttggcatgttcggggcggccttcatctcgttcccggtggtggcgacgcaggtctacatgttcgtggcgccgggcctctacaagcacgagaagaacgctttcaggccctatctggtggcgacccccatctgcttcctgatcggcgcggcgttcgtctatttcgtcgccatgccgctggcgatgaaatacttccttgccatgcagcagaccggcggcgacgggaaggcggaaatctcgctcctgccgcgggtgtcggaatatctctccctcatcaccacgctcatcctcgccttcggcatctgcttccagcttccggtcatcctgacgctgctcgggcagatcggggtggtgacgcaggacatgctgcgcaaggtgcgccgttacgccatcgtcggcgtgttcatcgcggcggcggtgctcaccccgccggatgtcatcagccagctctcccttgccctgccgacgctgcttctctacgaggtgtcggtctatctggtgggcatcgtcgagaagcggcggctggtggcagaggcggcgcgcaacgcggccgacgccgcgacggccgactga

SEQ ID NO: 26201 - protein, 269 aa, Xanthobacter autotrophicus Py2
MSDEDDIDASKAPLIEHLIELRSRLIKSLIAFLIAFFICFMFAKQIYNILLWPYEFASGFAPGIKLIYTAPQEFLFTQIKLGMFGAAFISFPVVATQVYMFVAPGLYKHEKNAFRPYLVATPICFLIGAAFVYFVAMPLAMKYFLAMQQTGGDGKAEISLLPRVSEYLSLITTLILAFGICFQLPVILTLLGQIGVVTQDMLRKVRRYAIVGVFIAAAVLTPPDVISQLSLALPTLLLYEVSVYLVGIVEKRRLVAEAARNAADAATAD

SEQ ID NO: 26202 - DNA, 753 bp, Vibrio cholerae O1 biovar eltor str. N16961
  CDS (1)..(753): transl_table=11
atgtcttccgttgaacagacccaacctttgatcagccatttgttggaactgcgtaatcgcctactcaaagcggtggcggctgtggtggtgatatttattggcttgatctatttctcgaatgaaatttacgagtttgtctcaaaacccctagtcgagcgacttcccgcgggcgcaaccatgattgcgaccgatgtggcttcaccctttttcacgcctttaaaactgacgttgattgccgcggtgtttctcgcggtgcctttcattttgtatcaggtgtgggcttttgtggctcccggtttatataagcacgaacggcgtttaatcttcccactgctggtctctagctcgctgctgttttactgcggtgtcgcgtttgcctattttgtggtgtttccgctggtgtttggatttttcaccgccatttcactcggtggtgtggagttcgcgaccgatatcgcgagttatctcgattttgtattggcgctgtttctagcctttggtatcgcgtttgaagtgccagttgcgatcattctgctgtgctggacgggcgcaaccacgcctaaaagcctatcggaaaagcgtccatacattatcgttggtgcgtttgtagttggtatgttactgacgccgccggatatgatttcgcaaacgctactcgccatacctatgtgcttgttgtttgaagttggtttgttcttcgctcgtttttatacccgtgatgaagccgatgaaggacaagaggaagaagaataa

SEQ ID NO: 26203 - protein, 250 aa, Vibrio cholerae O1 biovar eltor str. N16961
MSSVEQTQPLISHLLELRNRLLKAVAAVVVIFIGLIYFSNEIYEFVSKPLVERLPAGATMIATDVASPFFTPLKLTLIAAVFLAVPFILYQVWAFVAPGLYKHERRLIFPLLVSSSLLFYCGVAFAYFVVFPLVFGFFTAISLGGVEFATDIASYLDFVLALFLAFGIAFEVPVAIILLCWTGATTPKSLSEKRPYIIVGAFVVGMLLTPPDMISQTLLAIPMCLLFEVGLFFARFYTRDEADEGQEEEE

SEQ ID NO: 26204 - DNA, 738 bp, Pasteurella multocida subsp. multocida str. Pm70; identical to SEQ ID NO: 12712
  CDS (1)..(738): transl_table=11

SEQ ID NO: 26205 - protein, 245 aa, Pasteurella multocida subsp. multocida str. Pm70; identical to SEQ ID NO: 12713

SEQ ID NO: 26206 - DNA, 804 bp, Pseudomonas aeruginosa PAO1
  CDS (1)..(804): transl_table=11
atgagcgccgataaacccgagcagcctgagcacgaccaggaaatgcccctggtctcgcacctgaccgaactgcgtacgcgcctgctgcgcagcgtggcggcgatcttcctgatcttcgccggcctgttctacttctcgcagaagatctacaccctggtctccgagccgttgcgccgcttccttccggaaggcaccagcatgatcgccaccgacgtcgcctcgccgttcctcgcgccgttcaagctgaccatggtggtggcgctgttcctcgccatgccggtgatcctcgcgcaggtctggggcttcatcgcgcccggcctgtacaagcacgagaagcgcgtggcgctgccgctgctggtgtccagcatcatcctgttctacgccgggatggccttcgcctacttcctggtgttcccgatgatcttccacttcttcgccagcgtgacgcccgagggcgtggcgatgatgacggacatcaacagctacctggacttcgtcctgactctgttcttcgccttcggcgtcgccttcgagatcccggtggccacggtgctgctgatctggatcggagtggtcgacgtcgattacctgaagaagatccgcccgtacgtgatcatcggctgtttcgtggtcggcatggtcctgaccccgccggacatcttctcccagaccatgctcgcggtgccgatgtggctgctgttcgagatcggcctgctgttcggccgcctggtacgcaagcgcggcgagcatccggacgaccaaccggccagcgacggcgaccagcctccggccacccgccagtga

SEQ ID NO: 26207 - protein, 267 aa, Pseudomonas aeruginosa PAO1
MSADKPEQPEHDQEMPLVSHLTELRTRLLRSVAAIFLIFAGLFYFSQKIYTLVSEPLRRFLPEGTSMIATDVASPFLAPFKLTMVVALFLAMPVILAQVWGFIAPGLYKHEKRVALPLLVSSIILFYAGMAFAYFLVFPMIFHFFASVTPEGVAMMTDINSYLDFVLTLFFAFGVAFEIPVATVLLIWIGVVDVDYLKKIRPYVIIGCFVVGMVLTPPDIFSQTMLAVPMWLLFEIGLLFGRLVRKRGEHPDDQPASDGDQPPATRQ

SEQ ID NO: 26208 - DNA, 771 bp, Neisseria meningitidis MC58
  CDS (1)..(771): transl_table=11
gtgtccgaaacacaaaacgaacaacccgtccaaccgcttgtcgagcatctcatcgagctgcgccgccgcctgatgtggacggttgtcggcatcttagtctgctttttcggcctaatgccgtttgcccaacaactctatacttttatcgccgacccgctgatggcaaacctgcccaaagacaccagcatgattgccaccgatgtcatcgcaccatttttcgtgccggtcaaagttaccctgatggcggcatttttaatttcgctgccgcatacgctctaccaaatctgggcatttgtcgcgcccgcactctaccaaaacgaaaaacgcctgattacgccgctcgtcctctccagcgtcagcctgtttttcatcggcatggcatttgcctactttttggttttccccgtcattttcaaattccttgccagcgttacccctgtcggtgtcaatatggcgacagacatcgacaaatacctctccttcatcttggggatgtttgttgcgttcggcacaacgtttgaagtccccattgtcgttatcctgttaaccaaaattggtgtggtaacaaccggacagctcaaacgcgcccgcccctatgtgattgtcggcgcgtttgtcattgccgccatcatcacgccgcccgatgtgatttcacaaaccctgcttgccattccgctgattctcttatacgaagcaggtatttggttcggacgctttttcacgccacgttcagaacaggatggcgacatacggccgcctgcaacaacctga

SEQ ID NO: 26209 - protein, 256 aa, Neisseria meningitidis MC58
MSETQNEQPVQPLVEHLIELRRRLMWTVVGILVCFFGLMPFAQQLYTFIADPLMANLPKDTSMIATDVIAPFFVPVKVTLMAAFLISLPHTLYQIWAFVAPALYQNEKRLITPLVLSSVSLFFIGMAFAYFLVFPVIFKFLASVTPVGVNMATDIDKYLSFILGMFVAFGTTFEVPIVVILLTKIGVVTTGQLKRARPYVIVGAFVIAAIITPPDVISQTLLAIPLILLYEAGIWFGRFFTPRSEQDGDIRPPATT

SEQ ID NO: 26210 - DNA, 843 bp, Sinorhizobium meliloti 1021; identical to SEQ ID NO: 12724
  CDS (1)..(843): transl_table=11

SEQ ID NO: 26211 - protein, 280 aa, Sinorhizobium meliloti 1021; identical to SEQ ID NO: 12725

SEQ ID NO: 26212 - DNA, 780 bp, Salmonella typhimurium LT2; identical to SEQ ID NO: 12728
  CDS (1)..(780): transl_table=11

SEQ ID NO: 26213 - protein, 259 aa, Salmonella typhimurium LT2; identical to SEQ ID NO: 12729

SEQ ID NO: 26214 - DNA, 804 bp, Ralstonia solanacearum GMI1000
  CDS (1)..(804): transl_table=11
atgagtgccgctccgcacgatccgcacgattcgcccgaggacggcgcaccggaaaccttcatctcgcacctggtcgagctgcgcgagcgcatcgtcaaggccggcgcgggcgtgctgctgatcttcctgggcctggtgtactgggcgcccgacatcttcaacctgttctcgcgtccgctgatgcaggcgctgcccaagaacggccacatgatcgtcaccgatgtcaccggctcgttcttcgtgccgatgaaggtgacgctgctggtggccttcctggtcgcgctgccgtgggtgctgtaccagatctggcgcttcgtggcgccggggttgtacgcgcacgagaagcgcatggtcctgccgctggtggtgagcagctacgtgctgttcctgtgcggcgtggcgttcgcgtacttcctggtcttcccgaccgtgttcaagttcatggcgcactacaacgcgccgctgggcgcggagatgtcgaccgacgtcgacaagtacctcagcttcgccatgaccaccttcctggcctttggcatcaccttcgaggtgccggtggtggtgatcgtgctggtgcgcttcggcatcgtcagcctggagaagctgcggcagatccggccgtacgtggtggtgggggcgttcgtgatcgcggccgtcgtcacgccgccggatgtgatgtcgcagctgttgctggccgtgccgctgtggctgctgtacgagctgggcctgatcctggccgcgatcttcatccgcaagaccgcggtgcccgacaccgagacggaacatcttccggtggtgaaggactga

SEQ ID NO: 26215 - protein, 267 aa, Ralstonia solanacearum GMI1000
MSAAPHDPHDSPEDGAPETFISHLVELRERIVKAGAGVLLIFLGLVYWAPDIFNLFSRPLMQALPKNGHMIVTDVTGSFFVPMKVTLLVAFLVALPWVLYQIWRFVAPGLYAHEKRMVLPLVVSSYVLFLCGVAFAYFLVFPTVFKFMAHYNAPLGAEMSTDVDKYLSFAMTTFLAFGITFEVPVVVIVLVRFGIVSLEKLRQIRPYVVVGAFVIAAVVTPPDVMSQLLLAVPLWLLYELGLILAAIFIRKTAVPDTETEHLPVVKD

SEQ ID NO: 26216 - DNA, 804 bp, Agrobacterium tumefaciens str. C58; identical to SEQ ID NO: 12732
  CDS (1)..(804): transl_table=11

SEQ ID NO: 26217 - protein, 267 aa, Agrobacterium tumefaciens str. C58; identical to SEQ ID NO: 12733

SEQ ID NO: 26218 - DNA, 825 bp, Brucella melitensis 16M; identical to SEQ ID NO: 12734
  CDS (1)..(825): transl_table=11

SEQ ID NO: 26219 - protein, 274 aa, Brucella melitensis 16M; identical to SEQ ID NO: 12735

SEQ ID NO: 26220 - DNA, 1023 bp, Arabidopsis thaliana; identical to SEQ ID NO: 12736
  CDS (1)..(1023)

SEQ ID NO: 26221 - protein, 340 aa, Arabidopsis thaliana; identical to SEQ ID NO: 12737

SEQ ID NO: 26222 - DNA, 945 bp, Corynebacterium glutamicum ATCC 13032; identical to SEQ ID NO: 12738
  CDS (1)..(945): transl_table=11

SEQ ID NO: 26223 - protein, 314 aa, Corynebacterium glutamicum ATCC 13032; identical to SEQ ID NO: 12739

SEQ ID NO: 26224 - DNA, 951 bp, Streptomyces coelicolor A3(2); identical to SEQ ID NO: 12740
  CDS (1)..(951): transl_table=11

SEQ ID NO: 26225 - protein, 316 aa, Streptomyces coelicolor A3(2); identical to SEQ ID NO: 12741

SEQ ID NO: 26226 - DNA, 777 bp, Shigella flexneri 2a str. 301; identical to SEQ ID NO: 12746
  CDS (1)..(777): transl_table=11

SEQ ID NO: 26227 - protein, 258 aa, Shigella flexneri 2a str. 301; identical to SEQ ID NO: 12747

SEQ ID NO: 26228 - DNA, 750 bp, Shewanella oneidensis MR-1
  CDS (1)..(750): transl_table=11
atgtcgcaacagcagccacttatcagccatttgcttgaacttaggtccaagctgcttaaatccattgccagtgtcttaattgtatttatttgcagcgtgtattgggcaaatgatatttaccattacatggcaatccctttaatgcagtctttgcccttaggtggcagcatgattgcgaccgatgtcgccgcgcctttcttcgcccctttcaaactgacattagtgttgtcattttttgtggcagtcccctatgtgctctatcaaatttggtcttttgttgcgcctggtttgtataagcatgaaaaacgtttagtcatgccgctactttttagcagcactgtactgttttatttagggatcgcctttgcgtattacattgtattccctgtcgtgtttggcttttttgccaacacagcacccgagggcgtacaagtcgcaaccgatatcagcagctacctcgactttgtgctgaaattattttttgcattcggcctatcctttgagatccctattgccgttgtcctactctgttgggctggtgtcacatcacctgaagatctcaagcaaaaacgcccttatatcattgtcggcgcattcgtggtgggcatgctacttacgccacccgatgttatctcccagactatgcttgccgtgccaatgctgatattgttcgaagccggattatttgcggctcgtttttacagtaaacctgatgacgagaccgacgaagaagaatcaacgaacaactaa

SEQ ID NO: 26229 - protein, 249 aa, Shewanella oneidensis MR-1
MSQQQPLISHLLELRSKLLKSIASVLIVFICSVYWANDIYHYMAIPLMQSLPLGGSMIATDVAAPFFAPFKLTLVLSFFVAVPYVLYQIWSFVAPGLYKHEKRLVMPLLFSSTVLFYLGIAFAYYIVFPVVFGFFANTAPEGVQVATDISSYLDFVLKLFFAFGLSFEIPIAVVLLCWAGVTSPEDLKQKRPYIIVGAFVVGMLLTPPDVISQTMLAVPMLILFEAGLFAARFYSKPDDETDEEESTNN

SEQ ID NO: 26230 - DNA, 942 bp, Corynebacterium efficiens YS-314
  CDS (1)..(942): transl_table=11
atgtcggtggtggagcacatccaggagttccgtcggcgtctgctgatctccctggccggcattctcgtcggcaccatcctcgccttcatctggtaccagacctccctctggggaacccccagcctgggtcagatcctgcgcgagccctactgttcgctgccaccggaggcacgcgcatccttctccgcctccgagaccgatgactgccgcctgctggccaccggcccctttgaccccttcatgctgcgactgaaggtctccggcctggtcggtctcgtactggcctccccggtgtggctgtcccagatctggggtttcatcaccccggggctgatgaagaacgagcggcggtggaccttcatctttgtctccatcgcggtcctgctgttcgtcgcgggtgcggtcctggcctacttcgtcgtcgccttcggcctggatttcctgctcaccatcggtgatgaggccagcatggcggccctgaccggtgaacgctacttcaacttcctgctctccctgctgctgatcttcggtgtcagcttcgaggtgcccctgatcatcatcatgctcaatgtggtcggcatcctgcagtatgaggccatcaaggacaagcgtcgcatgatcatcatgatcctgttcgtattcgcggccttcatgacacccggccaggaccccttctccatgctggtgctcgccctgtccctgacattgctggtggagatcgccatccagttctgccgaatcaacgacaagcgtcgtgaccggcagcgccccgaatggctggacgccgatgatctctcggcctccccactagatgacgcacccggcggcacgggggcaccccagccggtggaaccaccggccccggttgatgtcgaccggggtgacaaccggacgtcgacacgcttcacccacggcggatcagccttcgacgacgtgctctga

SEQ ID NO: 26231 - protein, 313 aa, Corynebacterium efficiens YS-314
MSVVEHIQEFRRRLLISLAGILVGTILAFIWYQTSLWGTPSLGQILREPYCSLPPEARASFSASETDDCRLLATGPFDPFMLRLKVSGLVGLVLASPVWLSQIWGFITPGLMKNERRWTFIFVSIAVLLFVAGAVLAYFVVAFGLDFLLTIGDEASMAALTGERYFNFLLSLLLIFGVSFEVPLIIIMLNVVGILQYEAIKDKRRMIIMILFVFAAFMTPGQDPFSMLVLALSLTLLVEIAIQFCRINDKRRDRQRPEWLDADDLSASPLDDAPGGTGAPQPVEPPAPVDVDRGDNRTSTRFTHGGSAFDDVL

SEQ ID NO: 26232 - DNA, 762 bp, Pseudomonas putida KT2440; identical to SEQ ID NO: 12748
  CDS (1)..(762): transl_table=11

SEQ ID NO: 26233 - protein, 253 aa, Pseudomonas putida KT2440; identical to SEQ ID NO: 12749

SEQ ID NO: 26234 - DNA, 789 bp, Pseudomonas putida KT2440; identical to SEQ ID NO: 12750
  CDS (1)..(789): transl_table=11

SEQ ID NO: 26235 - protein, 262 aa, Pseudomonas putida KT2440; identical to SEQ ID NO: 12751

SEQ ID NO: 26236 - DNA, 750 bp, Vibrio vulnificus CMCP6
  CDS (1)..(750): transl_table=11
atgtctaccgttgagcagactcaacctttgattagccacttgttagaactgcgtaatcgcttattgaaagcgatccttgcagtgttgattgtctttgtcggcctaatctatttttctggtgaaatatacgagtttatctcggcgccgctggtggagcgtcttcctgaaggggcgacgatgatcgcaacggatgtggcttcaccgtttttcacgccactcaaattgactttgatcgtggcggtctttttggctgtgccgtttattctttatcaggtttgggcctttgtggcgcctggcttgtataagcatgagcgtcgcttaatcatgccattgttggtttccagttcgttgttgttttattgcggcgtggcgtttgcctattacgttgtctttcccctggtgtttggctttttcaccgccatctctttaggaggtgtggagtttgccaccgacatcgccagttatttggattttgttttagcgctgtttttagcatttggtattgcttttgaggtaccagtagcgatcattttgctgtgttggacaggagcaaccgatccgaagagcttaagcgaaaaacgtccctatattattgttggtgcgtttatcgtagggatgctgttaactccgccagatatgatttcgcaaaccctattggccattccgatgtgtttgttgtttgaagtcggtttattctttgcgcgtttctatacccgcaaagaggaaagcgaagaacaagagcaagaataa

SEQ ID NO: 26237 - protein, 249 aa, Vibrio vulnificus CMCP6
MSTVEQTQPLISHLLELRNRLLKAILAVLIVFVGLIYFSGEIYEFISAPLVERLPEGATMIATDVASPFFTPLKLTLIVAVFLAVPFILYQVWAFVAPGLYKHERRLIMPLLVSSSLLFYCGVAFAYYVVFPLVFGFFTAISLGGVEFATDIASYLDFVLALFLAFGIAFEVPVAIILLCWTGATDPKSLSEKRPYIIVGAFIVGMLLTPPDMISQTLLAIPMCLLFEVGLFFARFYTRKEESEEQEQE

SEQ ID NO: 26238 - DNA, 813 bp, Bradyrhizobium japonicum USDA 110
  CDS (1)..(813): transl_table=11
atgagcgacgccgatatcgaggccagcaaagccccgctgatggaccatttgatcgagctgcgctcgcggctgatcaaggcgctgctcggctttggcgtggccttcatcttctgcttcttcttcgccaagcagatctacaacgtgctggtctggcccttcgtgtgggtcgcaggacccgagaattcgaaattcatctacacggcgctgctggaatatttcatcacgcagctcaagctcgcgctgttcggcgccggcttcatctcgttcccgatcgtggcgacgcagatctacaagttcgtcgcgcccgggctctacaagcacgagaagcaggccttcttgccctatctggtcgcgaccccgttcttcttcgtgctgggtgcggcgctggtttatttcgtcgtgctgccgatgctggtccgcttctcgcttggcatgcagcaggccggcagcgacgagaccgcccagatccagctgctgcccaaggtcggcgaatacctgtcgctgatgatgtcgctgatcttcgccttcggcatcgccttccagcttccggtgatcctgacgctgctcggtcgcatcggcatcgtcacctcgaagatgctgcgcgagaagcgccgctatttcatcgtgatcgccttcgtgatcgcggccgtgctgaccccgccggacgtgctgagccagtgctcgctcgcgatccccttgctggcgctctacgagggctcgatcatcgcggtggcgatggtggagaagaaggcggcggccgcgcaggccgcggccggcaccgacgtgtcgacgccggccaatccggcagagtag

SEQ ID NO: 26239 - protein, 270 aa, Bradyrhizobium japonicum USDA 110
MSDADIEASKAPLMDHLIELRSRLIKALLGFGVAFIFCFFFAKQIYNVLVWPFVWVAGPENSKFIYTALLEYFITQLKLALFGAGFISFPIVATQIYKFVAPGLYKHEKQAFLPYLVATPFFFVLGAALVYFVVLPMLVRFSLGMQQAGSDETAQIQLLPKVGEYLSLMMSLIFAFGIAFQLPVILTLLGRIGIVTSKMLREKRRYFIVIAFVIAAVLTPPDVLSQCSLAIPLLALYEGSIIAVAMVEKKAAAAQAAAGTDVSTPANPAE

SEQ ID NO: 26240 - DNA, 801 bp, Pseudomonas syringae pv. tomato str. DC3000
  CDS (1)..(801): transl_table=11
atgagcgctgatatcccggaaaacgatcagcaaatgccgctgatctcgcacctcaccgagctgcgtacacgtctgttgcgctgtgtcgcggcagtgtttctgatttttgccggtctgttttacttcacgcagaagatctacaccctggtgtcggccccgctgcgcgtctacctgcctgaaggcgcaacgatgatcgccaccgacgtggcctcgccgttcatcacgccgttcaagctgaccatgatggtcgcgctgtttctgtcgatgccggtcatcctgcatcagatctggggcttcatcgccccgggcctgtacaagcatgaaaagcgtgtggccattccgttgctggtctccagcatcatcctgttttacgcaggcatggcgttcgcctactttctggtctttccgatcatcttccacttcttcgccagcgtgacgccggaaggcgtgtcgatgatgaccgacatcgccagttatctggacttcgtgatgacgttgttcttcgccttcggcgtggccttcgagatcccggtggcggtggtgttgctggtctggatcggcattgtcgacgtcaagtacctgaaaaagattcgtccgtacgtgatcatcggctgcttcgtggtcggcatgatcctgaccccgccggacatcttctcgcaaacgctgctggctgtgccgatgtggctgctgttcgagctgggcatcctgtgcagctcgatgatcaggaagcgcggcgaacacccggacgatgaaaccgaggacgctgacaagcaggatcagccgcccgccaccacaccgtga

SEQ ID NO: 26241 - protein, 266 aa, Pseudomonas syringae pv. tomato str. DC3000
MSADIPENDQQMPLISHLTELRTRLLRCVAAVFLIFAGLFYFTQKIYTLVSAPLRVYLPEGATMIATDVASPFITPFKLTMMVALFLSMPVILHQIWGFIAPGLYKHEKRVAIPLLVSSIILFYAGMAFAYFLVFPIIFHFFASVTPEGVSMMTDIASYLDFVMTLFFAFGVAFEIPVAVVLLVWIGIVDVKYLKKIRPYVIIGCFVVGMILTPPDIFSQTLLAVPMWLLFELGILCSSMIRKRGEHPDDETEDADKQDQPPATTP

SEQ ID NO: 26242 - DNA, 741 bp, Vibrio parahaemolyticus RIMD 2210633; identical to SEQ ID NO: 12752
  CDS (1)..(741): transl_table=11

SEQ ID NO: 26243 - protein, 246 aa, Vibrio parahaemolyticus RIMD 2210633; identical to SEQ ID NO: 12753

SEQ ID NO: 26244 - DNA, 777 bp, Nitrosomonas europaea ATCC 19718
  CDS (1)..(777): transl_table=11
atggatgacgatattacttttatttcacatctggtggaattacgctcccggctgatccgggcacttctggtactgtttctgggttttctcccctgcgctttctttgcgcgagagttatacagttttctggctttccccctgctggaaaaattaccacaaggcgggcagatgatcgccaccgaggtcgtcacccctttcttcatcccaatgaaagtagcgctgatggtggcatttctcatcacactgccgcatacgctctatcagctttgggcattcgtcgcacccggtctgtacagccacgagaaacgcctgtttctgccgctggtattcatcagcagccttctttttttcacaggtatggcatttgcctactttgccgtactgccactggtattcgagttcatcgtctattttgcgccggaaggggtcgccgtcatgactgacatcagcgaatacctcggttttgtcctgtcgatgttcctggctttcggaatcacatttgaagtaccggtcttcgtactgatactcattcggaccggtctcgtctcgatcgagaaaatgaaatctgtccgccgctttgtactggtaggtgcattcgtcatcggtgcgattttcactccacccgatgtcatgtcgcagatcttgctggcagtccctttatacctgctctacgaactgggcatcatcctggctgccttgtcgatgaaatcatcctcccgcaagtcaccactacccgttacgcaaaatcggcataacgataccggagaaaatgagtaa

SEQ ID NO: 26245 - protein, 258 aa, Nitrosomonas europaea ATCC 19718
MDDDITFISHLVELRSRLIRALLVLFLGFLPCAFFARELYSFLAFPLLEKLPQGGQMIATEVVTPFFIPMKVALMVAFLITLPHTLYQLWAFVAPGLYSHEKRLFLPLVFISSLLFFTGMAFAYFAVLPLVFEFIVYFAPEGVAVMTDISEYLGFVLSMFLAFGITFEVPVFVLILIRTGLVSIEKMKSVRRFVLVGAFVIGAIFTPPDVMSQILLAVPLYLLYELGIILAALSMKSSSRKSPLPVTQNRHNDTGENE

SEQ ID NO: 26246 - DNA, 750 bp, Haemophilus ducreyi 35000HP; identical to SEQ ID NO: 12754
  CDS (1)..(750): transl_table=11

SEQ ID NO: 26247 - protein, 249 aa, Haemophilus ducreyi 35000HP; identical to SEQ ID NO: 12755

SEQ ID NO: 26248 - DNA, 801 bp, Bordetella pertussis Tohama I; identical to SEQ ID NO: 12756
  CDS (1)..(801): transl_table=11

SEQ ID NO: 26249 - protein, 266 aa, Bordetella pertussis Tohama I; identical to SEQ ID NO: 12757

SEQ ID NO: 26250 - DNA, 744 bp, Chromobacterium violaceum ATCC 12472; identical to SEQ ID NO: 12762
  CDS (1)..(744): transl_table=11

SEQ ID NO: 26251 - protein, 247 aa, Chromobacterium violaceum ATCC 12472; identical to SEQ ID NO: 12763

SEQ ID NO: 26252 - DNA, 783 bp, Photorhabdus luminescens subsp. laumondii TTO1; identical to SEQ ID NO: 12768
  CDS (1)..(783): transl_table=11

SEQ ID NO: 26253 - protein, 260 aa, Photorhabdus luminescens subsp. laumondii TTO1; identical to SEQ ID NO: 12769

SEQ ID NO: 26254 - DNA, 816 bp, Rhodopseudomonas palustris CGA009; identical to SEQ ID NO: 12772
  CDS (1)..(816): transl_table=11

SEQ ID NO: 26255 - protein, 271 aa, Rhodopseudomonas palustris CGA009; identical to SEQ ID NO: 12773

SEQ ID NO: 26256 - DNA, 771 bp, Synechococcus sp. WH 7803
  CDS (1)..(771): transl_table=11
gtgtcggcaactggcgatgcggtgaatgacgttgagatgcctctggtggaccatcttgaggagctgcggcagagggttctgcgcagccttctcgctgtggcggtgagtgctttcgcttgcctgctggtcgtgaggcctttggttcggctgctggaggagcccgcaggctcgattcgttttcttcaactggctccaggggaattcctgttcgtttcgttcaaggtggctggctatgccggactcaccctggcgctcccttacgtgctgtatcagggactggccttcgttctccctgggctcacgcgcaacgaacgtcgcctgatcgccccagccgtggccggatcggcggtgttgttcctggccggactcgcctttgcctggtgggccctcgtgccggcagccctgcgttttctcgtgagctacggagccgacgtggtggaaccgatctggtcgatcgagcgctatctcgatttcgtgctgctcttgatgctgtccacaggactggccttccagttaccggtgcttcagctgctgcttggtgcccttgggttggtgaattggcggcggatgctgtcggcctggcggtgggtggtgctgacctccgccctggccggagcggtgctcactccctccacagaccccatcaccatgcttcttcttggaggagcgatcaccgccctcttcctgatcggcgtgttgctggtggcgattgtgcagcgtttcaaagcagaaactcctccaggcgaccctcccccggcagctgcaggctga

SEQ ID NO: 26257 - protein, 256 aa, Synechococcus sp. WH 7803
MSATGDAVNDVEMPLVDHLEELRQRVLRSLLAVAVSAFACLLVVRPLVRLLEEPAGSIRFLQLAPGEFLFVSFKVAGYAGLTLALPYVLYQGLAFVLPGLTRNERRLIAPAVAGSAVLFLAGLAFAWWALVPAALRFLVSYGADVVEPIWSIERYLDFVLLLMLSTGLAFQLPVLQLLLGALGLVNWRRMLSAWRWVVLTSALAGAVLTPSTDPITMLLLGGAITALFLIGVLLVAIVQRFKAETPPGDPPPAAAG

SEQ ID NO: 26258 - DNA, 792 bp, Bartonella quintana str. Toulouse
  CDS (1)..(792): transl_table=11
atgaatgagagagatgaagttgatgccaatatggcaccacttttagaacatttgattgaacttcgtcagcgaattattgttgctctgatcgcatttttaatagcttttatgatgtgttttctcgtcaaagactatatcttaaattttttgatatggccttatcagtgggcaatgaaaatgtcgggtggtaatcctgaaagtattcgtctgcaatcaacacaagtatgggaaacttttttaacgaaaatgaaacttgctgcttttggggccgctattttgtcatttccctgtacggcttttcagttttatagctttatcgcaccaggtctttataaaaatgaacgtatggcttttttaccatttctcattagtagcccgatcttattttgtattgggggagcatttgtttatgctctattagcgccgataatgctttggtttagtctttctcagcaatttcttccaggtgttcatttaagaatagagtttatagtccgtatctccgattatttgagctttatgacatcgtttatgctgatttttggtttgatttttcaattacctcttgtcaccagtcttttaacgaacgttggacttttaacttctcatggtttggtatctaaacgaaagtgggctatcctcgtctcttttataattgcggcgatagtaactccatcggatttttttactatgtttgcagtggctttaccaacgattgctctttatgagatttcaattttaattgcctactggatagaaaagagaaaaaatcctcttaagagaagtttataa

SEQ ID NO: 26259 - protein, 263 aa, Bartonella quintana str. Toulouse
MNERDEVDANMAPLLEHLIELRQRIIVALIAFLIAFMMCFLVKDYILNFLIWPYQWAMKMSGGNPESIRLQSTQVWETFLTKMKLAAFGAAILSFPCTAFQFYSFIAPGLYKNERMAFLPFLISSPILFCIGGAFVYALLAPIMLWFSLSQQFLPGVHLRIEFIVRISDYLSFMTSFMLIFGLIFQLPLVTSLLTNVGLLTSHGLVSKRKWAILVSFIIAAIVTPSDFFTMFAVALPTIALYEISILIAYWIEKRKNPLKRSL

SEQ ID NO: 26260 - DNA, 762 bp, Acinetobacter sp. ADP1
  CDS (1)..(762): transl_table=11
atgagccagatcccttcaaatgacatcatgcctgcccaagaaaccttggaacagatgcctattactcaacatttgattgcattgagacgacacctatttaagatcgttggggttacgctcgctttattttttattttattaccatttcgtaatacgacgtatcagtggctgtcagagcctcttcgtcgccagatgccaagcacatcctccatgattgcaacagatgttacagcaacatttatggcacctttcaagctcaatttatgtgttgccatgatgttggccatgccatttattttatttcagctctggacctttgttaaacccgccttatatgaaaaagaaaaacatttagccataccacttttagtgggtagtattgtgctgttttatacaggcgttgcttttgcttactttattgccttacctggcattttacatttctttatgagcgtttcacctgaaactgtcgcgccgatgaccgatatcaatagttatctggatttctgtttaaagttatttctggtttttggttttacctttgaaattccaattgcgaccttattgctcatcttgattggaatcgtaaatacacaaagtctggtcgagaaaagacgttttattgtggtcggttgcttttttatctcgatgtttatcacaccgcccgatgcgatttccatgattatgctcgctgttccaatgtggttattgtttgagcttggattaatttttggaaagatcctcgaaaaacgtagagcttaa

SEQ ID NO: 26261 - protein, 253 aa, Acinetobacter sp. ADP1
MSQIPSNDIMPAQETLEQMPITQHLIALRRHLFKIVGVTLALFFILLPFRNTTYQWLSEPLRRQMPSTSSMIATDVTATFMAPFKLNLCVAMMLAMPFILFQLWTFVKPALYEKEKHLAIPLLVGSIVLFYTGVAFAYFIALPGILHFFMSVSPETVAPMTDINSYLDFCLKLFLVFGFTFEIPIATLLLILIGIVNTQSLVEKRRFIVVGCFFISMFITPPDAISMIMLAVPMWLLFELGLIFGKILEKRRA

SEQ ID NO: 26262 - DNA, 756 bp, Erwinia carotovora subsp. atroseptica SCRI1043; identical to SEQ ID NO: 12788
  CDS (1)..(756): transl_table=11

SEQ ID NO: 26263 - protein, 251 aa, Erwinia carotovora subsp. atroseptica SCRI1043; identical to SEQ ID NO: 12789

SEQ ID NO: 26264 - DNA, 771 bp, Mannheimia succiniciproducens MBEL55E; identical to SEQ ID NO: 12794
  CDS (1)..(771): transl_table=11

SEQ ID NO: 26265 - protein, 256 aa, Mannheimia succiniciproducens MBEL55E; identical to SEQ ID NO: 12795

SEQ ID NO: 26266 - DNA, 765 bp, Methylococcus capsulatus str. Bath
  CDS (1)..(765): transl_table=11
gtggagcagcctttcctctcccacctcgtagaattgcggcagcggattcttcgcgccctcgcgatggtcatggtgctgtttcttggcctggcgttctatgccaacgagatttattccttcctcgccggcccgttgctgaagcatatgccggaaggctcgcagatggtcgcgatcgacgtggcgtcgccgttcctgacgccgttcaaactgaccttgatggtctgcgtattcctgtcgatccccttcatcctttaccaggcctgggctttcatcgctccgggcctctaccgccatgagcgacgcatggtgctgcccttgctggtggcgagcacgctgctgttctacgccggtgtggccttcgcctattacgtggtattccccgtgatgttcggttttttgaccgccaccgcaccggccggcgtggcggtgatgacggacatcgccaagtacctcgatttcgtgctgaccctcttcctcgccttcggcgtcgccttcgaggtgccgatcgcaaccatcctcctggtatggagcggcatcgtctcccgtgaaaccatcggcaacaaccgtccctacgtgatcgtgggcgctttcgtgataggcgcagtcctgacaccgccggatgtcgtatcgcagaccctgctttcggttccgatctggctcttgttcgaattcggcttcttcttctcccggtttttcgagcctcggccggcctacgagaccccccgatccatcgaacaccgcgattcctcttcttccggagattga

SEQ ID NO: 26267 - protein, 254 aa, Methylococcus capsulatus str. Bath
MEQPFLSHLVELRQRILRALAMVMVLFLGLAFYANEIYSFLAGPLLKHMPEGSQMVAIDVASPFLTPFKLTLMVCVFLSIPFILYQAWAFIAPGLYRHERRMVLPLLVASTLLFYAGVAFAYYVVFPVMFGFLTATAPAGVAVMTDIAKYLDFVLTLFLAFGVAFEVPIATILLVWSGIVSRETIGNNRPYVIVGAFVIGAVLTPPDVVSQTLLSVPIWLLFEFGFFFSRFFEPRPAYETPRSIEHRDSSSSGD

SEQ ID NO: 26268 - DNA, 783 bp, Anaplasma marginale str. St. Maries; identical to SEQ ID NO: 12796
  CDS (1)..(783): transl_table=11

SEQ ID NO: 26269 - protein, 260 aa, Anaplasma marginale str. St. Maries; identical to SEQ ID NO: 12797

SEQ ID NO: 26270 - DNA, 789 bp, Azoarcus sp. EbN1; identical to SEQ ID NO: 12798
  CDS (1)..(789): transl_table=11

SEQ ID NO: 26271 - protein, 262 aa, Azoarcus sp. EbN1; identical to SEQ ID NO: 12799

SEQ ID NO: 26272 - DNA, 939 bp, Silicibacter pomeroyi DSS-3; identical to SEQ ID NO: 12800
  CDS (1)..(939): transl_table=11

SEQ ID NO: 26273 - protein, 312 aa, Silicibacter pomeroyi DSS-3; identical to SEQ ID NO: 12801

SEQ ID NO: 26274 - DNA, 819 bp, Bacillus clausii KSM-K16
  CDS (1)..(819): transl_table=11
atgacgatgatgacaccaaatcaacaaacgtccaaaaagaaaaagcgtaaaggcagaaaagggcgtgtccctatgcaagacatgtccattatggatcacgcggaagagctaaggcgcaggatttttgtggtcctcgccttttttattgtcgcgcttattggcggttttttcttggcggttcccgttattacgtttttgcagaactccccccaagccgctgatatgccgtttaatgcttttcgattgaccgacccgcttcgtgtctatatgaactttgctgtcataacagcgcttgtgcttatcattccagtgatcttgtaccaattatgggcctttgtttcaccgggattaaaagaaaacgaacaaaaagcgacgctcgcgtacattccaattgcgttcctattgtttttggcaggaattgctttttcctattttattttattgccttttgtcatttcttttatggggcaaatggccgaccgcctcgaaataaatgagatgtatggaatcaatgaatacttttcatttttgttccaactgaccatcccttttgggcttttgtttcagctcccggtagttgtgatgtttttaacgaggctaggagtggtcacgccagcattcctgcggaaaatccgtaaatacgcgtattttgccttgcttgtgatcgctggcattattacaccccctgaattaacgtcgcatctgtttgttacggtgccgatgcttattttatatgagatcagcattaccatttcggcgattacataccgaaaataccatggaactaccgaccataatggccaagaaagtgctaaatga

SEQ ID NO: 26275 - protein, 272 aa, Bacillus clausii KSM-K16
MTMMTPNQQTSKKKKRKGRKGRVPMQDMSIMDHAEELRRRIFVVLAFFIVALIGGFFLAVPVITFLQNSPQAADMPFNAFRLTDPLRVYMNFAVITALVLIIPVILYQLWAFVSPGLKENEQKATLAYIPIAFLLFLAGIAFSYFILLPFVISFMGQMADRLEINEMYGINEYFSFLFQLTIPFGLLFQLPVVVMFLTRLGVVTPAFLRKIRKYAYFALLVIAGIITPPELTSHLFVTVPMLILYEISITISAITYRKYHGTTDHNGQESAK

SEQ ID NO: 26276 - DNA, 771 bp, Haemophilus influenzae 86-028NP
  CDS (1)..(771): transl_table=11
atgagtaatgtggatgaatctcaacctttaattacgcaccttgttgaactaagaaaccgtttattacgctgtgtgatttgtgtagtgttggtttttgttgctttggtgtatttttccaatgatatttatcattttgttgctgcacctttaacggctgttatgccaaaaggcgcaacaatgattgcaaccaatattcaaactcctttctttacgccaattaaattaactgcgattgttgcaatttttatttctgtcccttatttgctttatcaaatttgggcttttattgcacctgctttatatcagcacgaaaaacggatgatttatccgttgttattttccagtacgattttattttattgcggtgttgcttttgcttactatgtcgtctttcctcttgtattcagcttctttacacaaacagccccagaaggcgttaccatcgcaacagatattagtagttatttagattttgctttagcgttatttttagcttttggcgtttgttttgaagtgccaattgcgattattctactttgctggactggtattaccactgtaaaggctctttccgaaaaacgcccttatattattgttgcagcattttttattggaatgcttttaacgcctcctgatgttttttcacaaactttgcttgccataccgatgtgcttgctgtttgagctcggtctattggtcgctcgattttatcaaccaaaagacgacgaaagtgcggttaaaaataatgatgaatcagaaaaaacacaatga

SEQ ID NO: 26277 - protein, 256 aa, Haemophilus influenzae 86-028NP
MSNVDESQPLITHLVELRNRLLRCVICVVLVFVALVYFSNDIYHFVAAPLTAVMPKGATMIATNIQTPFFTPIKLTAIVAIFISVPYLLYQIWAFIAPALYQHEKRMIYPLLFSSTILFYCGVAFAYYVVFPLVFSFFTQTAPEGVTIATDISSYLDFALALFLAFGVCFEVPIAIILLCWTGITTVKALSEKRPYIIVAAFFIGMLLTPPDVFSQTLLAIPMCLLFELGLLVARFYQPKDDESAVKNNDESEKTQ

SEQ ID NO: 26278 - DNA, 795 bp, Pseudomonas fluorescens Pf-5
  CDS (1)..(795): transl_table=11
atgagcgatatcccagagaacgaccaacacatgccgctggtgtcgcacctcaccgagctgcgcacccgcctgctgcgctgcgtagcggcgatcttcatcatcttcgccgggctgttcgccttcacccagcagatctacaccatcgtctccacaccgctgcgccagtacctgccggtcggcgcgacgatgatcgccaccgacgtcgcctcgccgttcctgacgccgctgaagctgaccatgatggtctcgctgttcctggcaatcccggtgatcctgcaccagatctggggctttatcgcccccggcctgtacaagcatgaaaagcgcattgccgtgcccttgctggtgtcgagcatcctgctgttctacatcggcatggcgttcgcctacttcctggtgttcccgctgatcttcaagttcttcgccgccgccaccccggccggcgtggagatgatgaccgatatcaccagctacctcgatttcgtcatgaccctgttcttcgccttcggcgtggccttcgagatcccggtggccgtggtcctgctggtgtggataggcgtggtcaacgtggcgtacctgcgcaagatccgcccttacgtgatcatcggctgcttcgtggtgggcatgatcctcaccccgccggacattttctcccagaccctgctggccgtgcccatgtggctgctgttcgagatcggcgtgctgttcggcgggctgatcagcaaacgtggcgagcacccggacgatgaaccggccgacgaccacaacgaccagccgccagcgactcaagcgtga

SEQ ID NO: 26279 - protein, 264 aa, Pseudomonas fluorescens Pf-5
MSDIPENDQHMPLVSHLTELRTRLLRCVAAIFIIFAGLFAFTQQIYTIVSTPLRQYLPVGATMIATDVASPFLTPLKLTMMVSLFLAIPVILHQIWGFIAPGLYKHEKRIAVPLLVSSILLFYIGMAFAYFLVFPLIFKFFAAATPAGVEMMTDITSYLDFVMTLFFAFGVAFEIPVAVVLLVWIGVVNVAYLRKIRPYVIIGCFVVGMILTPPDIFSQTLLAVPMWLLFEIGVLFGGLISKRGEHPDDEPADDHNDQPPATQA

SEQ ID NO: 26280 - DNA, 837 bp, Psychrobacter arcticus 273-4
  CDS (1)..(837): transl_table=11
atggatttatttaaacggcaaaaaatccgcctagaaaaagtaacggactccgcgattgaaggcgagacagagacgacaaaaaatgatgattcgggcgacatattaagtccgttggctgacatgcctattactgagcatctcattgagctgcgtcgacatctgattaagatatgcgttgccgtactggtgatatttttagcgttggtcggtttttcacgcgaattgtatgattttttatccaacccattggttgcccagttgcccgccaactcaacgatgattgccacagatatcacctcaaactttatggcaccgatacgcttaacgatattcgtcgccgcattttttgcaatgccttatatcttgtatcaaatatggtcttttgtggcaccaggcttatataaaaaagagaagaaagtcgctattccagtgctgctatcctctatatttttattttattctggggtggcttttgcctattttattgtactcaaaggggtactgaaattctttatcatgttcgcgccgcagaatgtcttgccgatgacagatatcgacagttatctgagttttgcgcttaagctgtttatggtatttgggctgacatttgagattccagtcgtcactttgctgttgatattggtcggcatcgtctccattcagagcttacaagataaacgccgttatattattgtcggctgttttgcagtcgccgcagttgtcacaccgcccgatggggtatcgatgttgatgcttgccattccgatgtggttattgtttgagctggggttgtttttggcaaaaatattaattaaagaagatcgtaaccttgcttaa

SEQ ID NO: 26281 - protein, 278 aa, Psychrobacter arcticus 273-4
MDLFKRQKIRLEKVTDSAIEGETETTKNDDSGDILSPLADMPITEHLIELRRHLIKICVAVLVIFLALVGFSRELYDFLSNPLVAQLPANSTMIATDITSNFMAPIRLTIFVAAFFAMPYILYQIWSFVAPGLYKKEKKVAIPVLLSSIFLFYSGVAFAYFIVLKGVLKFFIMFAPQNVLPMTDIDSYLSFALKLFMVFGLTFEIPVVTLLLILVGIVSIQSLQDKRRYIIVGCFAVAAVVTPPDGVSMLMLAIPMWLLFELGLFLAKILIKEDRNLA

SEQ ID NO: 26282 - DNA, 768 bp, Colwellia psychrerythraea 34H; identical to SEQ ID NO: 12810
  CDS (1)..(768): transl_table=11

SEQ ID NO: 26283 - protein, 255 aa, Colwellia psychrerythraea 34H; identical to SEQ ID NO: 12811

SEQ ID NO: 26284 - DNA, 759 bp, Colwellia psychrerythraea 34H
  CDS (1)..(759): transl_table=11
atgagttcttcaactaaccaacacctattattcgaccatttaattgaattaagatctaggttacttaaagctgtcttgtctgttttagtatttttttgttcgatgatctactttgctaatgatatttatgcgtatgtttccttgcctttattggccgttatgcctgagagcgggcaaatgattgcaacaggtgttgcttcatcattttttgctccttttaaattgactatcgttttagctatcttcatcagtatgccttacatattatttcaaatatggtcgtttatcgcaccgggcttatatcgcaatgaaaaaaaattaatgggccccttaatgcttgggagtagctttcttttttatggcggtatttcttttgcgtattacgtggtctttccgattgtttttgcattttttacttctgttgcacccgaaggagtaaatattgctactgacattagtagctatcttgattttgttttaaagctgttttttgcttttggcatcgtatttgaaatccctattgtgattatcttattatgttggacaggttttacgactccgaagagcttacgagaaaaaagaccctatgttgctgttggatcttttgttattgcgatgttattaacaccgccagatatcatttctcaaaccttattagcgatacctatgcttttgctatttgagtttggcgtttttatttcctcaatttattatacgaaaagtgacgatgaacacgccgaggaagaaaataatgaataa

SEQ ID NO: 26285 - protein, 252 aa, Colwellia psychrerythraea 34H
MSSSTNQHLLFDHLIELRSRLLKAVLSVLVFFCSMIYFANDIYAYVSLPLLAVMPESGQMIATGVASSFFAPFKLTIVLAIFISMPYILFQIWSFIAPGLYRNEKKLMGPLMLGSSFLFYGGISFAYYVVFPIVFAFFTSVAPEGVNIATDISSYLDFVLKLFFAFGIVFEIPIVIILLCWTGFTTPKSLREKRPYVAVGSFVIAMLLTPPDIISQTLLAIPMLLLFEFGVFISSIYYTKSDDEHAEEENNE

SEQ ID NO: 26286 - DNA, 789 bp, Ralstonia eutropha JMP134; identical to SEQ ID NO: 12814
  CDS (1)..(789): transl_table=11

SEQ ID NO: 26287 - protein, 262 aa, Ralstonia eutropha JMP134; identical to SEQ ID NO: 12815

SEQ ID NO: 26288 - DNA, 753 bp, Ehrlichia canis str. Jake
  CDS (1)..(753): transl_table=11
atgaaatctacaactggtgaaatgccgttttttaagcattttgaagaattaagatatagattatttttttgctttgcatttttttgtattatgtttggtgtatgttatttcttttctgaaagaatatataattttctgttaattcctctaatagatttggaaggtgctaattctgaattttctttaatatatactgatttaacagaagctttttttgtatatttaaaagttgctactatggctgctttattgtgttcttttcctgtttttgcatggcaattttatatgtttttagctccagggttatataaaaaggaaaagttagtattattaccatatttaatatcaacaccagtactttttgtcattggagctgcaatagtttactattatatatttcctttagcttggagattttttattgcttttgaaaatagagatgcttctatgggtgtacctatagaatttatgccatcagtaagtgagtacttagaattagtattgcaactaatgtttgcatttggagtagcgtttcaaattcctatatttttaacattaatgtctagaattggtatagtatcagctaaaagtctagcaaaaaaaagaagagttgcaattgtagttatttttatacttgctgctatacttacaccacctgatgtgttgagtcaaatcggattggcaataccaatgttatttctgtatgaggcatcaatattagcttgtaaatatattgaacggcatgataaataa

SEQ ID NO: 26289 - protein, 250 aa, Ehrlichia canis str. Jake
MKSTTGEMPFFKHFEELRYRLFFCFAFFCIMFGVCYFFSERIYNFLLIPLIDLEGANSEFSLIYTDLTEAFFVYLKVATMAALLCSFPVFAWQFYMFLAPGLYKKEKLVLLPYLISTPVLFVIGAAIVYYYIFPLAWRFFIAFENRDASMGVPIEFMPSVSEYLELVLQLMFAFGVAFQIPIFLTLMSRIGIVSAKSLAKKRRVAIVVIFILAAILTPPDVLSQIGLAIPMLFLYEASILACKYIERHDK

SEQ ID NO: 26290 - DNA, 810 bp, Thiobacillus denitrificans ATCC 25259; identical to SEQ ID NO: 12816
  CDS (1)..(810): transl_table=11

SEQ ID NO: 26291 - protein, 269 aa, Thiobacillus denitrificans ATCC 25259; identical to SEQ ID NO: 12817

SEQ ID NO: 26292 - DNA, 795 bp, Pseudomonas fluorescens PfO-1; identical to SEQ ID NO: 12820
  CDS (1)..(795): transl_table=11

SEQ ID NO: 26293 - protein, 264 aa, Pseudomonas fluorescens PfO-1; identical to SEQ ID NO: 12821

SEQ ID NO: 26294 - DNA, 789 bp, Burkholderia sp. 383; identical to SEQ ID NO: 12826
  CDS (1)..(789): transl_table=11

SEQ ID NO: 26295 - protein, 262 aa, Burkholderia sp. 383; identical to SEQ ID NO: 12827

SEQ ID NO: 26296 - DNA, 972 bp, Rhodospirillum rubrum ATCC 11170; identical to SEQ ID NO: 12832
  CDS (1)..(972): transl_table=11

SEQ ID NO: 26297 - protein, 323 aa, Rhodospirillum rubrum ATCC 11170; identical to SEQ ID NO: 12833

SEQ ID NO: 26298 - DNA, 783 bp, Burkholderia thailandensis E264; identical to SEQ ID NO: 12836
  CDS (1)..(783): transl_table=11

SEQ ID NO: 26299 - protein, 260 aa, Burkholderia thailandensis E264; identical to SEQ ID NO: 12837

SEQ ID NO: 26300 - DNA, 834 bp, Syntrophus aciditrophicus SB; identical to SEQ ID NO: 12838
  CDS (1)..(834): transl_table=11

SEQ ID NO: 26301 - protein, 277 aa, Syntrophus aciditrophicus SB; identical to SEQ ID NO: 12839

SEQ ID NO: 26302 - DNA, 840 bp, Novosphingobium aromaticivorans DSM 12444; identical to SEQ ID NO: 12842
  CDS (1)..(840): transl_table=11

SEQ ID NO: 26303 - protein, 279 aa, Novosphingobium aromaticivorans DSM 12444; identical to SEQ ID NO: 12843

SEQ ID NO: 26304 - DNA, 792 bp, Neorickettsia sennetsu str. Miyayama
  CDS (1)..(792): transl_table=11
atggcttttgatagtcacctttctgaattaaggtacaggatgatagtatctataatcttttttcttactactttctgtttctgctactatttttccgaggagatatacaagtttttgctcaagccacttgctgaagtggcaaatcaaccggagcgtgtcgctggtttaaatagtagtttcaccctcatttatactggtttaacagaaacattcgtcgtttatcttaaggtcgctttcttgggcgcacttttggtctcttctccattcttcatatggcaggtatacatgtttattgcacctggcttatatcccggtgagaaaaaggcttttcttccttatctaatagcagcaccggtccttttcattctcggatgtgcggtagtgtactattatgtatttccacttgcttggaggttctttgtaagttttgagtacgatggcagtaaacctgggactctaccaatagagttcatgccatctgtttcagaatacctcgaccttgttgttcaattcatgtttgctttcggcatagcattccagttgcctgctatactcactttgctatctcatatgggtttgattgatcataatctcttgctgaaaaaacgtaggttgtcgattgtattaatatttattgctgcagctgttcttacgcctccagacgtgcttagtcagataggattggcaatcccaatgctatttttatatgagctttccatttttagttgtaggtatgtcagtaaaaagaagctgatacttaggaaggaaagtaaagaaaattcggatgaatag

SEQ ID NO: 26305 - protein, 263 aa, Neorickettsia sennetsu str. Miyayama
MAFDSHLSELRYRMIVSIIFFLTTFCFCYYFSEEIYKFLLKPLAEVANQPERVAGLNSSFTLIYTGLTETFVVYLKVAFLGALLVSSPFFIWQVYMFIAPGLYPGEKKAFLPYLIAAPVLFILGCAVVYYYVFPLAWRFFVSFEYDGSKPGTLPIEFMPSVSEYLDLVVQFMFAFGIAFQLPAILTLLSHMGLIDHNLLLKKRRLSIVLIFIAAAVLTPPDVLSQIGLAIPMLFLYELSIFSCRYVSKKKLILRKESKENSDE

SEQ ID NO: 26306 - DNA, 774 bp, Saccharophagus degradans 2-40
  CDS (1)..(774): transl_table=11
atgaccgctaagttagacccagatgcaagtgttgatgaaggccaaccgctaattcaacaccttatagagctgcgttcacgcttattaaagtctgttgctgctatatttttaatctttatatcgttattttatttcgccaataaaatatacgattacgtggccgcgccactggtagaactgctaccagaaggcaatatgattgccaccaatattacgtctacttttttaacgccgtttaaactcacgctgtttgtttctgtatttgtagccatgccctacgtgctttggcaaatatggaattttatagccccagccttgtaccagcgcgaaaaacgcttggccatgccgctgtttatttccagcgtaattcttttttacgcaggcgtagcctttgcgtattacgtaatattcccgcttatctttttgttttttaccactactgcgcctagctcagtaacggtaatgcccgatatcgcctcgcacctaaccttagtaattaaactgttttttgcgtttggcttagcatttgaaattccggtggcaaccgtcatgttaatagccgcgggagtaatttcaccgcaaaaactcgccaataaacgcccctacgtaatagtgggctgttttgtaattggcatgctacttacaccgccggatatcatctcgcaagcactgctcgctatacccatgtggattttattcgaaaccggcatcttttttggtcgcctagttgttcgcaaccagaaagcgacagaaagtgaagagcaagccagctaa

SEQ ID NO: 26307 - protein, 257 aa, Saccharophagus degradans 2-40
MTAKLDPDASVDEGQPLIQHLIELRSRLLKSVAAIFLIFISLFYFANKIYDYVAAPLVELLPEGNMIATNITSTFLTPFKLTLFVSVFVAMPYVLWQIWNFIAPALYQREKRLAMPLFISSVILFYAGVAFAYYVIFPLIFLFFTTTAPSSVTVMPDIASHLTLVIKLFFAFGLAFEIPVATVMLIAAGVISPQKLANKRPYVIVGCFVIGMLLTPPDIISQALLAIPMWILFETGIFFGRLVVRNQKATESEEQAS

SEQ ID NO: 26308 - DNA, 735 bp, Methylobacillus flagellatus KT; identical to SEQ ID NO: 12844
  CDS (1)..(735): transl_table=11

SEQ ID NO: 26309 - protein, 244 aa, Methylobacillus flagellatus KT; identical to SEQ ID NO: 12845

SEQ ID NO: 26310 - DNA, 816 bp, Acidobacteria bacterium Ellin345; identical to SEQ ID NO: 12848
  CDS (1)..(816): transl_table=11

SEQ ID NO: 26311 - protein, 271 aa, Acidobacteria bacterium Ellin345; identical to SEQ ID NO: 12849

SEQ ID NO: 26312 - DNA, 735 bp, Mesostigma viride
  CDS (1)..(735)
atgaaaaacaaagcgcaaaaccgatggaaaacacatcttttagaacttaaatttcgtactttttattcaggattctcttttattttagcttttttattcgcttggaaagaatcagatttatttctgtttcttttaacaacaatatccgcgccctcttattttgaacctacatttttgtttacccatatgtctgaagctttttcagcacatttacatacttcttttttatgggcttggattctttctgtacccatttttatttatcaagggtgggcgtttcttataccaagtttttattttaaagaacgtgtaatttttaataaaatttttctttttctttttttaggtgtagaatttgcgtatattctaactttttactttttacttccttggctctgggatttttttttaagttttgaaagtgaaaaagaacttcttcaaatatattgtcaacctaaaattatggaatatgtaaaaaatacaagtcaaattttattttttgcaggctggtttggtacaattccagcattgatcaaattgcaaatacattggaaattattagacatttattatttaaaatattttcgtcgttttgcatttattcttttttctttactggcagctgccatagtacccccagattattttttacaattttttcttattttttttttccaatttaattatgaaataattctttttctttccttaaaagaaatttataataaaagctaa

SEQ ID NO: 26313 - protein, 244 aa, Mesostigma viride
MKNKAQNRWKTHLLELKFRTFYSGFSFILAFLFAWKESDLFLFLLTTISAPSYFEPTFLFTHMSEAFSAHLHTSFLWAWILSVPIFIYQGWAFLIPSFYFKERVIFNKIFLFLFLGVEFAYILTFYFLLPWLWDFFLSFESEKELLQIYCQPKIMEYVKNTSQILFFAGWFGTIPALIKLQIHWKLLDIYYLKYFRRFAFILFSLLAAAIVPPDYFLQFFLIFFFQFNYEIILFLSLKEIYNKS

SEQ ID NO: 26314 - DNA, 867 bp, Mesorhizobium sp. BNC1; identical to SEQ ID NO: 12852
  CDS (1)..(867): transl_table=11

SEQ ID NO: 26315 - protein, 288 aa, Mesorhizobium sp. BNC1; identical to SEQ ID NO: 12853

SEQ ID NO: 26316 - DNA, 738 bp, Haemophilus somnus 129PT; identical to SEQ ID NO: 12856
  CDS (1)..(738): transl_table=11

SEQ ID NO: 26317 - protein, 245 aa, Haemophilus somnus 129PT; identical to SEQ ID NO: 12857

SEQ ID NO: 26318 - DNA, 777 bp, Synechococcus sp. CC9311
  CDS (1)..(777): transl_table=11
gtgaaacctcaacctgagcagcttccacccaatgatgtggaaatgtccctggtggatcaccttgaggagcttcgtcagcgagtgtttcgcagcctgatagcgattgtgattggcgctttggcctgccttctcgcggtgaaacccttggtgaggatcttggaggaacctgccggatcgatccgattccttcagctcgctcctggagagttcctgttcgtttccttcaaggttgccggttatgccggactcaccttggcgattccttacgtcttgtatcaaggcttggctttcgttttgccgggtctcacgcggaatgagcgtcgtcttatcgctcccgctgtggcgggctcagcagtgctgtttttcgccggaattgctttttcttggtgggcactcatccctgctgcccttggtttcctggtgagttacggggctgatgtggtggaaccgatttggtcgatcgagcgctatctcgattttgtgcttctgctgatgctctccactggactggcttttcagctgcctgttctgcagttgttgcttgggttgtttggtttggttcgttggaagcggatgctctcggcttggcgctgggtcgtgttgattgccgctttagcaggagccgtactgactccatctactgatccgatcacgatgtccttgctggccggtgcgatatcagctctgtttttcattggcgttgctctcgttgcgttcgtcgagcggttcagaccagaaactcctccagacgctcctccccctgcagctgcaggctaa

SEQ ID NO: 26319 - protein, 258 aa, Synechococcus sp. CC9311
MKPQPEQLPPNDVEMSLVDHLEELRQRVFRSLIAIVIGALACLLAVKPLVRILEEPAGSIRFLQLAPGEFLFVSFKVAGYAGLTLAIPYVLYQGLAFVLPGLTRNERRLIAPAVAGSAVLFFAGIAFSWWALIPAALGFLVSYGADVVEPIWSIERYLDFVLLLMLSTGLAFQLPVLQLLLGLFGLVRWKRMLSAWRWVVLIAALAGAVLTPSTDPITMSLLAGAISALFFIGVALVAFVERFRPETPPDAPPPAAAG

SEQ ID NO: 26320 - DNA, 750 bp, Shewanella sp. MR-4; identical to SEQ ID NO: 12860
  CDS (1)..(750): transl_table=11

SEQ ID NO: 26321 - protein, 249 aa, Shewanella sp. MR-4; identical to SEQ ID NO: 12861

SEQ ID NO: 26322 - DNA, 750 bp, Shewanella sp. MR-7
  CDS (1)..(750): transl_table=11
atgtcgcaacagcagccacttatcagccatttgcttgaacttaggtccaagctgcttaaatccattgccagtgtgttattagtgttcatttgtagcgtgtattgggcaaatgatatttaccattacatggcaatccctttaatgcagtctttgcccttaggtggcagcatgattgcgaccgatgtggccgcacctttcttcgcccctttcaaactaactttggtactgtcattttttgtggcggtaccctatgtgctctatcaaatttggtccttcgtcgcacccggtttgtataagcatgaaaaacgcttagtcatgccgctactctttagcagcacagtgctgttttacttaggaatagcctttgcgtattacattgtattccctgtggtatttggcttctttgccaacacagcccccgagggagtacaagttgcgaccgatatcagcagctatctcgattttgtgctgaagttattttttgcctttggcttatcctttgaaatcccggttgccgtagtcctgctctgctgggctggcgtcacaacccctgaagatcttaagcaaaaacgcccttatattgttgttggcgcattcgtggtcggtatgcttttaacgccacccgatgttatttctcagactatgcttgccgtaccaatgctgttattgttcgaaggcggattatttgcggctcgtttttacactaaacctgatgacgagaccgacgaagaagaatcaacgaacgactaa

SEQ ID NO: 26323 - protein, 249 aa, Shewanella sp. MR-7
MSQQQPLISHLLELRSKLLKSIASVLLVFICSVYWANDIYHYMAIPLMQSLPLGGSMIATDVAAPFFAPFKLTLVLSFFVAVPYVLYQIWSFVAPGLYKHEKRLVMPLLFSSTVLFYLGIAFAYYIVFPVVFGFFANTAPEGVQVATDISSYLDFVLKLFFAFGLSFEIPVAVVLLCWAGVTTPEDLKQKRPYIVVGAFVVGMLLTPPDVISQTMLAVPMLLLFEGGLFAARFYTKPDDETDEEESTND

SEQ ID NO: 26324 - DNA, 789 bp, Alkalilimnicola ehrlichei MLHE-1; identical to SEQ ID NO: 12862
  CDS (1)..(789): transl_table=11

SEQ ID NO: 26325 - protein, 262 aa, Alkalilimnicola ehrlichei MLHE-1; identical to SEQ ID NO: 12863

SEQ ID NO: 26326 - DNA, 828 bp, Rhizobium leguminosarum bv. viciae 3841; identical to SEQ ID NO: 12866
  CDS (1)..(828): transl_table=11

SEQ ID NO: 26327 - protein, 275 aa, Rhizobium leguminosarum bv. viciae 3841; identical to SEQ ID NO: 12867

SEQ ID NO: 26328 - DNA, 804 bp, Pseudomonas aeruginosa UCBPP-PA14
  CDS (1)..(804): transl_table=11
atgagcgccgataaacccgagcagcccgagcacgaccaggaaatgcccctggtctcgcacctgaccgaactgcgtacgcgcctgctgcgcagcgtggcggcgatcttcctgatcttcgccggcctgttctacttctcgcagaagatctacaccctggtctccgagccgttgcgccgcttccttccggaaggcaccagcatgatcgccaccgacgtcgcctcaccgttcctcgcgccgttcaagctgaccatggtggtggcgctgttcctcgccatgccggtgatcctcgcgcaggtctggggcttcatcgcgcccggcctgtacaagcacgagaagcgcgtggcgctgccgctgctggtgtccagcatcatcctgttctacgccgggatggccttcgcctacttcctggtgttcccgatgatcttccacttcttcgccagcgtgacgcccgagggcgtggcgatgatgacggacatcaacagctacctggacttcgtcctgaccctgttcttcgccttcggcgtcgccttcgagatcccggtggccacggtgctgctgatctggatcggggtggtcgacgtcgagtacctgaagaagatccgcccgtacgtgatcatcggctgcttcgtggtcggcatggtcctgaccccgccggacatcttctcccagaccatgctcgcggtgccgatgtggctgctgttcgagatcggcctgctgttcggccgcctggtacgcaagcgcggcgagcatccggacgaccaaccggccagcgacggcgaccagcctccggccacccgccagtga

SEQ ID NO: 26329 - protein, 267 aa, Pseudomonas aeruginosa UCBPP-PA14
MSADKPEQPEHDQEMPLVSHLTELRTRLLRSVAAIFLIFAGLFYFSQKIYTLVSEPLRRFLPEGTSMIATDVASPFLAPFKLTMVVALFLAMPVILAQVWGFIAPGLYKHEKRVALPLLVSSIILFYAGMAFAYFLVFPMIFHFFASVTPEGVAMMTDINSYLDFVLTLFFAFGVAFEIPVATVLLIWIGVVDVEYLKKIRPYVIIGCFVVGMVLTPPDIFSQTMLAVPMWLLFEIGLLFGRLVRKRGEHPDDQPASDGDQPPATRQ

SEQ ID NO: 26330 - DNA, 861 bp, Solibacter usitatus Ellin6076; identical to SEQ ID NO: 12868
  CDS (1)..(861): transl_table=11

SEQ ID NO: 26331 - protein, 286 aa, Solibacter usitatus Ellin6076; identical to SEQ ID NO: 12869

SEQ ID NO: 26332 - DNA, 816 bp, Magnetococcus sp. MC-1; identical to SEQ ID NO: 12870
  CDS (1)..(816): transl_table=11

SEQ ID NO: 26333 - protein, 271 aa, Magnetococcus sp. MC-1; identical to SEQ ID NO: 12871

SEQ ID NO: 26334 - DNA, 750 bp, Shewanella sp. ANA-3
  CDS (1)..(750): transl_table=11
atgtcgcaacagcagccacttatcagccatttgcttgaactcaggtccaagctgcttaaatccattgccagtgtgttaatcgtgttcatttgtagcgtgtattgggcaaatgatatttaccactacatggcaatccctttaatgcagtctttgcccttaggtggcagcatgattgcgaccgatgtcgccgcacctttcttcgcccctttcaaactgacgttagtcctgtctttttttgtggcagtaccctatgtgctctatcaaatttggtccttcgtggcgcccggtttgtataagcatgaaaaacgcttagtcatgccgctactcttcagtagcacagtgctgttttatttagggatcgcctttgcgtatttcgttgtattccctgtggtatttggcttcttcgccaacacggcccccgagggtgtgcaagtggcaaccgacatcagcagctatctcgactttgtgctaaaattgttttttgcctttggcctatcctttgaaatcccggttgccgtagtcctgctttgctgggcgggtgtcaccacgcctgaagatctcaaacaaaaacgcccttatatcattgtcggtgcattcgtggtgggcatgctgttaacgccaccggatgttatctcccagactatgcttgccgtaccaatgctgttattgttcgaaggcggattatttgcggctcgtttttacagtaaagctgatgacgagtccgacgaagaagaatcaacgaacgactaa

SEQ ID NO: 26335 - protein, 249 aa, Shewanella sp. ANA-3
MSQQQPLISHLLELRSKLLKSIASVLIVFICSVYWANDIYHYMAIPLMQSLPLGGSMIATDVAAPFFAPFKLTLVLSFFVAVPYVLYQIWSFVAPGLYKHEKRLVMPLLFSSTVLFYLGIAFAYFVVFPVVFGFFANTAPEGVQVATDISSYLDFVLKLFFAFGLSFEIPVAVVLLCWAGVTTPEDLKQKRPYIIVGAFVVGMLLTPPDVISQTMLAVPMLLLFEGGLFAARFYSKADDESDEEESTND

SEQ ID NO: 26336 - DNA, 855 bp, Nocardioides sp. JS614
  CDS (1)..(855): transl_table=11
ttgtccctcagcggcgtcttcgactacttctccggccgaccgcgccacccggtgggcgccgacggccggatggccctctcggaccacctccgtgaactccgcgcccgactgctcaagtcggtgctgttcctcgtcctgacgttcgcggtcgcgctgttcttcttcgaccgccccgacgacggcctgctcgggctcgtgctcggcccctacaacgacgcacgggggatgctcggcgagaaggtccagacccgggcgtacgtcgcgggcgcgaccggtccgctgatgctgcagctcaagctgtgcggcgtcgcggccatcgtcgcctccagcccctactggctctaccagatctgggccttcgtcgtgcccggcctgcacgaccaggagcggaagtggacccggatcttcgccgccatcgccggacccctgttcatcatcggcgtcgccaccggctactacgtgctgccgcgcggcctggaggtcctgatcggtttcacgcccgccggcctggacaacctcgtggagttcggcgactacttctcgttcctgacccggatgctgctggtcttcggcatcgcgttcgagatcccgctgttcgtggtcatgctcaacctcgccggggtggtctccggcaagacgctcggtcgctaccggccatggatcatcctcgggaccttcgtgttcgcggcggtcgcgaccccgtccacggacccgttctcgatgacgatgctcgccatcccgatgctcctgctgttcttcgtcgccgaggtcatcgcgcggaccgtggaccgggcccgccgccggggcgccggcagcaccgaccagtgggccgacgacgaggcttcgcccctgtga

SEQ ID NO: 26337 - protein, 284 aa, Nocardioides sp. JS614
MSLSGVFDYFSGRPRHPVGADGRMALSDHLRELRARLLKSVLFLVLTFAVALFFFDRPDDGLLGLVLGPYNDARGMLGEKVQTRAYVAGATGPLMLQLKLCGVAAIVASSPYWLYQIWAFVVPGLHDQERKWTRIFAAIAGPLFIIGVATGYYVLPRGLEVLIGFTPAGLDNLVEFGDYFSFLTRMLLVFGIAFEIPLFVVMLNLAGVVSGKTLGRYRPWIILGTFVFAAVATPSTDPFSMTMLAIPMLLLFFVAEVIARTVDRARRRGAGSTDQWADDEASPL

SEQ ID NO: 26338 - DNA, 789 bp, Acidovorax sp. JS42; identical to SEQ ID NO: 12876
  CDS (1)..(789): transl_table=11

SEQ ID NO: 26339 - protein, 262 aa, Acidovorax sp. JS42; identical to SEQ ID NO: 12877

SEQ ID NO: 26340 - DNA, 795 bp, Nostoc punctiforme PCC 73102; identical to SEQ ID NO: 12880
  CDS (1)..(795): transl_table=11

SEQ ID NO: 26341 - protein, 264 aa, Nostoc punctiforme PCC 73102; identical to SEQ ID NO: 12881

SEQ ID NO: 26342 - DNA, 738 bp, Haemophilus somnus 2336
  CDS (1)..(738): transl_table=11
atgagtgtcgaaaagtctcagccattaattaaccatttattagaactgcgtgatagattattacgcagtatcatttttgtagtcgtaatatttctcgccttagtttatttcgcaaatgatatttataattttgttgcctcgcctttattagatgtattgcctgccggtgcgacaatgattgcgacgaatattgcgacacctttctttactccgattaagttaaccgcagtagttgctttgtttatttcagtgccttttttgttatatcaaatttgggcgtttgttgctcctgcattgtatcaacatgagaaacgtctagtttatcctttgctgttttccagtacgttgttgttctatctcggtgtcgcttttgcttattatgtggtatttccattggtatttgcttttttgactaagaccgcaccggaaggcgttgctatcgctacggatattagtagttatctggattttgttttagccctattcttagcctttgggatatgttttgaagtgccggtagccattgttttattatgctggagcggtgtgactacgccggatgatttaagaaaaaaaagaccttacattattgttgctgcattttttattggtatgctactaacgcctcctgatgcgatttctcaaacattgttggctttgccgatgtgtttattatttgagataggtgttatttgtgcgggtttttatcagccaaaagatgaacaggaaaaatcataa

SEQ ID NO: 26343 - protein, 245 aa, Haemophilus somnus 2336
MSVEKSQPLINHLLELRDRLLRSIIFVVVIFLALVYFANDIYNFVASPLLDVLPAGATMIATNIATPFFTPIKLTAVVALFISVPFLLYQIWAFVAPALYQHEKRLVYPLLFSSTLLFYLGVAFAYYVVFPLVFAFLTKTAPEGVAIATDISSYLDFVLALFLAFGICFEVPVAIVLLCWSGVTTPDDLRKKRPYIIVAAFFIGMLLTPPDAISQTLLALPMCLLFEIGVICAGFYQPKDEQEKS

SEQ ID NO: 26344 - DNA, 747 bp, Actinobacillus pleuropneumoniae serovar 1 str. 4074
  CDS (1)..(747): transl_table=11
atgtcagttgaagaatctcaacctctgattagccatttagttgaattaagaaaccgcttgctccgtagttttatttgtgtgctggtggttttttgtgctttggtttattgggcaaatgatatttatactttgcttgccacgccgctaacagagaatttgcccgcaggggcgacgatgattgcaaccaatgttgcgacacctttttttacaccgattaaattaaccggtgttgtagcggtatttttatccgttccttttattttgtatcaaatttgggcgtttgtcgcaccggcattatataagcatgaaaaacgtttgatttatcctttattggtatcaagtacgttgctgttttatgcgggtgtagctttcgcttactatatcgtatttccgcttgtcttcggtttcttaaccagtacggcgccggaaggcgtgcaaatggcgaccgatatcagtagttatttagattttatcttaacgattttcttagcgttcggtatttgttttgaagtacctgttgcgattattttattatgttggtcgggcgttacttcggcggacgatttacgtgcgaaacgaccttatattattgtcgcggcgtttgttatcggtatgttattaacgccgccggacatattctcgcaaacgcttttagcaatcccgatgtgtttgttgtttgaagtcggattattcttctcgaagttctataaaccgagagacgagcaaccggaaacgatcgccaattaa

SEQ ID NO: 26345 - protein, 248 aa, Actinobacillus pleuropneumoniae serovar 1 str. 4074
MSVEESQPLISHLVELRNRLLRSFICVLVVFCALVYWANDIYTLLATPLTENLPAGATMIATNVATPFFTPIKLTGVVAVFLSVPFILYQIWAFVAPALYKHEKRLIYPLLVSSTLLFYAGVAFAYYIVFPLVFGFLTSTAPEGVQMATDISSYLDFILTIFLAFGICFEVPVAIILLCWSGVTSADDLRAKRPYIIVAAFVIGMLLTPPDIFSQTLLAIPMCLLFEVGLFFSKFYKPRDEQPETIAN

SEQ ID NO: 26346 - DNA, 795 bp, Xylella fastidiosa Ann-1
  CDS (1)..(795): transl_table=11
atgcccccccccaagtacaagcacccatggcaacaatggccaggaaaaatcgcagtgacctcatcggacgatttagagagcgaaagtagcctgattgagcacttgatagaactacgtgcacgcctgatacggatgttgatcggtcttggcttggtggtcagcgcgctgctgccattctcaaaagtcctttaccgttggttggcgacaccgatcatctcgcaattacccactggacagaacgtgatctccacccaacctaccggagcggtgtttgcaccactgaaattgactttctttctgggcctattcatcgccatgccctgggtgttgtaccaggtatgggcgtttatcgcaccaggtttgtatcagcgcgaaaaacgactcgcactccctttgctgatctcagccgtcgtgttgttttatatcggttgcgcattcgcctacttcctggtgttgcccgcagtcttccatttcctgaccacgttcaaaccagacgtcatccagctgaccccagacgctggcgcttacctggacttcgtactagccatcttcttcgccttcggtgccagctttgaacttccagtggccatggtgattttgaccgtactgcactgggtcaaaccaacccaactgcgtgaaagccgcagttatgcgatcgttgccatcttcatctttgcagcagtactgacaccaccggatgttgtctcgcaactcatgctcgcaataccgatgtgcctcctctacgagcttggcattgttgccgcctgggcggtcacccgcccaaaaacggtttga

SEQ ID NO: 26347 - protein, 264 aa, Xylella fastidiosa Ann-1
MPPPKYKHPWQQWPGKIAVTSSDDLESESSLIEHLIELRARLIRMLIGLGLVVSALLPFSKVLYRWLATPIISQLPTGQNVISTQPTGAVFAPLKLTFFLGLFIAMPWVLYQVWAFIAPGLYQREKRLALPLLISAVVLFYIGCAFAYFLVLPAVFHFLTTFKPDVIQLTPDAGAYLDFVLAIFFAFGASFELPVAMVILTVLHWVKPTQLRESRSYAIVAIFIFAAVLTPPDVVSQLMLAIPMCLLYELGIVAAWAVTRPKTV

SEQ ID NO: 26348 - DNA, 849 bp, Erythrobacter sp. NAP1; identical to SEQ ID NO: 12896
  CDS (1)..(849): transl_table=11

SEQ ID NO: 26349 - protein, 282 aa, Erythrobacter sp. NAP1; identical to SEQ ID NO: 12897

SEQ ID NO: 26350 - DNA, 762 bp, Photobacterium sp. SKA34; identical to SEQ ID NO: 12902
  CDS (1)..(762): transl_table=11

SEQ ID NO: 26351 - protein, 253 aa, Photobacterium sp. SKA34; identical to SEQ ID NO: 12903

SEQ ID NO: 26352 - DNA, 819 bp, Oceanospirillum sp. MED92; identical to SEQ ID NO: 12904
  CDS (1)..(819): transl_table=11

SEQ ID NO: 26353 - protein, 272 aa, Oceanospirillum sp. MED92; identical to SEQ ID NO: 12905

SEQ ID NO: 26354 - DNA, 783 bp, Oceanobacter sp. RED65
  CDS (1)..(783): transl_table=11
atggccaagcaaagcaaagaagaaaaagcgcgcatgcagcaagaacagccgcttattagtcatttaattgagctgcgcaatcgtttgcttaaatcattacttctggtgttgattgtatttgccggtctttatagcttttctaacgagctatatttgatagtttctcagccattgaaagacttattacctgaacaaagctcaatgattgcgactggggtggcctcgccttttctggtccccttcaaattatccttgtttgctgccgtttttctagcgatcccgtttattttgcatcaggcatgggcgtttattagcccaggtctttatcaaaatgaaaaacgctttgccattccattgctattaagcagtatcctgctgttttatgccggcatagccttcgcttattttatcgtattgcctatcgtgtttggcttttttacggctattgggccagaaggcgtgagttttttacccgatatcaataatatccttaatttcatcttaaaaatattttttgcctttggcatcgcgtttgaaatacctgtggccactttacttatgatcatggctggtattaccacagtagaaagcctcaaagaaaaacgcccgtacatcttcattggttgctttgtggtaggaatgctagtgacaccgccggatgtcattagtcagactgtattggccttgcctatgtatctattgtttgaggcgggtattttgttcggcaatcttgtgcaaaaacgcaaaactgattctgcggaagacgagcaaacctctttataa

SEQ ID NO: 26355 - protein, 260 aa, Oceanobacter sp. RED65
MAKQSKEEKARMQQEQPLISHLIELRNRLLKSLLLVLIVFAGLYSFSNELYLIVSQPLKDLLPEQSSMIATGVASPFLVPFKLSLFAAVFLAIPFILHQAWAFISPGLYQNEKRFAIPLLLSSILLFYAGIAFAYFIVLPIVFGFFTAIGPEGVSFLPDINNILNFILKIFFAFGIAFEIPVATLLMIMAGITTVESLKEKRPYIFIGCFVVGMLVTPPDVISQTVLALPMYLLFEAGILFGNLVQKRKTDSAEDEQTSL

SEQ ID NO: 26356 - DNA, 753 bp, Vibrio sp. Ex25
  CDS (1)..(753): transl_table=11
atgtctaccgtcgagcagacacaacctttaattagtcatttgttggagcttcgcaaccgactactgcgctcaattttggcagtgttggtggtgtttgtcggactaatttatttctctaaccacatttacgagtttgtttccgcacctttagtagagcgtctacctgaaggcgcgaccatgattgctacggatgtggcttcaccctttttcacgccactgaagttgacgttaatcgcttcggtatttattgcggtgccgtttattttgtatcaagtttgggcctttgttgctcctggcttatacaaacatgagcgtcgtttgattatgccgttgctgttttccagctcactgctgttttattgcggtgtggcatttgcgtattttgtggtgtttccactagtgtttggcttctttactgctatctcattgggtggtgtagagtttgcgaccgacatttctagctatctcgattttgtactggcgctatttatggcgtttggtatcgcattcgaggtgcctgttgcgattattttgttgtgttggactggggccaccacaccagaagatctaagacagaaacggccttatatcattgtggcggcgtttgtcgtaggtatggtgttaacgccaccagacatgatctcgcaaaccttactcgctattccgatgtgtttactgtttgaagtcggtttgttctttgcgcgtttttatacgcgtcgaggcgaagaggcagaagcggaaaccgaagaataa

SEQ ID NO: 26357 - protein, 250 aa, Vibrio sp. Ex25
MSTVEQTQPLISHLLELRNRLLRSILAVLVVFVGLIYFSNHIYEFVSAPLVERLPEGATMIATDVASPFFTPLKLTLIASVFIAVPFILYQVWAFVAPGLYKHERRLIMPLLFSSSLLFYCGVAFAYFVVFPLVFGFFTAISLGGVEFATDISSYLDFVLALFMAFGIAFEVPVAIILLCWTGATTPEDLRQKRPYIIVAAFVVGMVLTPPDMISQTLLAIPMCLLFEVGLFFARFYTRRGEEAEAETEE

SEQ ID NO: 26358 - DNA, 741 bp, Alteromonadales bacterium TW-7
  CDS (1)..(741): transl_table=11
atggttgaggaagtaaaatcggggtttgtagctcatttaatagagctgcgtgacaggcttataaaatcactgttgagtattttagttatttttattgcaatagtgtattttgcaaacgatatatacgcgtttgttgcacagccgttagtctctcatttgccaagcactgcaaccatgattgcaaccgatgtcactgcccccttctttgccccatttaagctgactttatttgttgcattatttgcgtctataccttggatattgcatcaaatttgggggttcatagcgccgggattatatcagcatgaaaagaaaatgctgatgcctattcttgcttccagtattttactattttatggcggtatcgcattttgctattttgtagtgctacccattattttaggtttttttaccaatacggggcctgaaatgatgaccctagcgccagatataagtagttatttagggtttgtattaaagctgttttttgcgtttggcgtcgcatttgaaattccagttgctattatgcttttgtgctggagtggtgcaacgacaacaacgagcttaaaagaaaagcgcccttatattgtggtgggtgtttttgttgtggcgatgtttttaacgccgcccgatgttttatcgcagacattattagcatttccgatgttgcttttgtttgaattaggtttaattttagcgaagttttacactgctaaaccacgagaagaagttgaggaataa

SEQ ID NO: 26359 - protein, 246 aa, Alteromonadales bacterium TW-7
MVEEVKSGFVAHLIELRDRLIKSLLSILVIFIAIVYFANDIYAFVAQPLVSHLPSTATMIATDVTAPFFAPFKLTLFVALFASIPWILHQIWGFIAPGLYQHEKKMLMPILASSILLFYGGIAFCYFVVLPIILGFFTNTGPEMMTLAPDISSYLGFVLKLFFAFGVAFEIPVAIMLLCWSGATTTTSLKEKRPYIVVGVFVVAMFLTPPDVLSQTLLAFPMLLLFELGLILAKFYTAKPREEVEE

SEQ ID NO: 26360 - DNA, 753 bp, marine gamma proteobacterium HTCC2143; identical to SEQ ID NO: 12906
  CDS (1)..(753): transl_table=11

SEQ ID NO: 26361 - protein, 250 aa, marine gamma proteobacterium HTCC2143; identical to SEQ ID NO: 12907

SEQ ID NO: 26362 - DNA, 774 bp, marine gamma proteobacterium HTCC2080
  CDS (1)..(774): transl_table=11
ttgagtaaggtgcctgacgcgacggagaccgaatctcagggcgatacgatgcagccccttgtggcgcatctcgttgaactacgcgatcgtctgttaagagcagtgcttgcgattcttgtggcctttattggcctctttcctttcgctaatgagatttacacttttgtctcggaacccctgagggaattgcttccggaggggtccagcatgattgcaacagaggtcgcctccccattcctaaccccatttaagctaacgctagttgtcgcggtctttgccgctatcccttacattttatttcaggtttgggcctttgttgcaccgggcatgtaccgcaaggagaagcgcattgccttccccttgctggcatcgagtgtgctgttattttatgcaggagccgccttcgcttatttcgtggttttcccactcatatttgcttttttcaccagcgtgggccccagcgatataacggtgatgaccgatatcaatcgttatctcgattttgtgctcaagttattttttgcgtttggtatcgcctttgaaattccgatagcagccattattttaatattgacgggggccaccactcccgagaaacttgctaagaagcgtccttggattattgtaggttgcttcatagcaggcatgctgctgacaccgcccgatgttatttcccagtcactgttagcactacccatgtggctactctttgaactgggcatagtgtttggccgcctgctgcagcgacgatcctcgcaatcaggggcctcgtga

SEQ ID NO: 26363 - protein, 257 aa, marine gamma proteobacterium HTCC2080
MSKVPDATETESQGDTMQPLVAHLVELRDRLLRAVLAILVAFIGLFPFANEIYTFVSEPLRELLPEGSSMIATEVASPFLTPFKLTLVVAVFAAIPYILFQVWAFVAPGMYRKEKRIAFPLLASSVLLFYAGAAFAYFVVFPLIFAFFTSVGPSDITVMTDINRYLDFVLKLFFAFGIAFEIPIAAIILILTGATTPEKLAKKRPWIIVGCFIAGMLLTPPDVISQSLLALPMWLLFELGIVFGRLLQRRSSQSGAS

SEQ ID NO: 26364 - DNA, 789 bp, Pseudomonas putida GB-1; identical to SEQ ID NO: 12908
  CDS (1)..(789): transl_table=11

SEQ ID NO: 26365 - protein, 262 aa, Pseudomonas putida GB-1; identical to SEQ ID NO: 12909

SEQ ID NO: 26366 - DNA, 762 bp, Pseudomonas putida GB-1; identical to SEQ ID NO: 12910
  CDS (1)..(762): transl_table=11

SEQ ID NO: 26367 - protein, 253 aa, Pseudomonas putida GB-1; identical to SEQ ID NO: 12911

SEQ ID NO: 26368 - DNA, 789 bp, Marinobacter sp. ELB17; identical to SEQ ID NO: 12912
  CDS (1)..(789): transl_table=11

SEQ ID NO: 26369 - protein, 262 aa, Marinobacter sp. ELB17; identical to SEQ ID NO: 12913

SEQ ID NO: 26370 - DNA, 813 bp, Erythrobacter sp. SD-21; identical to SEQ ID NO: 12914
  CDS (1)..(813): transl_table=11

SEQ ID NO: 26371 - protein, 270 aa, Erythrobacter sp. SD-21; identical to SEQ ID NO: 12915

SEQ ID NO: 26372 - DNA, 831 bp, unidentified eubacterium SCB49
  CDS (1)..(831): transl_table=11
atgaaaaaggaaacagccacaccagaagcagaaatgtcttttctagatcacctagaagaactacgctggcatttaatacggtctacactagcagttgttgttattgggatcgccgcttttattgctaagggatttatatttgatggcattcttttatggcccaaaaatgcaagttttcctacctatcagtttttatgtaacgctgcaaaaattataggtttagaaagtttttgttttaccgaaatgccatttgccatacaaagtagaaccatggcgggacagttttctgcccatatttggacctcaatcacagcaggtattattgtggcatttccatatataatcttcgaattttacaaatttgtgagtccaggtttgcacgaaaatgaacgcagaaacagtaaaggttttattattgcagcatccttattgttttttacaggcgtactttttggttattttatcgttactccactatcaatcaattttttaggaacttaccaggtaagtgaatctgtacttaacgagtttgaccttgacagttatataggcttagtacgtgcttctgtactcgcttgtggcattgtttttgaactcccaataatcatatatttcctaacaaaaataggattagtaacaccggaatatcttagaaaatatcgcaaattagcactcgttctagttttaatactctctgcagtaataacgccaccagacattgctagtcaagtaatagtagccgttcctgtacttattttatatgaagttagtatctatattagtcgcggtgtaatacgcagacaagaaaaagcagcaaaacaaaacgcttaa

SEQ ID NO: 26373 - protein, 276 aa, unidentified eubacterium SCB49
MKKETATPEAEMSFLDHLEELRWHLIRSTLAVVVIGIAAFIAKGFIFDGILLWPKNASFPTYQFLCNAAKIIGLESFCFTEMPFAIQSRTMAGQFSAHIWTSITAGIIVAFPYIIFEFYKFVSPGLHENERRNSKGFIIAASLLFFTGVLFGYFIVTPLSINFLGTYQVSESVLNEFDLDSYIGLVRASVLACGIVFELPIIIYFLTKIGLVTPEYLRKYRKLALVLVLILSAVITPPDIASQVIVAVPVLILYEVSIYISRGVIRRQEKAAKQNA

SEQ ID NO: 26374 - DNA, 756 bp, Moritella sp. PE36
  CDS (1)..(756): transl_table=11
atggcagcagatccaaatactcagcctttgattacgcatttaatcgaactgagagataggttattacgtgctagtgccgcaattatcttaatttttatatcattagtttattttgctaatgatatttatcagttggtttccgcgcctttgattgcgcaattaccggctggcacaaccatgattgcaacagatgtcgcgaccccgttctttacgccgataaagttaacactggttacttcttcttttattgccatcccttggattttgtaccaagtttggggttttattgcaccaggtttgtataaacatgagaaaaaattaattgcgcctttggtcattagcagtgcttttctgttttatcttggtgtcgctttttcttattttgtggtgtttcctttagcattccagttctttgcatctgcggcgccagaaggggtaacatttgcgcctgatattagtagctatcttgattttgtcttgaaaatattttttgcgtttggtctcgcatttgagatccccattgccacattagtattatgttggacgggtgcgacaacacctgacagtttacgtaaaaaacgcccttatattgtggttgctgcatttatcatggggatgttattaacaccgcctgatattatttcacaaacattattagcgatacctatgttgctattgtttgagttaggtttattattttctcgtttttacgttaaacaggacgagaccaaagatgaagaaacaggaactgattga

SEQ ID NO: 26375 - protein, 251 aa, Moritella sp. PE36
MAADPNTQPLITHLIELRDRLLRASAAIILIFISLVYFANDIYQLVSAPLIAQLPAGTTMIATDVATPFFTPIKLTLVTSSFIAIPWILYQVWGFIAPGLYKHEKKLIAPLVISSAFLFYLGVAFSYFVVFPLAFQFFASAAPEGVTFAPDISSYLDFVLKIFFAFGLAFEIPIATLVLCWTGATTPDSLRKKRPYIVVAAFIMGMLLTPPDIISQTLLAIPMLLLFELGLLFSRFYVKQDETKDEETGTD

SEQ ID NO: 26376 - DNA, 756 bp, Xanthomonas oryzae pv; identical to SEQ ID NO: 12916
  CDS (1)..(756): transl_table=11

SEQ ID NO: 26377 - protein, 251 aa, Xanthomonas oryzae pv; identical to SEQ ID NO: 12917

SEQ ID NO: 26378 - DNA, 1299 bp, Oryza sativa subsp
  CDS (1)..(1299)
atggggagcgcgggggcgctgctctcgcactcgcctccggggctcggcggattccctcctcgccaccatcaccaccaccgtctctccgtcctccgttgcgtaccgctcctcccctccccggcgcccgagcccctcagctgtcgtcacggccggcaccttcgctgcgccgccgtcgacgggggagccggccgggagacggagcgtccctcgccgcccgcacctcagagggaggagtcgccgtcgggcagcctcggcgcagccctcgaggacccatctcctcaacctggtgtgccccttatccttctccctttatgttgccgatggtcagtcataagacgtgaaggctatctacaactggatttagtgaaccatattttgaatagcaatgctatatcagaagggccatttagtatgagaaaagctagatttttaggctctgcttcagcctttagtgttaaacaaactgagtggccatgtgctgcaactgactcaaagaaatgttacctccaaaatggatcttttggaggtatcacagaggatgaagaacagagtagcctgtacaattttctttatccgagcaaagagctacttcctgatgataaggagatgagtatatttgatcatctagaggaacttcgtgacaggatatttgtctcagtattggctgttggtgctgcgatacttggttgtttcgcttactccaaagatcttattagaattctagaagcaccagttagtgttcagggtgttcggtttctgcagctctctcctggagaatttttctttacaacattgaaggtctctggttattgtggccttctacttgggagtcctgttattctgtatgagataatagcatttgttcttccgggtttaacaagggatgaacgtaaattcctagggcccattgttctgggctcttctgtactattctaccttggcattttcttctcctacacggttcttgctcctgcagcattgaatttcttcgtgaactacgcagacggggcagtggaatcgttatggtcgattgatcagtattttgagtttgtgcttgtgcttttattcagcacaggattatcttttcaggtccctgttatccagctactgctggggcaagtcggtttggtttctagtgaccaaatgctttccatctggagatatgttgttgttggcgctgtagttgctgctgctgtgcttacaccgtcgacagatccgttgactcagatgctcttggctggtccgctgcttggcctgtacttgggtggtgcttggatggtcaagctaactggtcgataa

SEQ ID NO: 26379 - protein, 432 aa, Oryza sativa subsp
MGSAGALLSHSPPGLGGFPPRHHHHHRLSVLRCVPLLPSPAPEPLSCRHGRHLRCAAVDGGAGRETERPSPPAPQREESPSGSLGAALEDPSPQPGVPLILLPLCCRWSVIRREGYLQLDLVNHILNSNAISEGPFSMRKARFLGSASAFSVKQTEWPCAATDSKKCYLQNGSFGGITEDEEQSSLYNFLYPSKELLPDDKEMSIFDHLEELRDRIFVSVLAVGAAILGCFAYSKDLIRILEAPVSVQGVRFLQLSPGEFFFTTLKVSGYCGLLLGSPVILYEIIAFVLPGLTRDERKFLGPIVLGSSVLFYLGIFFSYTVLAPAALNFFVNYADGAVESLWSIDQYFEFVLVLLFSTGLSFQVPVIQLLLGQVGLVSSDQMLSIWRYVVVGAVVAAAVLTPSTDPLTQMLLAGPLLGLYLGGAWMVKLTGR

SEQ ID NO: 26380 - DNA, 1308 bp, Oryza sativa subsp
  CDS (1)..(1308)
atggggagcgcgggggcgctgctctcgcactcgcctccggggctcggcggattccctcctcgccaccatcaccaccaccgtctctccgtcctccgttgcgtaccgctcctcccctccccggcgcccgagcccctcagctgtcgccacggccggcaccttcgctgcgccgccgtcgacgggggagccggccgggagacggagcgtccctcgccgcccgcacctcagagggaggagtcgccgtcgggcagcctcggcgcagccctcgaggacccatctcctcaacctggtgtgccccttatccttctccctttatgttgccgatgttatgctaaggaaatctgctctgaatatgtagttcgtacaacggatttagtgaaccatattttgaatagcaatgctatatcagaagggccatttagtatgagaaaagctagatttttaggctctgcttcagcctttagtgttaaacaaactgagtggccatgtgctacaactgactcaaagaaatgttacctccaaaatggatcttttggaggtatcacagaggatgaagaacagagtagcctgtacaattttctttatccgagcaaagagctacttcctgatgataaggagatgagtatatttgatcatctagaggaacttcgtgacaggatatttgtctcagtattggctgttggtgctgcgatacttggttgtttcgcttactccaaagatcttattagaattctagaagcaccagttagtgttcagggtgttcggtttctgcagctctctcctggagaatttttctttacaacattgaaggtctctggttattgtggccttctacttgggagtcctgttattctgtatgagataatagcatttgttcttccgggtttaacaagggatgaacgtaaattcctagggcccattgttctgggctcttctgtactattctaccttggcattttcttctcctacacggttcttgctcctgcagcattgaatttcttcgtgaactacgcagatggggcagtggaatcgttatggtcgattgatcagtattttgagtttgtgcttgtgcttttattcagcacaggattatcttttcaggtccctgttatccagctactgctggggcaagtcggtttggtttctagtgaccaaatgctttccatctggagatatgttgttgttggcgctgtagttgctgctgctgtgcttacaccgtcgacagatccgttgactcagatgctcttggctggtccgctgcttggcctgtacttgggtggtgcttggatggtcaagctaactggtcgataa

SEQ ID NO: 26381 - protein, 435 aa, Oryza sativa subsp
MGSAGALLSHSPPGLGGFPPRHHHHHRLSVLRCVPLLPSPAPEPLSCRHGRHLRCAAVDGGAGRETERPSPPAPQREESPSGSLGAALEDPSPQPGVPLILLPLCCRCYAKEICSEYVVRTTDLVNHILNSNAISEGPFSMRKARFLGSASAFSVKQTEWPCATTDSKKCYLQNGSFGGITEDEEQSSLYNFLYPSKELLPDDKEMSIFDHLEELRDRIFVSVLAVGAAILGCFAYSKDLIRILEAPVSVQGVRFLQLSPGEFFFTTLKVSGYCGLLLGSPVILYEIIAFVLPGLTRDERKFLGPIVLGSSVLFYLGIFFSYTVLAPAALNFFVNYADGAVESLWSIDQYFEFVLVLLFSTGLSFQVPVIQLLLGQVGLVSSDQMLSIWRYVVVGAVVAAAVLTPSTDPLTQMLLAGPLLGLYLGGAWMVKLTGR

SEQ ID NO: 26382 - DNA, 819 bp, Magnetospirillum gryphiswaldense
  CDS (1)..(819): transl_table=11
atgagcgacgacaagaccatgcccttgctcgaccatctggtcgagttgcgccgccgcctgttgtggtcagtgctggccttcgtcgtcgtcttcgccggctgtttctatttcgccgccgacatctacaccatcctgatggacccctatgccaaggtggccctggataagggcggcatgcgccggctgatctatacggcgccgaccgaggccttcttcacctatgtcaaagtgtcggccttcgccgccggcgtcctttgctttccggtgtgggccggccagttgtgggcgttcgtcgcccctggtctctacaagaatgaacgtcaggccttcatgccgttcctgttcgccaccccggtgttgttcagcttgggtgccgccctggtgtacttcctggttctgcccatgctgtacacctatctgctgggcttcgaaaatctggtgccgcatcagggtgaattgcccattcagttggaagccaaggtcagcgaatcgctgtccctgatcatgaccctgatcttcgcctttggcctcgccttccagatgccggtgctgctgaccttgttggcccgcgtcggtctggtcaccgccaaggggctgaaggaaaagcgccgctacgccatcgtcggcgtcttcgtcttcgccgccgtggtcaccccgcccgatgtggtcagccagttgtccctggccgtgcccatggtgattttgtacgaattgtcgatcatttccgcccgtatggcggaaaagaagcgcggcgaaccctcggaagaggatgaggccgacgaagacgaccccgtggacgaaaccgatttcaacggttga

SEQ ID NO: 26383 - protein, 272 aa, Magnetospirillum gryphiswaldense
MSDDKTMPLLDHLVELRRRLLWSVLAFVVVFAGCFYFAADIYTILMDPYAKVALDKGGMRRLIYTAPTEAFFTYVKVSAFAAGVLCFPVWAGQLWAFVAPGLYKNERQAFMPFLFATPVLFSLGAALVYFLVLPMLYTYLLGFENLVPHQGELPIQLEAKVSESLSLIMTLIFAFGLAFQMPVLLTLLARVGLVTAKGLKEKRRYAIVGVFVFAAVVTPPDVVSQLSLAVPMVILYELSIISARMAEKKRGEPSEEDEADEDDPVDETDFNG

SEQ ID NO: 26384 - DNA, 1059 bp, Vitis vinifera; identical to SEQ ID NO: 12918
  CDS (1)..(1059)
  misc_feature (19)..(19): y is t or c
  misc_feature (235)..(235): r is g or a
  misc_feature (957)..(957): k is g or t

SEQ ID NO: 26385 - protein, 352 aa, Vitis vinifera; identical to SEQ ID NO: 12919
  misc_feature (7)..(7): The Xaa at location 7 stands for Leu, or Phe.
  misc_feature (79)..(79): The Xaa at location 79 stands for Ile, or Val.

SEQ ID NO: 26386 - DNA, 771 bp, Enterobacter cloacae
  CDS (1)..(771): transl_table=11
atggcagtagatgatactcaaccgctcattacgcacctcatagagctgcgtaagcgcctgttaaactgcattattgcggttttcgttattttcttatgcctggtttatttcgccaacgacatctaccaggttgtctccgcgccgctgataaagcagatgccgctgggcgcaacgatgatcgcgacggacgttgcttcgccgttctttacgcccattaagctcacgttctgggtatcgttgatcgcttctgcacccatcctgctgtatcagatctgggcgtttgtggcgccagcgctgtataagcatgaacgcaaactggtgatcccgctgctggtttccagctcgctgctgttctatatcggcatggcgtttgcctattttgttgtcttcccgctggcctttggcttcctgacgcataccgcgccggaaggggtacaggtgtcgaccgatattgccagctacctcagctttgtgatggcgctgtttatggcattcggcgtggcgttcgaagtgccggtagcgattgtgctgctttgctgggtgggtgtaaccacaccagaagacctgcgtaaaaagcgtccgtatattctggtcggcgcatttgtggtcggcatgctgctgacgccgcccgatgtcttctcgcaaacgctgctggccataccgatgtactgtctgtttgaggtaggcgtcttcttctcacgtttctatgtggggaaagggcgtcggtcagaggacgaagacgacgtctctgaaaagagcactgaagagtaa

SEQ ID NO: 26387 - protein, 256 aa, Enterobacter cloacae
MAVDDTQPLITHLIELRKRLLNCIIAVFVIFLCLVYFANDIYQVVSAPLIKQMPLGATMIATDVASPFFTPIKLTFWVSLIASAPILLYQIWAFVAPALYKHERKLVIPLLVSSSLLFYIGMAFAYFVVFPLAFGFLTHTAPEGVQVSTDIASYLSFVMALFMAFGVAFEVPVAIVLLCWVGVTTPEDLRKKRPYILVGAFVVGMLLTPPDVFSQTLLAIPMYCLFEVGVFFSRFYVGKGRRSEDEDDVSEKSTEE

SEQ ID NO: 26388 - DNA, 837 bp, Ostreococcus tauri; identical to SEQ ID NO: 12920
  CDS (1)..(837)

SEQ ID NO: 26389 - protein, 278 aa, Ostreococcus tauri; identical to SEQ ID NO: 12921

SEQ ID NO: 26390 - DNA, 801 bp, Pseudomonas syringae pv
  CDS (1)..(801): transl_table=11
atgagcgctgatatcccggaaaacgatcagcaaatgccgctgatctcgcacctcaccgagttgcgtacacgtctgctgcgctgtgttgcggcagtgtttctgatttttgccggtctgttctacttcacgcagaagatctacaccctggtgtctgctccgctgcgggtctatctgcccgaaggcgcaacgatgatcgccacggacgtggcttcgccgttcatcacgccgttcaagctgaccatgatggtggcgctgttcctgtccatgccggtcatcctgcatcagatctggggctttatcgctcccggcctgtacaagcatgagaagcgcgtggccattccgctgctggtctccagcatcatcctgttctacgcgggcatggcgttcgcctattttctggtgttcccgatcattttccacttcttcgccagcgtcacccccgaaggcgtgtcgatgatgacggatatcgccagttacctggacttcgtgatgacgttgttcttcgccttcggcgtagccttcgaaatcccggtggccgttgtgttgctggtgtggatcggcgttgtcgacgtgaagtacctgaagaagatccgtccttacgtgatcattggctgctttgtggtcggcatgattctgaccccgccggacatcttctcgcagaccttgctggccgtcccgatgtggttgctgttcgaactgggcatcctgtgcagcacgatgatcaaaaaacgcggcgagcacccggacgatcaagtggaagacactgacaagccagatcagccacccgcgaccacgccgtga

SEQ ID NO: 26391 - protein, 266 aa, Pseudomonas syringae pv
MSADIPENDQQMPLISHLTELRTRLLRCVAAVFLIFAGLFYFTQKIYTLVSAPLRVYLPEGATMIATDVASPFITPFKLTMMVALFLSMPVILHQIWGFIAPGLYKHEKRVAIPLLVSSIILFYAGMAFAYFLVFPIIFHFFASVTPEGVSMMTDIASYLDFVMTLFFAFGVAFEIPVAVVLLVWIGVVDVKYLKKIRPYVIIGCFVVGMILTPPDIFSQTLLAVPMWLLFELGILCSTMIKKRGEHPDDQVEDTDKPDQPPATTP

SEQ ID NO: 26392 - DNA, 828 bp, Rhizobium leguminosarum bv; identical to SEQ ID NO: 12926
  CDS (1)..(828): transl_table=11

SEQ ID NO: 26393 - protein, 275 aa, Rhizobium leguminosarum bv; identical to SEQ ID NO: 12927

SEQ ID NO: 26394 - DNA, 1005 bp, Corynebacterium glutamicum; identical to SEQ ID NO: 12930
  CDS (1)..(1005): transl_table=11

SEQ ID NO: 26395 - protein, 334 aa, Corynebacterium glutamicum; identical to SEQ ID NO: 12931

SEQ ID NO: 26396 - DNA, 1062 bp, Pisum sativum; identical to SEQ ID NO: 12932
  CDS (1)..(1062)

SEQ ID NO: 26397 - protein, 353 aa, Pisum sativum; identical to SEQ ID NO: 12933

SEQ ID NO: 26398 - DNA, 804 bp, Pseudomonas stutzeri; identical to SEQ ID NO: 12936
  CDS (1)..(804): transl_table=11

SEQ ID NO: 26399 - protein, 267 aa, Pseudomonas stutzeri; identical to SEQ ID NO: 12937

SEQ ID NO: 26400 - DNA, 906 bp, Streptomyces lividans; identical to SEQ ID NO: 12938
  CDS (1)..(906): transl_table=11

SEQ ID NO: 26401 - protein, 301 aa, Streptomyces lividans; identical to SEQ ID NO: 12939

SEQ ID NO: 26402 - DNA, 738 bp, Bacillus subtilis; identical to SEQ ID NO: 12942
  CDS (1)..(738): transl_table=11

SEQ ID NO: 26403 - protein, 245 aa, Bacillus subtilis; identical to SEQ ID NO: 12943

SEQ ID NO: 26404 - DNA, 765 bp, Bacillus subtilis; identical to SEQ ID NO: 12944
  CDS (1)..(765): transl_table=11

SEQ ID NO: 26405 - protein, 254 aa, Bacillus subtilis; identical to SEQ ID NO: 12945

SEQ ID NO: 26406 - DNA, 768 bp, Azotobacter chroococcum mcd 1; identical to SEQ ID NO: 12946
  CDS (1)..(768): transl_table=11

SEQ ID NO: 26407 - protein, 255 aa, Azotobacter chroococcum mcd 1; identical to SEQ ID NO: 12947

SEQ ID NO: 26408 - DNA, 777 bp, Escherichia coli O157; identical to SEQ ID NO: 12950
  CDS (1)..(777): transl_table=11

SEQ ID NO: 26409 - protein, 258 aa, Escherichia coli O157; identical to SEQ ID NO: 12951

SEQ ID NO: 26410 - DNA, 777 bp, Escherichia coli O6
  CDS (1)..(777): transl_table=11
atgtctgtagaagatactcaaccgcttatcacgcatctgattgagctgcgtaagcgtctgctgaactgcattatctcggtgatcgtgatattcctgtgtctggtctatttcgccaatgacatctatcacctggtatccgcgccattgatcaagcagttgccgcaaggttcaacgatgatcgccaccgacgtggcctcgccgttctttacgccgatcaagctgacctttatggtgtcgctgattctgtcagcgccggtgattctctatcaggtgtgggcgtttatcgccccagcgctgtataagcatgaacgtcgcctggtggtgccgctgctggtttccagctctctgctgttttatatcggcatggcgttcgcctactttgtggtctttccgctggcatttggcttccttgccaataccgcgccggaaggggtacaggtatccaccgacatcgcgagctatttaagcttcgttatggcgctgtttatggcgtttggtgtctcctttgaagtgccggtggcaattgtgctgctgtgctggatggggattacctcgccagaagacttacgcaaaaaacgcccgtatgtgctggttggtgcattcgttgtcgggatgttgctgacgccgccggatgtcttctcgcaaacgctgttggcgatccctatgtactgcctgtttgaaatcggtgtcttcttctcacgcttttacgttggtaaagggcgaaaccgggaagaggaaaacgacgctgaagcagaaagcgaaaaaactgaagaataa

SEQ ID NO: 26411 - protein, 258 aa, Escherichia coli O6
MSVEDTQPLITHLIELRKRLLNCIISVIVIFLCLVYFANDIYHLVSAPLIKQLPQGSTMIATDVASPFFTPIKLTFMVSLILSAPVILYQVWAFIAPALYKHERRLVVPLLVSSSLLFYIGMAFAYFVVFPLAFGFLANTAPEGVQVSTDIASYLSFVMALFMAFGVSFEVPVAIVLLCWMGITSPEDLRKKRPYVLVGAFVVGMLLTPPDVFSQTLLAIPMYCLFEIGVFFSRFYVGKGRNREEENDAEAESEKTEE

SEQ ID NO: 26412 - DNA, 927 bp, Mycobacterium bovis; identical to SEQ ID NO: 12954
  CDS (1)..(927): transl_table=11

SEQ ID NO: 26413 - protein, 308 aa, Mycobacterium bovis [sequence omitted]

SEQ ID NO: 26414 - DNA, 723 bp, Aquifex aeolicus; identical to SEQ ID NO: 12956
  CDS (1)..(723): transl_table=11

SEQ ID NO: 26415 - protein, 240 aa, Aquifex aeolicus; identical to SEQ ID NO: 12957

SEQ ID NO: 26416 - DNA, 1080 bp, Oryza sativa; identical to SEQ ID NO: 12960
  CDS (1)..(1080)

SEQ ID NO: 26417 - protein, 359 aa, Oryza sativa; identical to SEQ ID NO: 12961

SEQ ID NO: 26418 - DNA, 1050 bp, Oryza sativa; identical to SEQ ID NO: 12962
  CDS (1)..(1050)

SEQ ID NO: 26419 - protein, 349 aa, Oryza sativa; identical to SEQ ID NO: 12963

SEQ ID NO: 26420 - DNA, 1056 bp, Zea mays; identical to SEQ ID NO: 12964
  CDS (1)..(1056)

SEQ ID NO: 26421 - protein, 351 aa, Zea mays; identical to SEQ ID NO: 12965

SEQ ID NO: 26422 - DNA, 1071 bp, Zea mays
  CDS (1)..(1071)
atgggaagcgctggggcgctgctctggcacacgccgcagcagctgcacggccgtggcgtcctcttccgccagagccggcctctcctgcgccagcgcaacctgcctctaatatcgctagctgctccggcgctcgagcccgagcgccgccgccggcagtgcctccgctgcgctgccgtcgacggggacggcgccccccgggagtctgggccactgccacagaaggagtctccgtccagcggcatcggtgccgcactcgaggacccgcctccaggacctccagtggagaatggttcctttggaggcccctcacaggaagaacagagtgctctatatacttttctttatccaagcaaagacttacttccagatgataaggagatgagtatatttgatcatctagaggagcttcgtgacaggattttcatctcagttttggctgttggggctgcgatattaggctgttttgctttttcaaaagatttggttatttttcttgaggcaccagtgactgctcagggtgttcggtttttgcagctctcgcctggggaatttttctttacaacattaaaggtttcaggttattgtggccttttacttggaagtcctatcattttgtatgagatcattgcatttgttatcccaggtttaacaagggacgagcggaaatttcttgggcctattgtgttgggttcttctgttctattctatctaggcattttcttctcctacacggttctcagccctgctgcgttgaacttctttgtgaattatgcagatggggcagtggaatcgttgtggtcaatagaccagtactttgaattcatacttgtgctgatgtttagcacagggttgtcctttcaggtccctgttatccagcttttgctgggacaacttggattggtttctagtgaccaaatgctttcgatctggagatatgttgttgttggtgctgttgttgctgctgctgtgcttacaccttcgacggacccgttgacacaaatgctcctggctggtcccttgcttggtttatacttgggtggtgcatggatggtcaagataactgggcgctaa

SEQ ID NO: 26423 - protein, 356 aa, Zea mays; identical to SEQ ID NO: 12703

SEQ ID NO: 26424 - DNA, 1056 bp, Zea mays; identical to SEQ ID NO: 12966
  CDS (1)..(1056)

SEQ ID NO: 26425 - protein, 351 aa, Zea mays; identical to SEQ ID NO: 12967

SEQ ID NO: 26426 - DNA, 1071 bp, Zea mays; identical to SEQ ID NO: 12968
  CDS (1)..(1071)

SEQ ID NO: 26427 - protein, 356 aa, Zea mays; identical to SEQ ID NO: 12969

SEQ ID NO: 26428 - DNA, 20 bp, Artificial sequence
  primer
atgacagcccgaccggaagg

SEQ ID NO: 26429 - DNA, 21 bp, Artificial sequence
  primer
tcatgcccggggcggctggtc

SEQ ID NO: 26430 - protein, 271 aa, Artificial sequence
  consensus sequence
  Variant (3)..(3): Xaa in position 3 is any amino acid
  Variant (7)..(7): Xaa in position 7 is any amino acid
  Variant (9)..(50): Xaa in position 9 to 50 is any amino acid
  Variant (51)..(78): Xaa in position 51 to 78 is any or no amino acid
  Variant (80)..(82): Xaa in position 80 to 82 is any amino acid
  Variant (83)..(83): Xaa in position 83 is any or no amino acid
  Variant (85)..(95): Xaa in position 85 to 95 is any amino acid
  Variant (97)..(100): Xaa in position 97 to 100 is any amino acid
  Variant (102)..(104): Xaa in position 102 to 104 is any amino acid
  Variant (106)..(107): Xaa in position 106 to 107 is any amino acid
  Variant (111)..(113): Xaa in position 111 to 113 is any amino acid
  Variant (115)..(119): Xaa in position 115 to 119 is any amino acid
  Variant (121)..(127): Xaa in position 121 to 127 is any amino acid
  Variant (128)..(130): Xaa in position 128 to 130 is any or no amino acid
  Variant (133)..(134): Xaa in position 133 to 134 is any amino acid
  Variant (136)..(137): Xaa in position 136 to 137 is any amino acid
  Variant (139)..(139): Xaa in position 139 is any amino acid
  Variant (141)..(144): Xaa in position 141 to 144 is any amino acid
  Variant (146)..(149): Xaa in position 146 to 149 is any amino acid
  Variant (151)..(166): Xaa in position 151 to 166 is any amino acid
  Variant (167)..(196): Xaa in position 167 to 196 is any or no amino acid
  Variant (198)..(207): Xaa in position 198 to 207 is any amino acid
  Variant (210)..(211): Xaa in position 210 to 211 is any amino acid
  Variant (213)..(214): Xaa in position 213 to 214 is any amino acid
  Variant (216)..(220): Xaa in position 216 to 220 is any amino acid
  Variant (222)..(224): Xaa in position 222 to 224 is any amino acid
  Variant (226)..(231): Xaa in position 226 to 231 is any amino acid
  Variant (233)..(235): Xaa in position 233 to 235 is any amino acid
  Variant (237)..(250): Xaa in position 237 to 250 is any amino acid
  Variant (253)..(253): Xaa in position 253 is any amino acid
  Variant (254)..(254): Xaa in position 254 is any or no amino acid
  Variant (256)..(258): Xaa in position 256 to 258 is any amino acid
  Variant (260)..(261): Xaa in position 260 to 261 is any amino acid
  Variant (264)..(264): Xaa in position 264 is any amino acid
  Variant (266)..(268): Xaa in position 266 to 268 is any amino acid
  Variant (270)..(270): Xaa in position 270 is any amino acid
HLXELRXRXXXXXXXXXXXXXXXXXXXXXXXXXXXXXXXXXXXXXXXXXXXXXXXXXXXXXXXXXXXXXXXXXXXXXXFXXXXKXXXXXXXXXXXPXXXXQXXXFXXPGLXXXEXXXXXPXXXXXXXXXXLFXXGXXFXYXXXXPXXXXFXXXXXXXXXXXXXXXXXXXXXXXXXXXXXXXXXXXXXXXXXXXXXXYXXXXXXXXXXFGXXFXXPXXXXXLXXXGXXXXXXLXXXRXXXXXXXXXXXXXXTPXXDXXXQXXLAXPXXXLXE

SEQ ID NO: 26431 - protein, 20 aa, Artificial sequence
  protein pattern
  Variant (2)..(2): Xaa in position 2 is any amino acid
  Variant (3)..(3): Xaa in position 3 is any or no amino acid
  Variant (5)..(6): Xaa in position 5 to 6 is any amino acid
  Variant (7)..(7): Xaa in position 7 is Ser or Thr
  Variant (9)..(9): Xaa in position 9 is any amino acid
  Variant (10)..(10): Xaa in position 10 is any or no amino acid
  Variant (12)..(12): Xaa in position 12 is any or no amino acid
  Variant (14)..(14): Xaa in position 14 is any amino acid
  Variant (16)..(18): Xaa in position 16 to 18 is any amino acid
  Variant (19)..(19): Xaa in position 19 is Leu or Met
  Variant (20)..(20): Xaa in position 20 is Phe or Tyr
PXXDXXXQXXLXAXPXXXXX

SEQ ID NO: 26432 - protein, 25 aa, Artificial sequence
  protein pattern
  Variant (2)..(2): Xaa in position 2 is Ile, Leu or Val
  Variant (3)..(3): Xaa in position 3 is Ala, Cys, Ser, Thr or Val
  Variant (5)..(5): Xaa in position 5 is Glu or Gln
  Variant (6)..(6): Xaa in position 6 is Ile, Leu, Met or Val
  Variant (8)..(11): Xaa in position 8 to 11 is any amino acid
  Variant (12)..(12): Xaa in position 12 is any or no amino acid
  Variant (14)..(16): Xaa in position 14 to 16 is any amino acid
  Variant (17)..(17): Xaa in position 17 is any or no amino acid
  Variant (19)..(20): Xaa in position 19 to 20 is any amino acid
  Variant (21)..(21): Xaa in position 21 is Asp, Glu, Asn, Pro, Gln, Ser or Thr
  Variant (22)..(24): Xaa in position 22 to 24 is any amino acid
  Variant (25)..(25): Xaa in position 25 is Ile, Leu or Met
GXXFXXPXXXXXLXXXXGXXXXXXX

SEQ ID NO: 26433 - protein, 16 aa, Artificial sequence
  protein pattern
  Variant (3)..(3): Xaa in position 3 is any amino acid
  Variant (7)..(7): Xaa in position 7 is any amino acid
  Variant (9)..(9): Xaa in position 9 is Ile or Leu
  Variant (10)..(15): Xaa in position 10 to 15 is any amino acid
  Variant (16)..(16): Xaa in position 16 is Phe, Ile, Leu or Val
HLXELRXRXXXXXXXX

SEQ ID NO: 26434 - DNA, 1524 bp, Azotobacter vinelandii
  CDS (1)..(1524): transl_table=11
atgctcgaagaatcgattcgtccagcctgcacggcaggcactggcgcacaaaccctcgcccagcgggaaaggatcggcctgcagcgacggaccaagatcgtcgccaccctcggcccggccaccgaaacccccgaggccatcgaaggcctggtcaaggccggggtcgatgtggtgcgcctgaacttctcccacggcaaggccgaggaacaccaggcccgcgccaccctggtccgcgagatggccgccaaacacgggcgcttcgtcgctatcctcgccgacctgcagggacccaagatccgcatctcgcgcttcgccgacggcaaggtgctgctggagaagggccaaaccttcgtcctcgacgcggcgctggacaagaacgccggcgacgcgacccgcgtcggcatcgactacgaggcgctgatcaccgacagccgccccggcgacatcctgctgctcgacgacggccgcgtggtgctcgagacccgcgaggtcaaggccagcgaactggtctgcgcggtgctggtcggcggcccgctgtccaacaacaagggcatcaaccgccagggcggtggcctgtccgcctcggcgctgaccgacaaggactgcgcggacatccagaccgccgccgccatgcaggtcgactacctggcagtgtccttcccgcgcgatgccgccgacatgcagcacgcccgccgcttgatgcaggaggccggcggcaacgccgggctggtggcgaagatcgagcgcgccgaggcggtggccgacgaccaggtgctcgacggcatcatcctcgcctccgaggcggtgatggtggcgcgcggcgacctgggcgtggagatcggcgacgccgaactggtcggcgtgcagaagcgcatcatcgagcgggcgcgggtgctcaaccgcgcggtgatcaccgccacgcagatgatggagaccatgatcacccagtcgctgccgacccgcgccgaggtgttcgacgtggccaatgcggtgctcgacggcaccgacgcggtgatgctctcggccgagaccgccgccggcgcctacccggtggagaccgtggaggccatggggcggatcatcctcggcgccgagcagcacccgctggcgcaccgctcgaagcaccgcctggaccaggtgttccactgcatcgacgagaccatcgcgctgtcggcgatgtacgcggccaaccacctggaaggggtcaaggcgatcgtctgcctgaccgagagcggcgacaccccgcggctgatgtcgcggatccgctcgcacctgccgatctacgccttctcccggcatccgcgcacgcagagccgggtggcgctgttccgcggggtgcacccgatccccttcgaggccgatcggatcgccgaggccgagctgaacgcccgggcggtcaaggagctgctgcagcgccgcctggtggccgagggcgaccgggtgctgatcaccaagggcgccggccatgcccagggcggcaccgacaccctgcgcatcgtgcgcgtgggcgacgtcatccattga

SEQ ID NO: 26435 - protein, 507 aa, Azotobacter vinelandii
MLEESIRPACTAGTGAQTLAQRERIGLQRRTKIVATLGPATETPEAIEGLVKAGVDVVRLNFSHGKAEEHQARATLVREMAAKHGRFVAILADLQGPKIRISRFADGKVLLEKGQTFVLDAALDKNAGDATRVGIDYEALITDSRPGDILLLDDGRVVLETREVKASELVCAVLVGGPLSNNKGINRQGGGLSASALTDKDCADIQTAAAMQVDYLAVSFPRDAADMQHARRLMQEAGGNAGLVAKIERAEAVADDQVLDGIILASEAVMVARGDLGVEIGDAELVGVQKRIIERARVLNRAVITATQMMETMITQSLPTRAEVFDVANAVLDGTDAVMLSAETAAGAYPVETVEAMGRIILGAEQHPLAHRSKHRLDQVFHCIDETIALSAMYAANHLEGVKAIVCLTESGDTPRLMSRIRSHLPIYAFSRHPRTQSRVALFRGVHPIPFEADRIAEAELNARAVKELLQRRLVAEGDRVLITKGAGHAQGGTDTLRIVRVGDVIH

SEQ ID NO: 26436 - DNA, 1872 bp, Oryza sativa
  CDS (1)..(1872)
atggcgcaggtggtggctgcggcagggacggcggcggcggtggcggcggtggggaggccgctgggtggcggcggatctggggccgacgcgctccgcccggcggcgaggctgtcgttcgcgccgcgctggtgcggtgggagcgcgggggcagcaagggcgcgccgcgagtccgccgtcacgtccgtgattagccgcgccccgcgtctcgacgccgaggtgctgccggtgtcggccgacgacgacgcggacgaagaagaaaacttccagcatctcaaggccattcagcaacttgcaacatcagccaatggtgtgtggtctaaaccaaatgtgagacgcaagacaaagatcgtgtgcaccattggtccttcaactaacacaaaggagatgatatggaaacttgctgaggctggcatgaatgtggctcggcttaatatgtcacatggagaccatgcatcacaccagaaagttattgacttagtaaaggaatataatgctcaaacaaaggataacgtgattgctattatgcttgacacgaagggaccagaagttaggagtggagatttgcctcaaccaataatgttggaaactggccaggagttcactttcacaattaagagaggagttgggactgagacatgtgttagcgttaactatgatgactttgttaatgatgtagaagtgggtgacatgctcctcgtagatggtggaatgatgtcgttgttggtcaagtccaaaactgaagattcggtaaaatgtgaagttattgatggaggtgaactgaaatccaggcgtcacctgaatgttcgtggaaagagcgcaaccttgccatcaataactgacaaggattgggatgatattaagtttggtgtggagaatcaagttgactactatgccgtttcttttgtcaaagatgctcaagttgtgcatgaattgaaggattatctcagaagctccaatgccgatatacatgtaattgtaaagattgaaagtgcagattccattccaaacctacactcaatcatcacagcatcggatggggctatggttgccagaggtgacttgggagctgaactccctattgaggaggtaccgctgctgcaggaagaaattattagaatgtgcaggagcatgggaaaagctgttattgttgccactaatatgctagaaagtatgattgttcatccaactccaacccgagcagaagtttcagacattgctatagctgttcgagaaggttctgatggcattatgctttctggggaaactgcacacggaaagtttcctttgaaagctgttaaggtcatgcatactgttgccctgagaactgaagccactatgtctggtggggaaacaccggctaaccttggtcaggtgttcaagaatcacatgagtgaaatgtttgcataccattcaacaatgatgtccaacactcttggaacatcaattgtggttttcaccaggacaggatttatggctatcctacttagtcattaccgcccttctggcaccatttttgcctttacggaccaggagagagttagacaacgattggctttgtaccaaggtgtatgtccagtccagatggaattttctgatgatgctgagaagacatttggtgacgctttgtcatacttgctgaaacatggtatggtgaaggaaggcgaggaggttgcacttgttcaaagtggcaggcaacctatctggcggtcgcagtccacccataatattcagcaaaaccttaggcctgatgataataccacgctggcattactggcatcatttaactgtgagcttagtgagttgtgtgcaagacatgagagagccattgttgtgattctatattcgttgctaaatatgttaccttgcatgtaa

SEQ ID NO: 26437 - protein, 623 aa, Oryza sativa
MAQVVAAAGTAAAVAAVGRPLGGGGSGADALRPAARLSFAPRWCGGSAGAARARRESAVTSVISRAPRLDAEVLPVSADDDADEEENFQHLKAIQQLATSANGVWSKPNVRRKTKIVCTIGPSTNTKEMIWKLAEAGMNVARLNMSHGDHASHQKVIDLVKEYNAQTKDNVIAIMLDTKGPEVRSGDLPQPIMLETGQEFTFTIKRGVGTETCVSVNYDDFVNDVEVGDMLLVDGGMMSLLVKSKTEDSVKCEVIDGGELKSRRHLNVRGKSATLPSITDKDWDDIKFGVENQVDYYAVSFVKDAQVVHELKDYLRSSNADIHVIVKIESADSIPNLHSIITASDGAMVARGDLGAELPIEEVPLLQEEIIRMCRSMGKAVIVATNMLESMIVHPTPTRAEVSDIAIAVREGSDGIMLSGETAHGKFPLKAVKVMHTVALRTEATMSGGETPANLGQVFKNHMSEMFAYHSTMMSNTLGTSIVVFTRTGFMAILLSHYRPSGTIFAFTDQERVRQRLALYQGVCPVQMEFSDDAEKTFGDALSYLLKHGMVKEGEEVALVQSGRQPIWRSQSTHNIQQNLRPDDNTTLALLASFNCELSELCARHERAIVVILYSLLNMLPCM

SEQ ID NO: 26438 - DNA, 1443 bp, Klebsiella pneumoniae subsp. pneumoniae MGH 78578
  CDS (1)..(1443): transl_table=11
atgtccagaaggcttcgcagaaccaaaatcgttactaccttaggcccggcaactgaccgcgataacaacctggaaaaggttatcgccgcgggcgcaaacgtagtacgtatgaacttctctcacggcaccccggaagatcatcagctccgtgccgacaaagtgcgtgagattgcggcaaaactgggccgtcatgtggccatcctcggcgacctccagggaccaaaaattcgcgtatcgaccttcaaagaaggcaaaattttcctcaacgtcggcgataaattcctgctcgacgcaaaccttggcaaaggcgaaggcgacaaagagaaagtcgggatcgactataaaggcctgccggcggacgtcgtgccgggcgatatcttattgctcgacgatggtcgcgtgcagctgaaagtcctcgaagttcaggggatgaaagtgttcactgaagtgaccgtcggcggcccgttgtccaacaacaaagggatcaacaagctgggcggcggcctgtctgccgaagcgctgaccgacaaagataaagctgatatcgtcaccgccgcaaaaatcggcgtcgactacctggccgtctctttcccgcgctgcggcgaagacctgaactacgcccgtcgcctggcgcgcgatgccggctgcgatgcgaaaatcgtcgccaaagttgagcgtgccgaagcggtttgcgatcaggatgcgatggacgacgtgatcctcgcctccgatgtggtaatggttgcccgtggcgacctcggcgtcgagatcggcgatcctgagctggtgggcatccagaaagcgctgatccgtcgtgcccgtcagctgaaccgttccgtcattaccgccacccagatgatggagtcgatgatcaccaacccgatgccgactcgcgcggaagtgatggacgtggccaacgccgtgctggatggtaccgatgcggtgatgctctccgcggagaccgctgccggtcagtatccttcggaaaccgtggccgcgatggcgcgcgtgtgtctgggcgcggaaaaaatccctagcctcaacgtctccaaacaccgtctggacgtccagttcgacaacgtggaagaagcgattgccatgtcggcgatgtatgccgccaaccacctgaaaggcattaccgccatcatcaccatgaccgaatcgggccgtaccgcgctgatgacttcgcgcattagctccggtctgccgattttcgccctctcccgccacgagcgcaccctgaacctgaccgccctctaccgcggggtgacgccggtgttcttcgacagccagaatgacggggtggccgccgcgcacgacgccgtcaatctgctgcgggacaaaggctatctggtctccggcgacctcgtggtcgtgacccagggtgacgtgatgagcaccatcggcagcaccaacaccacccgtatcctcaccgtcgagtaa

SEQ ID NO: 26439 - protein, 480 aa, Klebsiella pneumoniae subsp. pneumoniae MGH 78578
MSRRLRRTKIVTTLGPATDRDNNLEKVIAAGANVVRMNFSHGTPEDHQLRADKVREIAAKLGRHVAILGDLQGPKIRVSTFKEGKIFLNVGDKFLLDANLGKGEGDKEKVGIDYKGLPADVVPGDILLLDDGRVQLKVLEVQGMKVFTEVTVGGPLSNNKGINKLGGGLSAEALTDKDKADIVTAAKIGVDYLAVSFPRCGEDLNYARRLARDAGCDAKIVAKVERAEAVCDQDAMDDVILASDVVMVARGDLGVEIGDPELVGIQKALIRRARQLNRSVITATQMMESMITNPMPTRAEVMDVANAVLDGTDAVMLSAETAAGQYPSETVAAMARVCLGAEKIPSLNVSKHRLDVQFDNVEEAIAMSAMYAANHLKGITAIITMTESGRTALMTSRISSGLPIFALSRHERTLNLTALYRGVTPVFFDSQNDGVAAAHDAVNLLRDKGYLVSGDLVVVTQGDVMSTIGSTNTTRILTVE

SEQ ID NO: 26440 - DNA, 1437 bp, Mesorhizobium loti MAFF303099; identical to SEQ ID NO: 8389
  CDS (1)..(1437): transl_table=11

SEQ ID NO: 26441 - protein, 478 aa, Mesorhizobium loti MAFF303099; identical to SEQ ID NO: 8390

SEQ ID NO: 26442 - DNA, 1533 bp, Arabidopsis thaliana; identical to SEQ ID NO: 8391
  CDS (1)..(1533)

SEQ ID NO: 26443 - protein, 510 aa, Arabidopsis thaliana; identical to SEQ ID NO: 8392

SEQ ID NO: 26444 - DNA, 1494 bp, Arabidopsis thaliana; identical to SEQ ID NO: 8393
  CDS (1)..(1494)

SEQ ID NO: 26445 - protein, 497 aa, Arabidopsis thaliana; identical to SEQ ID NO: 8394

SEQ ID NO: 26446 - DNA, 1533 bp, Arabidopsis thaliana; identical to SEQ ID NO: 8395
  CDS (1)..(1533)

SEQ ID NO: 26447 - protein, 510 aa, Arabidopsis thaliana; identical to SEQ ID NO: 8396

SEQ ID NO: 26448 - DNA, 1533 bp, Arabidopsis thaliana; identical to SEQ ID NO: 8399
  CDS (1)..(1533)

SEQ ID NO: 26449 - protein, 510 aa, Arabidopsis thaliana; identical to SEQ ID NO: 8400

SEQ ID NO: 26450 - DNA, 1740 bp, Arabidopsis thaliana; identical to SEQ ID NO: 8401
  CDS (1)..(1740)

SEQ ID NO: 26451 - protein, 579 aa, Arabidopsis thaliana; identical to SEQ ID NO: 8402

SEQ ID NO: 26452 - DNA, 1497 bp, Arabidopsis thaliana; identical to SEQ ID NO: 8403
  CDS (1)..(1497)

SEQ ID NO: 26453 - protein, 498 aa, Arabidopsis thaliana; identical to SEQ ID NO: 8404

SEQ ID NO: 26454 - DNA, 1533 bp, Arabidopsis thaliana; identical to SEQ ID NO: 8405
  CDS (1)..(1533)

SEQ ID NO: 26455 - protein, 510 aa, Arabidopsis thaliana; identical to SEQ ID NO: 8406

SEQ ID NO: 26456 - DNA, 1446 bp, Vibrio cholerae O1 biovar eltor str. N16961
  CDS (1)..(1446): transl_table=11
atgagctcaactttgcgtagaacaaaaatcgtcgccaccttaggtccttccacagaaagccctgaaattctcgaagccattatccgagccggagccaatgtcgttcggatgaatttttcacacggcaccgcggaagaccataaaaaccgtgcgcagaaagttcgcgaaattgccgccaaactcggtcgccacgtcgccttattaggtgatttacaaggtccaaaaattcgtgtttctactttcaaagaaggcaaaattatccttaatgaaggggaacacttcattcttgatgcggaattagccaaaggggaaggtacgcaagaaagcgtggggattgattacaaaaagctaccgcaagatgtttgtaacgacgatattttgctgcttgatgatggccgtgtgcagttacaagttatgcgagttgaaggcaataaaatccacaccaaagtcttggtcggcggtcctctctccaacaataaagggattaacaaaaaaggcggcggtttgtcggcagatgctttgactgagaaagacaaaaatgacattcgacttgcggcagaaattcaagttgagtacctcgcggtgtctttccctcgcaatggtgaagacatgaaattcgcgcgccgccttgcccaagaatctgggctttatgcgcgtatggtcgccaaagttgaacgcgcagaaaccgtctcttgtgatgaaaacattgatgatattgttcgtgcctcggatgtcatcatggtcgcacggggtgatctcggggtggaaatcggtgaccccgaactcatcgccgtacagaaaaagctgatttcacgcgcgaaaaaactcaaccgtgtggtgattaccgcaacgcaaatgatggaatcgatgatcagtaaccctatgccaacccgcgccgaagtcatggatgtggcgaatgcggtgctcgatggcactgacgctgtgatgctgtcgggagaaacggctgcgggcaaatatccggttgaaaccgtcaaagcgatggctgaagtctgcattggtgcagaaaagatgattgagtcgaatgagcaaaactatcgcattaaaagtgtgttccgcacggaagaagaagcgattgctatgtcgactatctatgcagccaaccacttagaaggcgttaaagccatggtcacgctcaccgaatcaggacgcaccgcattaatgacctcaaggctcaattccgtattcccgatttttgcgatgtctgccaaccaagcaaccctcaatcgctgcgcgttattgcgcggggtgatccctttctacttcgataccaaacaagccagcggtctggaagcagccattgcagcattagatgccctcaaagagcgaaacctactcgaagaaggggatctcgtgatcattacccaaggcgatattatgggagtcgaaggctccaccaactgtatgcgcatcttacctgtctattag

SEQ ID NO: 26457 - protein, 481 aa, Vibrio cholerae O1 biovar eltor str. N16961
MSSTLRRTKIVATLGPSTESPEILEAIIRAGANVVRMNFSHGTAEDHKNRAQKVREIAAKLGRHVALLGDLQGPKIRVSTFKEGKIILNEGEHFILDAELAKGEGTQESVGIDYKKLPQDVCNDDILLLDDGRVQLQVMRVEGNKIHTKVLVGGPLSNNKGINKKGGGLSADALTEKDKNDIRLAAEIQVEYLAVSFPRNGEDMKFARRLAQESGLYARMVAKVERAETVSCDENIDDIVRASDVIMVARGDLGVEIGDPELIAVQKKLISRAKKLNRVVITATQMMESMISNPMPTRAEVMDVANAVLDGTDAVMLSGETAAGKYPVETVKAMAEVCIGAEKMIESNEQNYRIKSVFRTEEEAIAMSTIYAANHLEGVKAMVTLTESGRTALMTSRLNSVFPIFAMSANQATLNRCALLRGVIPFYFDTKQASGLEAAIAALDALKERNLLEEGDLVIITQGDIMGVEGSTNCMRILPVY

SEQ ID NO: 26458 - DNA, 1440 bp, Pasteurella multocida subsp. multocida str. Pm70; identical to SEQ ID NO: 8409
  CDS (1)..(1440): transl_table=11

SEQ ID NO: 26459 - protein, 479 aa, Pasteurella multocida subsp. multocida str. Pm70; identical to SEQ ID NO: 8410

SEQ ID NO: 26460 - DNA, 1473 bp, Neisseria meningitidis MC58
  CDS (1)..(1473): transl_table=11
atgaaccagacaagccgcgatctgacccgcatcagccacaacactaaaatcgtcgccacccttgggccgggcagcaacaacgtcgaactgttggaagacatgatccgcgtcggcggtctgaacgtcgtccgcttcaacttcagccacggcacgcccgaattccatcaggaaaacgccctcatcgtgcgcgaggcggcaaaacgcgccggacaggaaatcgccatcattgccgacctgcagggcccgaaaatccgcgtgggcaaaatcgccggcggcggcatcgaattgaacaaaggcgaaacgctggtactggatgccgcgctcgaaggcgaaggcacgcgcgaggcggtcggtttggactaccgcgacctgcccgacgacgttgccgcaggcgatgtcttgtggctggacgacggcctgctgaccctgaccgtggaatccgtcgaaggcagcaggattatcacaagggtggaaaacagccacgtcctgaaaagcaacaagggcatcaacaaacgcggtggcggtctgtccgcaggcgcgttgaccgaaaaagacttccgcgacctgaaaaccgcgattgccatcggttgcgactacctcgccatcagctttgtgaaatccgccgaagatttgcatatcgcgcgcgccaaagtcgaagaagaaatgaagggcagcacggccgtgcgccccggtttggtttccaaaatcgaacgcgtggaagcgattgaaaacttggacgaaatcatcctcgccggcgacggcattatggttgcgcgcggcgacttggcggtcgaagtcggacacgccgccgtccccgccctgcaaaaacggatgatccgccgcgcccgcgagttgcgccgcttcagcattacggcgacgcaaatgatggaatcgatgattaccaaccccgtaccgacccgcgcggaagtcagcgatgtggcaaacgcggtattggacggtaccgatgcggtgatgtgttccgccgaaaccgccgtcggcgcgtatccgtttgaaaccgtcagccaaatggcgattatctgcgcggctgcggaaaaagagcaggattcgctcaacggcgttgccgaacaggtcgagtatcccgaagcggtcagcaccaacctggcggttgccggcggtgcggtcagcgtggcgcgcgcggttcacgccaaagccatcgtcgccctgaccgaaagcggttcgaccgcctttgaaatcagccgccacaacatcaccctgccgattttcgcgctgaccccgagcgtttccgcccaacgccgtatggcgatgtaccggggcgtgcgcccgctgattttggcaaccagtaccgaccacgacacggcgttaaacgaagtcgaaacgatgctggtggaacacaacatcctgcattccggcgaccaatacatcattaccagcggttcgcaaatgcgcgaatccggttcgaccaacacactggaagtgctgcgcgtcaaataa

SEQ ID NO: 26461 - protein, 490 aa, Neisseria meningitidis MC58
MNQTSRDLTRISHNTKIVATLGPGSNNVELLEDMIRVGGLNVVRFNFSHGTPEFHQENALIVREAAKRAGQEIAIIADLQGPKIRVGKIAGGGIELNKGETLVLDAALEGEGTREAVGLDYRDLPDDVAAGDVLWLDDGLLTLTVESVEGSRIITRVENSHVLKSNKGINKRGGGLSAGALTEKDFRDLKTAIAIGCDYLAISFVKSAEDLHIARAKVEEEMKGSTAVRPGLVSKIERVEAIENLDEIILAGDGIMVARGDLAVEVGHAAVPALQKRMIRRARELRRFSITATQMMESMITNPVPTRAEVSDVANAVLDGTDAVMCSAETAVGAYPFETVSQMAIICAAAEKEQDSLNGVAEQVEYPEAVSTNLAVAGGAVSVARAVHAKAIVALTESGSTAFEISRHNITLPIFALTPSVSAQRRMAMYRGVRPLILATSTDHDTALNEVETMLVEHNILHSGDQYIITSGSQMRESGSTNTLEVLRVK

SEQ ID NO: 26462 - DNA, 1740 bp, Halobacterium sp. NRC-1; identical to SEQ ID NO: 8411
  CDS (1)..(1740): transl_table=11

SEQ ID NO: 26463 - protein, 579 aa, Halobacterium sp. NRC-1; identical to SEQ ID NO: 8412

SEQ ID NO: 26464 - DNA, 1443 bp, Escherichia coli O157:H7 EDL933; identical to SEQ ID NO: 15614
  CDS (1)..(1443): transl_table=11
  misc_feature (850)..(850): r is g or a

SEQ ID NO: 26465 - protein, 480 aa, Escherichia coli O157:H7 EDL933; identical to SEQ ID NO: 15615
  misc_feature (284)..(284): The Xaa at location 284 stands for Ala, or Thr.

SEQ ID NO: 26466 - DNA, 1440 bp, Agrobacterium tumefaciens str. C58; identical to SEQ ID NO: 8419
  CDS (1)..(1440): transl_table=11

SEQ ID NO: 26467 - protein, 479 aa, Agrobacterium tumefaciens str. C58; identical to SEQ ID NO: 8420

SEQ ID NO: 26468 - DNA, 1431 bp, Caulobacter crescentus CB15; identical to SEQ ID NO: 8423
  CDS (1)..(1431): transl_table=11

SEQ ID NO: 26469 - protein, 476 aa, Caulobacter crescentus CB15; identical to SEQ ID NO: 8424

SEQ ID NO: 26470 - DNA, 1443 bp, Salmonella enterica subsp. enterica serovar Typhi str. CT18; identical to SEQ ID NO: 8375
  CDS (1)..(1443): transl_table=11

SEQ ID NO: 26471 - protein, 480 aa, Salmonella enterica subsp. enterica serovar Typhi str. CT18; identical to SEQ ID NO: 8376

SEQ ID NO: 26472 - DNA, 1758 bp, Listeria monocytogenes EGD-e; identical to SEQ ID NO: 8425
  CDS (1)..(1758): transl_table=11

SEQ ID NO: 26473 - protein, 585 aa, Listeria monocytogenes EGD-e; identical to SEQ ID NO: 8426

SEQ ID NO: 26474 - DNA, 1431 bp, Nostoc sp. PCC 7120; identical to SEQ ID NO: 15630
  CDS (1)..(1431): transl_table=11

SEQ ID NO: 26475 - protein, 476 aa, Nostoc sp. PCC 7120; identical to SEQ ID NO: 15631

SEQ ID NO: 26476 - DNA, 1440 bp, Ralstonia solanacearum GMI1000
  CDS (1)..(1440): transl_table=11
atgactcgcgccaccaagatcgtcgccacactcggcccttcgtccaatacgctggagatcctgacgcgcatgatcgcggcgggggtggacgtggtgcggctgaacttctcgcacggcaccgcgcaggaccacgtggcgcgcgccgagctggtgcgcgagacggcgcgcgcggtgggccgcgaggtcggcatcatggccgacctgcagggcccgaagatccgcgtcggcaagttcgagagcggcaagatcaccctgagcccgggcgagcgcttcacgctggatgcccgctgcgagctgggcaaccaggagcgcgtcggcctggactacaaggagctgccgcgcgacgtcggccccggtgacctgctgctgctcaacgacggcctgatcgtgctgcaggtcgagcgcgtggtgggcgaggagatcgagaccgtcgtcaaggtcggcggcgatctgtccaacaacaagggcatcaaccgccagggcggcgggctgtcggcgccggcgctgacggccaaggacatggaagacatcaagaccgcgatggcgctgggcgccgactacatcgcggtcagcttccccaagaacgccaccgacatggaaatggcgcgccagctggccgccgtggccggcgcgccgcacagccacaagaccaagatgatcgccaagatcgagcgtgccgaggccatccgcccgggcgtgctggaagagatcctggcggcgtccgacggcatcatggtggcgcgcggcgacctcgcggtggaggtcggcaacgcggccgtgccggcgctgcagaagcgcatgatcaagctcgcgcgcgaggccaacaagctggccatcacggccacgcagatgatggagtcgatgatcgtcaacccggtgccgacgcgcgccgaggtgtcggacgtcgccaacgccgtgctcgacggcaccgatgcggtgatgctgtcggccgagaccgccgccggccgctacccggtcgagaccatcgaggccatggccgccatctgcgtggaggccgagaagtcgcagccggtgcacctcgacacggatttcctcgaccagaccttcagccgcatcgaccagtcgatcgccatgggggcgctgtttacggcctaccatctgcaggtcaaggcgattgccgcgctgaccgactcaggtgccaccgcgctgtggatgagccgccacggcatcaatgtgccgatctatgcgatcacgcccaacgtcgcgtcgcagcgcaagatggccctgtaccgcaacgtgcagccgctgccgctggccatcagcctggaccgcgacgaggcgctgcggcaggccgaggagctgctggtcgcgcgcggcgtggtgcagcgcggcgacttcatcgtcctgaccgtcggcgagccgatggggcaggcgggcgggaccaacacactcaagatcgtgcgcgtcggcatgcactga

SEQ ID NO: 26477 - protein, 479 aa, Ralstonia solanacearum GMI1000
MTRATKIVATLGPSSNTLEILTRMIAAGVDVVRLNFSHGTAQDHVARAELVRETARAVGREVGIMADLQGPKIRVGKFESGKITLSPGERFTLDARCELGNQERVGLDYKELPRDVGPGDLLLLNDGLIVLQVERVVGEEIETVVKVGGDLSNNKGINRQGGGLSAPALTAKDMEDIKTAMALGADYIAVSFPKNATDMEMARQLAAVAGAPHSHKTKMIAKIERAEAIRPGVLEEILAASDGIMVARGDLAVEVGNAAVPALQKRMIKLAREANKLAITATQMMESMIVNPVPTRAEVSDVANAVLDGTDAVMLSAETAAGRYPVETIEAMAAICVEAEKSQPVHLDTDFLDQTFSRIDQSIAMGALFTAYHLQVKAIAALTDSGATALWMSRHGINVPIYAITPNVASQRKMALYRNVQPLPLAISLDRDEALRQAEELLVARGVVQRGDFIVLTVGEPMGQAGGTNTLKIVRVGMH

SEQ ID NO: 26478 - DNA, 1404 bp, Clostridium perfringens str. 13; identical to SEQ ID NO: 8431
  CDS (1)..(1404): transl_table=11

SEQ ID NO: 26479 - protein, 467 aa, Clostridium perfringens str. 13; identical to SEQ ID NO: 8432

SEQ ID NO: 26480 - DNA, 1716 bp, Arabidopsis thaliana; identical to SEQ ID NO: 8433
  CDS (1)..(1716)

SEQ ID NO: 26481 - protein, 571 aa, Arabidopsis thaliana; identical to SEQ ID NO: 8434

SEQ ID NO: 26482 - DNA, 1584 bp, Arabidopsis thaliana; identical to SEQ ID NO: 8435
  CDS (1)..(1584)

SEQ ID NO: 26483 - protein, 527 aa, Arabidopsis thaliana; identical to SEQ ID NO: 8436

SEQ ID NO: 26484 - DNA, 1791 bp, Arabidopsis thaliana; identical to SEQ ID NO: 8437
  CDS (1)..(1791)

SEQ ID NO: 26485 - protein, 596 aa, Arabidopsis thaliana; identical to SEQ ID NO: 8438

SEQ ID NO: 26486 - DNA, 1434 bp, Pyrococcus furiosus DSM 3638; identical to SEQ ID NO: 8441
  CDS (1)..(1434): transl_table=11

SEQ ID NO: 26487 - protein, 477 aa, Pyrococcus furiosus DSM 3638; identical to SEQ ID NO: 8442

SEQ ID NO: 26488 - DNA, 1665 bp, Drosophila melanogaster; identical to SEQ ID NO: 15642
  CDS (1)..(1665)

SEQ ID NO: 26489 - protein, 554 aa, Drosophila melanogaster; identical to SEQ ID NO: 15643

SEQ ID NO: 26490 - DNA, 1470 bp, Methanosarcina acetivorans C2A
  CDS (1)..(1470): transl_table=11
gtgaatataaacgtgaatataaacggccgtgaaaatatgcaaatccctgaccataaaacaaagatcgtctgcaccataggccctgcttccttctccgaggaagtcctcaggaaactggtgcttgcgggaatgaacgttgcaaggattaacttttcccacggagacttcgagagccacggaaaagttatccggagggtccgaaaggttgcagaagagcttgacaggacagttgctatccttgccgacctcccaggcccgaaaattcgcgtaggcaagctcaaaaaagagccgcttatgctccataaagggaaccgaataacccttaccactgacgagacttctggaagcgaggaccgcatcccggtcaactacaaacagctccctgagagcgtctccccgggaagccttatctacctgagtgacggatttatccagctcctctgcctggaaatctcgggaaaagatgtagtctgcgaagttatggtcggaggacaactctactcccataaagggctgaacctgccaggggcaaaaatttacctggactctgtgacggaacatgacttcaaaatccttgagtttgccctgaacgaagaagttgacgcagtcagcatctcttttgtggaaaaagccgaagatatccgaaaagtccggaattttgcttcaaccatgggaaaacctgtatacgttgtctcaaaaatcgaacggagccaggcggtccagaatatagaagagatccttgaggaaaccgatgccctgatggttgccagaggagacctgggagttgagattcctatccaagaagtaccttcggtccagaaagaactcatccggagtgcaaagctcctgagcatccccgtaattactgcaacccacatgctggcctccatgaccgacaacatcaggcctacaagggcggaggctacagacgttgccaacgccatccttgacgggacggacgcggtcatgctctcggaagaaaccgcagttgggaactatcccgtggaaactgtggagatgatggcaaaaattgcaaaaacaacagaaaactggcgctcccgaacgaagtggggacttgacacaatgctcaagggaattacggcacagaaaatgtcagtggacgaggtaatcgctctccaggtacacgaagccctgcaaaagcttcctgtagccgttgtactcaccccaacccgaagcggagcaaccccgcgcaggctttcccgcttcaagcctgaaccctggatcctggctttcacccgcttcccgaaaacctgtagctcccttgccttgtcctatggggtttatccgataatagtaaaagaagtctctgaaaactgggaaacggagaccacggaaaaggcaaaggaactgggatttgcaaaaagcggagagctcgtagttttcacccagggacctgcttccggaaaaccaggaggcacaaacatgctcaagatcctgactctggactga

SEQ ID NO: 26491 - protein, 489 aa, Methanosarcina acetivorans C2A
MNINVNINGRENMQIPDHKTKIVCTIGPASFSEEVLRKLVLAGMNVARINFSHGDFESHGKVIRRVRKVAEELDRTVAILADLPGPKIRVGKLKKEPLMLHKGNRITLTTDETSGSEDRIPVNYKQLPESVSPGSLIYLSDGFIQLLCLEISGKDVVCEVMVGGQLYSHKGLNLPGAKIYLDSVTEHDFKILEFALNEEVDAVSISFVEKAEDIRKVRNFASTMGKPVYVVSKIERSQAVQNIEEILEETDALMVARGDLGVEIPIQEVPSVQKELIRSAKLLSIPVITATHMLASMTDNIRPTRAEATDVANAILDGTDAVMLSEETAVGNYPVETVEMMAKIAKTTENWRSRTKWGLDTMLKGITAQKMSVDEVIALQVHEALQKLPVAVVLTPTRSGATPRRLSRFKPEPWILAFTRFPKTCSSLALSYGVYPIIVKEVSENWETETTEKAKELGFAKSGELVVFTQGPASGKPGGTNMLKILTLD

SEQ ID NO: 26492 - DNA, 1752 bp, Thermoanaerobacter tengcongensis MB4; identical to SEQ ID NO: 8445
  CDS (1)..(1752): transl_table=11

SEQ ID NO: 26493 - protein, 583 aa, Thermoanaerobacter tengcongensis MB4; identical to SEQ ID NO: 8446

SEQ ID NO: 26494 - DNA, 1437 bp, Streptomyces coelicolor A3(2); identical to SEQ ID NO: 8447
  CDS (1)..(1437): transl_table=11

SEQ ID NO: 26495 - protein, 478 aa, Streptomyces coelicolor A3(2); identical to SEQ ID NO: 8448

SEQ ID NO: 26496 - DNA, 1431 bp, Streptomyces coelicolor A3(2); identical to SEQ ID NO: 8449
  CDS (1)..(1431): transl_table=11

SEQ ID NO: 26497 - protein, 476 aa, Streptomyces coelicolor A3(2); identical to SEQ ID NO: 8450

SEQ ID NO: 26498 - DNA, 1527 bp, Xanthomonas campestris pv. campestris str. ATCC 33913; identical to SEQ ID NO: 15652
  CDS (1)..(1527): transl_table=11

SEQ ID NO: 26499 - protein, 508 aa, Xanthomonas campestris pv. campestris str. ATCC 33913; identical to SEQ ID NO: 15653

SEQ ID NO: 26500 - DNA, 1785 bp, Thermosynechococcus elongatus BP-1; identical to SEQ ID NO: 8455
  CDS (1)..(1785): transl_table=11

SEQ ID NO: 26501 - protein, 594 aa, Thermosynechococcus elongatus BP-1; identical to SEQ ID NO: 8456

SEQ ID NO: 26502 - DNA, 1530 bp, Bifidobacterium longum NCC2705; identical to SEQ ID NO: 8459
  CDS (1)..(1530): transl_table=11

SEQ ID NO: 26503 - protein, 509 aa, Bifidobacterium longum NCC2705; identical to SEQ ID NO: 8460

SEQ ID NO: 26504 - DNA, 1443 bp, Shigella flexneri 2a str. 301; identical to SEQ ID NO: 8461
  CDS (1)..(1443): transl_table=11

SEQ ID NO: 26505 - protein, 480 aa, Shigella flexneri 2a str. 301; identical to SEQ ID NO: 8462

SEQ ID NO: 26506 - DNA, 1437 bp, Leptospira interrogans serovar Lai str. 56601; identical to SEQ ID NO: 8463
  CDS (1)..(1437): transl_table=11

SEQ ID NO: 26507 - protein, 478 aa, Leptospira interrogans serovar Lai str. 56601; identical to SEQ ID NO: 8464

SEQ ID NO: 26508 - DNA, 1440 bp, Shewanella oneidensis MR-1; identical to SEQ ID NO: 8371
  CDS (1)..(1440): transl_table=11

SEQ ID NO: 26509 - protein, 479 aa, Shewanella oneidensis MR-1; identical to SEQ ID NO: 8372

SEQ ID NO: 26510 - DNA, 1539 bp, Drosophila melanogaster; identical to SEQ ID NO: 15666
  CDS (1)..(1539)

SEQ ID NO: 26511 - protein, 512 aa, Drosophila melanogaster; identical to SEQ ID NO: 15667

SEQ ID NO: 26512 - DNA, 1503 bp, Streptococcus agalactiae NEM316; identical to SEQ ID NO: 16383
  CDS (1)..(1503): transl_table=11

SEQ ID NO: 26513 - protein, 500 aa, Streptococcus agalactiae NEM316; identical to SEQ ID NO: 16384

SEQ ID NO: 26514 - DNA, 1464 bp, Corynebacterium efficiens YS-314
  CDS (1)..(1464): transl_table=11
ttgtcgccgcctcaccctcaaagggttaggctggtcgatgtggaaagacgaactaagattgtatgcaccctcggtccggcggtcgccagcgcggatgggatcctccgactggttcaggacggcatggatgtggcccgcctgaacttctcgcacggcgatcaccccgaccatgaacagaactacaagtgggtccgtgaagccactgacaagaccggtcgcgcggtcggcatcctcgccgacctgcagggccccaagatccgtctcggacggttcaaggagggctcaaccgtatgggagaccggtgagacggtccgcatcacggtggatgatgtcgaaggcacccatgaccgtgtctccaccacctacaagaacctggccaaggatgcccgtccgggggaccgtctgctggtcgatgacggcaaggtcggcctcgtctgcgtctccgtcgagggcaacgatgtcatctgtgaggtcaccgaaggtggccccgtctccaacaacaagggtgtctccctgcccggcatggacatctccgtgccagccctatccgagaaagacatcaaggatcttcgtttcgccctgaagctcggcgttgacttcatcgccctgtccttcgtccgctccccagcggacgtcgaactcgtccatgccatcatggatgaggagggacgtcgcgtcccggtgatcgccaagctggagaagccggaggcggtcgcagcactcgagtccatcgtgctggcgttcgacgcgatcatggtcgcccgtggagacctcggcgtggaggtcccgctcgaggaggtcccgctcgtgcagaagcgggcgatccagatcgcccgggagaacgccaagccggtcatcgtggccacccagatgctcgattcgatgattgagaattcccgtccgacccgtgcggaggcctccgatgtggccaacgccgttctcgatggtgccgatgccgtcatgctctccggtgagacctccgtgggtaaggatccccacaatgtggtccgcacgatgtcccgtatcgtccgcttcgccgagaccgacggccgggttccggatctcacgcacattccgcgcaccaagcgtggcgtgatctcctattccgcccgcgacatcgccgagcgactcaatgcccgcgccctggtcgccttcaccacctcgggggacaccgccaagcgtctggcccgtctgcactcccatctgccgctgctggtcttcacccctgatccgagcgtccgctcccagctggcgctcacctggggtgcccagaccttcctgtgcccgaaggtggatgacaccgatggcatgatgcgtgaggttgaccgtgcgctgctggccatggacgagtatcagaaggatgacatgatggtggtcgtcgccggttcccctccgggggtcacgggaaacaccaacatgatccacgttcacctgctgggtgaggatacccggattcccaagtag

SEQ ID NO: 26515 - protein, 487 aa, Corynebacterium efficiens YS-314
MSPPHPQRVRLVDVERRTKIVCTLGPAVASADGILRLVQDGMDVARLNFSHGDHPDHEQNYKWVREATDKTGRAVGILADLQGPKIRLGRFKEGSTVWETGETVRITVDDVEGTHDRVSTTYKNLAKDARPGDRLLVDDGKVGLVCVSVEGNDVICEVTEGGPVSNNKGVSLPGMDISVPALSEKDIKDLRFALKLGVDFIALSFVRSPADVELVHAIMDEEGRRVPVIAKLEKPEAVAALESIVLAFDAIMVARGDLGVEVPLEEVPLVQKRAIQIARENAKPVIVATQMLDSMIENSRPTRAEASDVANAVLDGADAVMLSGETSVGKDPHNVVRTMSRIVRFAETDGRVPDLTHIPRTKRGVISYSARDIAERLNARALVAFTTSGDTAKRLARLHSHLPLLVFTPDPSVRSQLALTWGAQTFLCPKVDDTDGMMREVDRALLAMDEYQKDDMMVVVAGSPPGVTGNTNMIHVHLLGEDTRIPK

SEQ ID NO: 26516 - DNA, 1455 bp, Pseudomonas putida KT2440; identical to SEQ ID NO: 15668
  CDS (1)..(1455): transl_table=11

SEQ ID NO: 26517 - protein, 484 aa, Pseudomonas putida KT2440; identical to SEQ ID NO: 15669

SEQ ID NO: 26518 - DNA, 1416 bp, Pseudomonas putida KT2440; identical to SEQ ID NO: 15670
  CDS (1)..(1416): transl_table=11

SEQ ID NO: 26519 - protein, 471 aa, Pseudomonas putida KT2440; identical to SEQ ID NO: 15671

SEQ ID NO: 26520 - DNA, 1419 bp, Vibrio vulnificus CMCP6
  CDS (1)..(1419): transl_table=11
gtgaccactttaggtccttcaactgacaaagataatgtactagaagaaattattcgagccggcgcgaatgtggtcaggatgaatttttctcacggcagcgcagaggatcataaaactcgcgcagaaaaagtgcgcaatattgccgccagacttggcagacaagtggctattttaggtgatttacaaggcccgaagatccgagtatcaacctttaaagaagggaaaattttcctttcagtgggtgacctcttcactttagacagtgacttgcccaaaggcgaaggcgatcaaaaatcagtgggattagactataaagcactgcctcaggatgtgggaccagaagatattctgctgcttgatgatggacgtgtacaactgcaagtgctgacggtcgatggcaacaaggtgaacactcgtgtgatagtgggcggaccgctgtcaaacaataaaggtatcaataaaaaagggggcggcctctctgctgacgctctaacggaaaaagacaaacaagacatcttgctcgccgccgagatcaaagtcgattatctcgcgatctcctttccacgtaatggtgccgacatggactatgctcgtcgcttggccagagatgccggcttggaagccaaacttgttgccaaagttgaacgagcagaaaccgttcgaaacgatgaaaacatcgacgatattatcatggcttccgatgtcattatggttgctcgtggcgatctaggggtagaaatcggcgatccggaattgatcggtgtacagaaaaaactcatcaaacgagccaaagaactcaatcgtgtcgtcatcacggcaacacaaatgatggaatcgatgattgaaaatccaatgcccactcgagcagaagtcatggacgtagccaacgcggtgctggatggcaccgatgccgtgatgctttcaggggaaaccgccgctggtaaatacccagtcgaaacggtgcgctctatggcagaagtctgcattggggcagaaaaaacgtgggaaccgggcagccagaattatcgcatcgataaatcctttgtcaccgccgaagaaaccattgcaatgtcgacaatctacgccgcaaatcatatggaaggcgtcaaagcgatggtgacgttgactgaatcgggaagaaccgcattaatgacgtcaagattgaactcaacactgcccatttttgcgctttcgcctaatgagcgaacccttaatcgctgctctctctatcgtggcgtcactcccgtattttttgataccaaagtagaaactggatttgatgtcgcaatggccgcattgagcacgcttagaaagaaaaaactgctcgattttggggatttagtgatcatcacacagggggacatcatggatgttgaaggctcgactaactgcatgagaatcctgcctgtttttgactaa

SEQ ID NO: 26521 - protein, 472 aa, Vibrio vulnificus CMCP6
MTTLGPSTDKDNVLEEIIRAGANVVRMNFSHGSAEDHKTRAEKVRNIAARLGRQVAILGDLQGPKIRVSTFKEGKIFLSVGDLFTLDSDLPKGEGDQKSVGLDYKALPQDVGPEDILLLDDGRVQLQVLTVDGNKVNTRVIVGGPLSNNKGINKKGGGLSADALTEKDKQDILLAAEIKVDYLAISFPRNGADMDYARRLARDAGLEAKLVAKVERAETVRNDENIDDIIMASDVIMVARGDLGVEIGDPELIGVQKKLIKRAKELNRVVITATQMMESMIENPMPTRAEVMDVANAVLDGTDAVMLSGETAAGKYPVETVRSMAEVCIGAEKTWEPGSQNYRIDKSFVTAEETIAMSTIYAANHMEGVKAMVTLTESGRTALMTSRLNSTLPIFALSPNERTLNRCSLYRGVTPVFFDTKVETGFDVAMAALSTLRKKKLLDFGDLVIITQGDIMDVEGSTNCMRILPVFD

SEQ ID NO: 26522 - DNA, 1422 bp, Tropheryma whipplei str. Twist; identical to SEQ ID NO: 15680
  CDS (1)..(1422): transl_table=11

SEQ ID NO: 26523 - protein, 473 aa, Tropheryma whipplei str. Twist; identical to SEQ ID NO: 15681

SEQ ID NO: 26524 - DNA, 1443 bp, Vibrio parahaemolyticus RIMD 2210633; identical to SEQ ID NO: 8471
  CDS (1)..(1443): transl_table=11

SEQ ID NO: 26525 - protein, 480 aa, Vibrio parahaemolyticus RIMD 2210633; identical to SEQ ID NO: 8472

SEQ ID NO: 26526 - DNA, 1434 bp, Coxiella burnetii RSA 493; identical to SEQ ID NO: 8475
  CDS (1)..(1434): transl_table=11

SEQ ID NO: 26527 - protein, 477 aa, Coxiella burnetii RSA 493; identical to SEQ ID NO: 8476

SEQ ID NO: 26528 - DNA, 1437 bp, Streptomyces avermitilis MA-4680
  CDS (1)..(1437): transl_table=11
atgcgccgagcaaagatcgtctgtactctgggccccgccaccgactcgtacgaccagatcaaggcactggtcgaggccggaatggacgtagcccgcttcaacctcagccacggcacctacgccgagcacgaggagcgttaccagcacgtccgcaaggcctccgacgagaccgggcgcagcgtcggagtcctcggcgaccttcaaggtccgaagatccgcctcggccgcttcaacgaaggacccgtactccttgaacgcggcgacaccttcaccatcaccgtcgaggaaggcgtcgaaggcgaccgccagacctgcggcaccacctacgccggcctcgccgccgacgtcactcccggtgagcgcatcctcgtcgacgacggcaaggtctgcctcgaagtcacctccgtcgacggcccccgcgtccacaccaccgtcgtcgaaggcggcatggtctccgaccacaagggcctgaacctgcccggcgtggccgtctcggtccccgccctctccgacaaggacgaggccgacctccgctgggccctccgtcagggcttcgacgtcatcgcgctgtccttcgtacgcagcggcaaggacatcaaggacgtccaccggatcatggacgaagaaggccgccggctccccgtcatcgccaaggtggaaaagccccaggccgtcgagaacatcgacgacatcgtcgccgccttcgacggaatcatggtcgcccgcggagacctcggcgtggaaatgccgctcgaacaggtcccgatcgtccagaagcgcgccatcaaactcgccaggcgcaacgcgaagccggtcatcgtcgcgacgcagatgctggactccatgatcgacaactcccgcccgacccgcgcggaggcctcggacgtcgccaacgccgtcatcgacggcaccgacgcggtgatgctgtccggcgagacgagcgtgggcaagtaccccgtcgaaacggtccgcaccatgtcccgcatcgtggaagcggcggaagaggacatcctggccacgggcctgccgccgctgaccgaacgcaacaagccccgcacccagggcggcgcggtggcccgcgcggcggccgagatgggcgacttcctcggcgccaagttcctggtggcgttcacgcagtccggagacacggtccgccgcctctcgcgctaccgttccccgatcccgctcctggccttcaccccgatgccggcgacgcgctcccagctcaacctgacatggggcgtggagacgttcctgggcccgcacgtggattcgacggacgcgatggtggaccaggtcgacgagctgctgctcaagtacggccgctgcgagaagggcgacgtggtggtcatcacggcgggctcaccccccggcgtctcgggctcgacgaacctggtccgagtccaccacatcggcgaggacgacagccccaagtag

SEQ ID NO: 26529 - protein, 478 aa, Streptomyces avermitilis MA-4680
MRRAKIVCTLGPATDSYDQIKALVEAGMDVARFNLSHGTYAEHEERYQHVRKASDETGRSVGVLGDLQGPKIRLGRFNEGPVLLERGDTFTITVEEGVEGDRQTCGTTYAGLAADVTPGERILVDDGKVCLEVTSVDGPRVHTTVVEGGMVSDHKGLNLPGVAVSVPALSDKDEADLRWALRQGFDVIALSFVRSGKDIKDVHRIMDEEGRRLPVIAKVEKPQAVENIDDIVAAFDGIMVARGDLGVEMPLEQVPIVQKRAIKLARRNAKPVIVATQMLDSMIDNSRPTRAEASDVANAVIDGTDAVMLSGETSVGKYPVETVRTMSRIVEAAEEDILATGLPPLTERNKPRTQGGAVARAAAEMGDFLGAKFLVAFTQSGDTVRRLSRYRSPIPLLAFTPMPATRSQLNLTWGVETFLGPHVDSTDAMVDQVDELLLKYGRCEKGDVVVITAGSPPGVSGSTNLVRVHHIGEDDSPK

SEQ ID NO: 26530 - DNA, 1446 bp, Chlamydophila caviae GPIC; identical to SEQ ID NO: 15688
  CDS (1)..(1446): transl_table=11

SEQ ID NO: 26531 - protein, 481 aa, Chlamydophila caviae GPIC; identical to SEQ ID NO: 15689

SEQ ID NO: 26532 - DNA, 1491 bp, Nitrosomonas europaea ATCC 19718; identical to SEQ ID NO: 8479
  CDS (1)..(1491): transl_table=11

SEQ ID NO: 26533 - protein, 496 aa, Nitrosomonas europaea ATCC 19718; identical to SEQ ID NO: 8480

SEQ ID NO: 26534 - DNA, 1440 bp, Wigglesworthia glossinidia endosymbiont of Glossina brevipalpis; identical to SEQ ID NO: 8481
  CDS (1)..(1440): transl_table=11

SEQ ID NO: 26535 - protein, 479 aa, Wigglesworthia glossinidia endosymbiont of Glossina brevipalpis; identical to SEQ ID NO: 8482

SEQ ID NO: 26536 - DNA, 1440 bp, Haemophilus ducreyi 35000HP; identical to SEQ ID NO: 8369
  CDS (1)..(1440): transl_table=11

SEQ ID NO: 26537 - protein, 479 aa, Haemophilus ducreyi 35000HP; identical to SEQ ID NO: 8370

SEQ ID NO: 26538 - DNA, 1467 bp, Candidatus Blochmannia floridanus; identical to SEQ ID NO: 8483
  CDS (1)..(1467): transl_table=11

SEQ ID NO: 26539 - protein, 488 aa, Candidatus Blochmannia floridanus; identical to SEQ ID NO: 8484

SEQ ID NO: 26540 - DNA, 1467 bp, Bordetella pertussis Tohama I; identical to SEQ ID NO: 16413
  CDS (1)..(1467): transl_table=11

SEQ ID NO: 26541 - protein, 488 aa, Bordetella pertussis Tohama I; identical to SEQ ID NO: 16414

SEQ ID NO: 26542 - DNA, 1443 bp, Bordetella bronchiseptica RB50; identical to SEQ ID NO: 8485
  CDS (1)..(1443): transl_table=11

SEQ ID NO: 26543 - protein, 480 aa, Bordetella bronchiseptica RB50; identical to SEQ ID NO: 8486

SEQ ID NO: 26544 - DNA, 1818 bp, Gloeobacter violaceus PCC 7421; identical to SEQ ID NO: 8487
  CDS (1)..(1818): transl_table=11

SEQ ID NO: 26545 - protein, 605 aa, Gloeobacter violaceus PCC 7421; identical to SEQ ID NO: 8488

SEQ ID NO: 26546 - DNA, 1443 bp, Photorhabdus luminescens subsp. laumondii TTO1; identical to SEQ ID NO: 8489
  CDS (1)..(1443): transl_table=11

SEQ ID NO: 26547 - protein, 480 aa, Photorhabdus luminescens subsp. laumondii TTO1; identical to SEQ ID NO: 8490

SEQ ID NO: 26548 - DNA, 1449 bp, Vibrio vulnificus YJ016
  CDS (1)..(1449): transl_table=11
atgactcagccattaagaagaacaaaaatcgtgaccactttaggtccttcaactgacaaagataatgtactagaagaaattattcgagccggcgcgaatgtggtcaggatgaatttttctcacggcagcgcagaggatcataaaactcgcgcagaaaaagtgcgtaatattgccgccagacttggcagacaagtggctattttaggtgatttacaaggcccgaagatccgagtatcaacctttaaagaagggaaaattttcctttcagtgggtgacctcttcactttagacagtgacttgcccaaaggcgaaggcgatcaaaaatcagtgggattagactataaagcactgcctcaggatgtgggaccagaagatattctgctgcttgatgatggacgtgtacaactgcaagtgctgacggtcgatggcaacaaggtgaacactcgtgtgatagtgggcggaccgctgtcaaacaataaaggtatcaataaaaaagggggcggactctctgctgacgctctaacggaaaaagacaaacaagacatcttgctcgccgccgagatcaaagtcgattatctcgcgatctcctttccacgtaatggtgccgacatggactatgctcgtcgcttggccagagatgccggcttggaagccaaacttgttgccaaagttgaacgagcagaaaccgttcgaaacgatgaaaacatcgacgatattatcatggcttccgatgtcattatggttgctcgtggcgatctaggggtagaaatcggcgatccggaattgatcggtgtacagaaaaaactcatcaaacgagccaaagaactcaatcgtgtcgtcatcacggcaacacaaatgatggaatcgatgattgaaaatccaatgcccactcgagcagaagtcatggacgtagccaacgcggtgctggatggcaccgatgccgtgatgctttcaggggaaaccgccgctggtaaatacccagtcgaaacggtgcgctctatggcagaagtctgcattggggcagaaaaaacgtgggaaccgggcagccagaattatcgcatcgataaatcctttgtcaccgccgaagaaaccattgcaatgtcgacaatctacgccgcaaatcatatggaaggcgtcaaagcgatggtgacgttgactgaatcgggaagaaccgcattaatgacgtcaagattgaactcaacactgcccatttttgcgctttcgcctaatgagcgaacccttaatcgctgctctctctatcgtggcgtcactcccgtattttttgataccaaagtagaaactggatttgatgtcgcaatggccgcattgagcacgcttagaaagaaaaaactgctcgattttggggatttagtgatcatcacacagggggacatcatggatgttgaaggctcgactaactgcatgagaatcctgcctgtttttgactaa

SEQ ID NO: 26549 - protein, 482 aa, Vibrio vulnificus YJ016; identical to SEQ ID NO: 8368

SEQ ID NO: 26550 - DNA, 1422 bp, Corynebacterium diphtheriae NCTC 13129
  CDS (1)..(1422): transl_table=11
atggaacgtcgaactaagattgtttgtacattagggccggcagtcgcttcccgtgagggaattcttggactggttaaagccggcatgaatgtcgcacgtatgaatatgtcacacggcgaccacgcagatcatgagaagaattaccagtgggtccgcgaagctacggatgaaaccggacgcgctgttggtattcttgccgatctgcaggggccaaagattcgtctcggtcgctttatcgatggcgcaacggtgtgggagaacggtgaaatcgttcgtatcactgttgatgacattgaaggtacacacgaccgtgtgtctaccacctacaagaacctcgctaaagatgcgaagcctggcgatcgtcttttggtcgacgacggcaaggttgcattgcgctgtgttgaagtagatggaaacgatgttgtttgtgaggttgtagaaggcggcccagtctctaacaacaagggtgtttcccttcctggaatggatatttccgttccagctttgtctgaaaaagacattgctgatttgcgcttcgctctcaatctcggtgttgacattattgcgttgtccttcgtccgctccccagcagacgtggaacttgttcatgccatcatggatgaagaaggtcgccgttgcccagtgatcgcaaagcttgagaagccagaagccatggacgctttggagtccatcgtattggctttcgacggcatcatgattgctcgtggtgacttgggtgttgagtgcccgttggagcaggtgccgctgttccagaagcgtgccatccagattgctcgtgaaaacgctaagcctgtgattgtggcaacccagatgctcgattccatgatcgagaacctacgcccaacccgtgctgaggcttctgacgtagctaacgctgttcttgacggtgcagatgccgttatgctgtccggtgagacttcggtcggtatcgatccagctaacgttgtccgtactatgtcacgtatcgtttcctacgctgagattgatggccgggtaccaaacttggctcatattccacgcaccaagcgtggcgtgatttcctactctgcacgcgacattgcagagcgtttgaatgcaaaggcacttgtagcattcacctcttcaggtgataccgcaaagcgtgttgctcgtttgcactcgcagctgccgctattggtctttacccctcaccaagaagtccgctctcagttggctttgacttggggtgtagaaaccttccttaccgacgaggttaaggacacagacgagatgatgcgtacgatcgatgagcagttgcttgctctcgatacctacagcgaagatgacatgatcgtgctcgtagccggaacccctccaggagtccaaggcaataccaacatgatccatgtacaccacctaggtgaggacctcaacggtctataa

SEQ ID NO: 26551 - protein, 473 aa, Corynebacterium diphtheriae NCTC 13129
MERRTKIVCTLGPAVASREGILGLVKAGMNVARMNMSHGDHADHEKNYQWVREATDETGRAVGILADLQGPKIRLGRFIDGATVWENGEIVRITVDDIEGTHDRVSTTYKNLAKDAKPGDRLLVDDGKVALRCVEVDGNDVVCEVVEGGPVSNNKGVSLPGMDISVPALSEKDIADLRFALNLGVDIIALSFVRSPADVELVHAIMDEEGRRCPVIAKLEKPEAMDALESIVLAFDGIMIARGDLGVECPLEQVPLFQKRAIQIARENAKPVIVATQMLDSMIENLRPTRAEASDVANAVLDGADAVMLSGETSVGIDPANVVRTMSRIVSYAEIDGRVPNLAHIPRTKRGVISYSARDIAERLNAKALVAFTSSGDTAKRVARLHSQLPLLVFTPHQEVRSQLALTWGVETFLTDEVKDTDEMMRTIDEQLLALDTYSEDDMIVLVAGTPPGVQGNTNMIHVHHLGEDLNGL

SEQ ID NO: 26552 - DNA, 1443 bp, Geobacter sulfurreducens PCA
  CDS (1)..(1443): transl_table=11
atggatacactgtcacgcaaaaccaagatcatcgccactctggggcccgtcagctcctcgcccgacatgatccggcagctgatggacgcaggagtcgatgtcttccggctcaacttttcccacggctccaacgaccagcggcgggaggtaatcgccgccatccggcgtctttccgccgaacggggcaaggagataggcattctggccgatctccaggggcccaagatcaggaccggcaggatggagaacggtgccattccgctggtgcggggcgactcgctcgacattaccaccgatgaggtcctggggcgccccggtctcatttccaccatctaccagtctctcccccacgacgtgaagcccggctcacgcatcctgctggacgacggccttatcgagttgcgggtccagtccgtgtccggcgccacggtccgttgcaccgtggtccaggggggcatgctcaaggatctgaaagggatcaacctccccggcgtcaaggtttctgcgccgtcgctgtcggagaaggacctccgcgatctggatttctgcctggaggtgggggtcgactacattgccctgtcctttgtccgcactgccgccgacgtggaggggctgaagcggatcctcttcgaacgggacgtccaggtgccggtggtggccaagatcgagaagcccgaggccctgcgcaacttcaaaagcatcctcaaggttgccgatgcggtcatggtggcccggggcgatctgggggtggaaatcagcccggaaaaggtccccctgttccagaaaaagatcatccgggcctgcaacgaggccggcaaaccggtgatcaccgccacccagatgcttgaatccatgattagccatccgcgccccacccgggccgagacctcggacgtggccaacgccatcctcgacggaaccgatgcggtcatgctctcgggtgagaccgcctcggggcagtttcccctggaagcggtgcgtaccatggacaaggtggccctcgacgttgagcgcttcgctcaggtggaggacggctcggggccacgccgccacagcgtcagcatcgccgaggcggtggccgaggccgcctgccacgctgccgtcattctgaaggcgaaggccgtggcctgcatgacccagtcggggagcacggctgcccgcatctcacgctaccggcctccgctgccgatcctcgccttcaccggttcggtggacaccatgcgacggctgtcgctctactggggagtcaaggcataccccatcggcaccatggccggcaccgacgagcagatagtggccgtggagtcgacgctcctgtccggtggctaccgcaagggcgacgtggtggtcatcaccatgggtgtgccggtggaggcccgggggtccaccaacctcatgaaggtccacaagctgggaaccggccagttcttcgagatattttga

SEQ ID NO: 26553 - protein, 480 aa, Geobacter sulfurreducens PCA
MDTLSRKTKIIATLGPVSSSPDMIRQLMDAGVDVFRLNFSHGSNDQRREVIAAIRRLSAERGKEIGILADLQGPKIRTGRMENGAIPLVRGDSLDITTDEVLGRPGLISTIYQSLPHDVKPGSRILLDDGLIELRVQSVSGATVRCTVVQGGMLKDLKGINLPGVKVSAPSLSEKDLRDLDFCLEVGVDYIALSFVRTAADVEGLKRILFERDVQVPVVAKIEKPEALRNFKSILKVADAVMVARGDLGVEISPEKVPLFQKKIIRACNEAGKPVITATQMLESMISHPRPTRAETSDVANAILDGTDAVMLSGETASGQFPLEAVRTMDKVALDVERFAQVEDGSGPRRHSVSIAEAVAEAACHAAVILKAKAVACMTQSGSTAARISRYRPPLPILAFTGSVDTMRRLSLYWGVKAYPIGTMAGTDEQIVAVESTLLSGGYRKGDVVVITMGVPVEARGSTNLMKVHKLGTGQFFEIF

SEQ ID NO: 26554 - DNA, 1488 bp, Bdellovibrio bacteriovorus HD100; identical to SEQ ID NO: 8493
  CDS (1)..(1488): transl_table=11

SEQ ID NO: 26555 - protein, 495 aa, Bdellovibrio bacteriovorus HD100; identical to SEQ ID NO: 8494

SEQ ID NO: 26556 - DNA, 1656 bp, Nasonia vitripennis; identical to SEQ ID NO: 15718
  CDS (1)..(1656)

SEQ ID NO: 26557 - protein, 551 aa, Nasonia vitripennis; identical to SEQ ID NO: 15719

SEQ ID NO: 26558 - DNA, 1587 bp, Magnaporthe grisea 70-15; identical to SEQ ID NO: 8497
  CDS (1)..(1587)

SEQ ID NO: 26559 - protein, 528 aa, Magnaporthe grisea 70-15; identical to SEQ ID NO: 8498

SEQ ID NO: 26560 - DNA, 1623 bp, Gibberella zeae PH-1; identical to SEQ ID NO: 8499
  CDS (1)..(1623)

SEQ ID NO: 26561 - protein, 540 aa, Gibberella zeae PH-1; identical to SEQ ID NO: 8500

SEQ ID NO: 26562 - DNA, 1554 bp, Apis mellifera; identical to SEQ ID NO: 15722
  CDS (1)..(1554)

SEQ ID NO: 26563 - protein, 517 aa, Apis mellifera; identical to SEQ ID NO: 15723

SEQ ID NO: 26564 - DNA, 1515 bp, Candida albicans SC5314; identical to SEQ ID NO: 8501
  CDS (1)..(1515): transl_table=12

SEQ ID NO: 26565 - protein, 504 aa, Candida albicans SC5314; identical to SEQ ID NO: 8502

SEQ ID NO: 26566 - DNA, 1587 bp, Ustilago maydis 521; identical to SEQ ID NO: 8503
  CDS (1)..(1587)

SEQ ID NO: 26567 - protein, 528 aa, Ustilago maydis 521; identical to SEQ ID NO: 8504

SEQ ID NO: 26568 - DNA, 1590 bp, Cryptococcus neoformans var. neoformans B-3501A; identical to SEQ ID NO: 15728
  CDS (1)..(1590)

SEQ ID NO: 26569 - protein, 529 aa, Cryptococcus neoformans var. neoformans B-3501A; identical to SEQ ID NO: 15729

SEQ ID NO: 26570 - DNA, 1719 bp, Cryptococcus neoformans var. neoformans B-3501A; identical to SEQ ID NO: 15730
  CDS (1)..(1719)

SEQ ID NO: 26571 - protein, 572 aa, Cryptococcus neoformans var. neoformans B-3501A; identical to SEQ ID NO: 15731

SEQ ID NO: 26572 - DNA, 1560 bp, Encephalitozoon cuniculi GB-M1; identical to SEQ ID NO: 15732
  CDS (1)..(1560)

SEQ ID NO: 26573 - protein, 519 aa, Encephalitozoon cuniculi GB-M1; identical to SEQ ID NO: 15733

SEQ ID NO: 26574 - DNA, 1539 bp, Tribolium castaneum; identical to SEQ ID NO: 15734
  CDS (1)..(1539)

SEQ ID NO: 26575 - protein, 512 aa, Tribolium castaneum; identical to SEQ ID NO: 15735

SEQ ID NO: 26576 - DNA, 1611 bp, Tribolium castaneum; identical to SEQ ID NO: 15736
  CDS (1)..(1611)

SEQ ID NO: 26577 - protein, 536 aa, Tribolium castaneum; identical to SEQ ID NO: 15737

SEQ ID NO: 26578 - DNA, 1674 bp, Tribolium castaneum; identical to SEQ ID NO: 15738
  CDS (1)..(1674)

SEQ ID NO: 26579 - protein, 557 aa, Tribolium castaneum; identical to SEQ ID NO: 15739

SEQ ID NO: 26580 - DNA, 1593 bp, Tribolium castaneum; identical to SEQ ID NO: 15740
  CDS (1)..(1593)

SEQ ID NO: 26581 - protein, 530 aa, Tribolium castaneum; identical to SEQ ID NO: 15741

SEQ ID NO: 26582 - DNA, 1818 bp, Prochlorococcus marinus str. MIT 9303
  CDS (1)..(1818): transl_table=11
atggtagtttccgcgatgtttcaggtcccgttgatggcccagatcgatctgacacgacggaccaaaatcgttgccaccataggtccggcaaccgagaccgccgaacgaatccgagaactcgttcaggtaggtgctaccaccttccggctgaatttctcacacggcgaccatgacgagcacgccaagcgcatctccaccatccgccaggtctctgatgaattggggatgcacattggcattcttcaagacttgcaaggccccaaaattcgcctgggtcgttttgataaggggcctatcactttggccaatggcgatcccttcgcactgacctcaaaacaagttcaatgcaatcagtcagtggcaaccgtcacttacgaaaagcttgcagacgaagtcacgaccggcagtcgaatcttgcttgatgacggtcgagtggagatgaaagtcgtaaaaatcgatcaaagcgaacaaaccttgcactgcatcgtcacagtgggaggggtgctctcaaataacaagggagtgaatttccctgatgtacagctatcggttcgcgcccttacagagaaagatcgccaagatctcgcctttggcctccagcaaggggtggactgggtcgcactgagctttgtgcgaaacccttcggacatgaaagagatccgcaaactcatcggggatcatgggcacagcaccccagtgatcgcgaagatcgagaaatttgaggcgattgatcaaatcgattcaatccttcctctctgtgatggagtcatggttgcaaggggggacctaggcgttgagatgccagccgaagaggtgcctctactgcaaaaggatttgattcgcaaggccaacagccttggaattccaatcatcacagccacccagatgctcgactcgatggcctcgagcccgaggcccaccagagcagaagtgagtgatgtagcaaatgcgatccttgatggtactgatgcagtgatgctctcgaacgaaaccgctgtaggagactatccagtggaggcggttcaaacgatggccaccattgccagacggattgaacgggactatccacagcgtccaatcgaaacttatcttgccagcaccatttccaacgcgattagttcagccgtaagcagcatcgccagtcatctcaacgcggcagcaatcgtgccactaactgaaagtggtgccactgcccacaacgtcagcaaattccgcccagcagcgccaattttggccgtcaccaacgaagtggctgtagcaagaaaacttcaattggcatggggtgtcaccccactgcttgtcccaacccagaaaagcaccactgcaaccttcagtgctgcaattgctgttgcccaggaattgggtcttctcaaagaaggagatctaacaattcaaactgcaggaacccttgctggcgtgagcgggtccacagatcttgtcaaagtaggaattgtcagtgcagtgcttggccaagggatcggtattggcaatggcaccgttagcggcaaggtcagatttgctttctccccaaacgactcaacaaaaattgaaccaggggagattctggtcattcatgaaacaagcgatgactatctcgatgcaatcagaaagtctgcaggagtgattacagaacaagaaggagaggaatcccacgcagccgtgatctcaaaacgcctagggattccgttcatcattgggatagcacatgccacgagaaacctgcttgaaggagaggtggtaacaatgcagctcagtaatggcaaagttcatcgcggcacaggcggcaagctgccaatgaagctcgactcaatgctttga

SEQ ID NO: 26583 - protein, 605 aa, Prochlorococcus marinus str. MIT 9303
MVVSAMFQVPLMAQIDLTRRTKIVATIGPATETAERIRELVQVGATTFRLNFSHGDHDEHAKRISTIRQVSDELGMHIGILQDLQGPKIRLGRFDKGPITLANGDPFALTSKQVQCNQSVATVTYEKLADEVTTGSRILLDDGRVEMKVVKIDQSEQTLHCIVTVGGVLSNNKGVNFPDVQLSVRALTEKDRQDLAFGLQQGVDWVALSFVRNPSDMKEIRKLIGDHGHSTPVIAKIEKFEAIDQIDSILPLCDGVMVARGDLGVEMPAEEVPLLQKDLIRKANSLGIPIITATQMLDSMASSPRPTRAEVSDVANAILDGTDAVMLSNETAVGDYPVEAVQTMATIARRIERDYPQRPIETYLASTISNAISSAVSSIASHLNAAAIVPLTESGATAHNVSKFRPAAPILAVTNEVAVARKLQLAWGVTPLLVPTQKSTTATFSAAIAVAQELGLLKEGDLTIQTAGTLAGVSGSTDLVKVGIVSAVLGQGIGIGNGTVSGKVRFAFSPNDSTKIEPGEILVIHETSDDYLDAIRKSAGVITEQEGEESHAAVISKRLGIPFIIGIAHATRNLLEGEVVTMQLSNGKVHRGTGGKLPMKLDSML

SEQ ID NO: 26584 - DNA, 1791 bp, Prochlorococcus marinus str. MIT 9301
  CDS (1)..(1791): transl_table=11
atgtcgaatattgatttaaaaagaagaacaaaaatagtagcaactattggccctgcaactcaatctgaagagataattacaaatttaattaaagctggagtaacaacattcagattaaatttctcacatggcgatcataaagatcatgctgatagaataaaaaccataagggaagtatcaaaaaagttagatatagatattgggatattgcaagatctacaaggacctaaaataagattagggcgctttaaagatgggccagtaaaagttaaaaaaggcgataaattcacacttacatcaaatgaagtcgaatgtacgaatactattgcaaatgttacctacgaaaaactttctcaagaagttagcgaaggaaaaagaatacttttagatgatggaaaaatagaaatgattgtagaaaaagttgatacaaaagctaataatttggagtgcatggtaactgtaggaggggttctttcaaacaataaaggtgttaattttccagatgttcaattatcagtaaaagcattaacagaaaaagataaaaaggatttaaaatttggattatctgaaggagttgattggatcgcactaagttttgtaagaaatccatccgatataaatgagataaaagatttaataaataaaaatggtcattcaactcctgtagtcgcaaaaatagaaaaatttgaagcaatcgatcagatcgatacagtattacccttatgtgatggggttatggttgcaagaggtgatttgggagtagaaatgcctgccgaagaagttcctcttttacaaaaggaattaataagaaaagctaattcattaggtatcccaataattacagcgactcaaatgcttgattcaatggcttctaacccaagaccaaccagggccgaagttagtgatgttgcaaatgcaattctggatggtacagatgcagtaatgctttcaaacgaaactgcagttggcgattatcctgtggaggcagttgaaacgatggcaactatagcaagaagaattgaaagggattatccacttaaggctattgaaagccacttacccagtacgatcccaaatgctattagcgcagcagtaagcaatatagctagacaacttgaagcaggagctataatccctttaactaaatcaggttctaccgctcgaaatgtaagtaagttcagaccaccaacacccatcttggcaactactacagaaagaagtgtagcgagaagattgcaacttgtttggggagttactccaatagtagttaaaaatgatgaaagaacagcaaaaacttttagtttagctatgcaaattgctcaagagatggggatccttaatcaaggagatttagtagttcaaaccgcaggtacattaactggaattagtggctctacagatttaataaaagtcggtttagtaagaaggattgtatcaagaggaatttcaataggggaaatcggtgttacaggtaaagcaagaataattaaaaataatcttgatatatctttaatttgcccaggtgaaatattatttgttccgaaggaattaatgaaaaatattccactgagtaaaaatattgcaggcattgttacgaaccaaaatgtaaatgatgtttatgctttttttaacaaaaataataaaaagatttctacaatttgtaatttagaaaatatggatagtcatcaaatcagtaatggagatctcattactctccagcttaatgaaggtgtcatatacatgggccaaattgaagatgatgatgcaatagataaatataaatatgtctag

SEQ ID NO: 26585 - protein, 596 aa, Prochlorococcus marinus str. MIT 9301
MSNIDLKRRTKIVATIGPATQSEEIITNLIKAGVTTFRLNFSHGDHKDHADRIKTIREVSKKLDIDIGILQDLQGPKIRLGRFKDGPVKVKKGDKFTLTSNEVECTNTIANVTYEKLSQEVSEGKRILLDDGKIEMIVEKVDTKANNLECMVTVGGVLSNNKGVNFPDVQLSVKALTEKDKKDLKFGLSEGVDWIALSFVRNPSDINEIKDLINKNGHSTPVVAKIEKFEAIDQIDTVLPLCDGVMVARGDLGVEMPAEEVPLLQKELIRKANSLGIPIITATQMLDSMASNPRPTRAEVSDVANAILDGTDAVMLSNETAVGDYPVEAVETMATIARRIERDYPLKAIESHLPSTIPNAISAAVSNIARQLEAGAIIPLTKSGSTARNVSKFRPPTPILATTTERSVARRLQLVWGVTPIVVKNDERTAKTFSLAMQIAQEMGILNQGDLVVQTAGTLTGISGSTDLIKVGLVRRIVSRGISIGEIGVTGKARIIKNNLDISLICPGEILFVPKELMKNIPLSKNIAGIVTNQNVNDVYAFFNKNNKKISTICNLENMDSHQISNGDLITLQLNEGVIYMGQIEDDDAIDKYKYV

SEQ ID NO: 26586 - DNA, 1425 bp, Thermus thermophilus HB27; identical to SEQ ID NO: 8511
  CDS (1)..(1425): transl_table=11

SEQ ID NO: 26587 - protein, 474 aa, Thermus thermophilus HB27; identical to SEQ ID NO: 8512

SEQ ID NO: 26588 - DNA, 1797 bp, Candidatus Protochlamydia amoebophila UWE25; identical to SEQ ID NO: 8513
  CDS (1)..(1797): transl_table=11

SEQ ID NO: 26589 - protein, 598 aa, Candidatus Protochlamydia amoebophila UWE25; identical to SEQ ID NO: 8514

SEQ ID NO: 26590 - DNA, 1410 bp, Desulfovibrio vulgaris subsp. vulgaris str. Hildenborough
  CDS (1)..(1410): transl_table=11
atgcgcacaaagattatcgccaccatcggccccgcctcccgttcgcacgaagtcctttcacgcctcgtcaatgcaggcgtgggcatcttccgcctcaacttctcgcatggcgacgcatccatgttcgtggagctcatcgggcttctgcgcgaactggagcgtgagagcgggcgcccgctcaccatcctgcaagacctttcgggcccgaagatacggataggcgaaatcgccaagggcgcgctctccgtctccaagggtgacaggctcctgctggggcccgcccctgcccccgccgacaaccgccccttcattcccttcgaccatcccgccgtactcgccgagttcgagatcggcgacagggtggtgctctccgacggcgggctgcagttccgtgtcgtggacaaggggccgaacggcaccttcgagctcgaggccaacaacaacggcatgatcacctcgcgcaagggcctcgccctgccgggcaagtcggtcaagctcgccgcgctcacggccaaggaccgcaaagaccttgccgacggcctcgccctcggggtcgacgccgtggcgctctcctacgtgcagacccccgacgacatccgcgacgccaaggagatcatccgcgcagcgggccgcaacatccccgtcatcgccaagcttgaaaggcagaacgccgtggacaggctcgacgagatactcgccgagaccgacatcgtcatggtcgcccgcggcgacctcggcgtggagtgcccgctgcccgaactgcccgccatgcagaagcgcatcatccgagcctgcaaccgtgcggcaaagcccgtcatcgtggcgacgcagatgctcctctccatggtcaacagcccctcgcccacacgcgccgagaccacagacgtggccaacgcagtgctggacggtgccgactgcgtgatgctctccgaagagacggccatgggcagcttcccggtggagaccgtcaatttcatgaaggaaatcgccatgaaggccgaagagctgcacttcgaattgcagcgtcttcgtgagcctgacgtgggacgcggttcggccgacttcctcgcctactccgcctgcctgctggctgagaaggccaacgccgatgccatcgtctcgcacagcctgagcggcagttcggcgcggctcatctcctcgcgcaggccgcagcagccggtctatgccatcacgcctgacccggcagcccagcgctggctcaacttctcgtggggcgtgttccccgaggggggcgacgaaggcataagcggacaccttgagcgtgcagaggcgttcatcgaacgctgcccggacatccccgatggggccgacgtggtcatcaccgccggacagccgaagccgggcgacaccccgcgcggcaccaatctggtcaagatttacaggaaatag

SEQ ID NO: 26591 - protein, 469 aa, Desulfovibrio vulgaris subsp. vulgaris str. Hildenborough
MRTKIIATIGPASRSHEVLSRLVNAGVGIFRLNFSHGDASMFVELIGLLRELERESGRPLTILQDLSGPKIRIGEIAKGALSVSKGDRLLLGPAPAPADNRPFIPFDHPAVLAEFEIGDRVVLSDGGLQFRVVDKGPNGTFELEANNNGMITSRKGLALPGKSVKLAALTAKDRKDLADGLALGVDAVALSYVQTPDDIRDAKEIIRAAGRNIPVIAKLERQNAVDRLDEILAETDIVMVARGDLGVECPLPELPAMQKRIIRACNRAAKPVIVATQMLLSMVNSPSPTRAETTDVANAVLDGADCVMLSEETAMGSFPVETVNFMKEIAMKAEELHFELQRLREPDVGRGSADFLAYSACLLAEKANADAIVSHSLSGSSARLISSRRPQQPVYAITPDPAAQRWLNFSWGVFPEGGDEGISGHLERAEAFIERCPDIPDGADVVITAGQPKPGDTPRGTNLVKIYRK

SEQ ID NO: 26592 - DNA, 1443 bp, Erwinia carotovora subsp. atroseptica SCRI1043; identical to SEQ ID NO: 8519
  CDS (1)..(1443): transl_table=11

SEQ ID NO: 26593 - protein, 480 aa, Erwinia carotovora subsp. atroseptica SCRI1043; identical to SEQ ID NO: 8520

SEQ ID NO: 26594 - DNA, 1434 bp, Propionibacterium acnes KPA171202; identical to SEQ ID NO: 8521
  CDS (1)..(1434): transl_table=11

SEQ ID NO: 26595 - protein, 477 aa, Propionibacterium acnes KPA171202; identical to SEQ ID NO: 8522

SEQ ID NO: 26596 - DNA, 1467 bp, Leifsonia xyli subsp. xyli str. CTCB07; identical to SEQ ID NO: 8523
  CDS (1)..(1467): transl_table=11

SEQ ID NO: 26597 - protein, 488 aa, Leifsonia xyli subsp. xyli str. CTCB07; identical to SEQ ID NO: 8524

SEQ ID NO: 26598 - DNA, 1755 bp, Symbiobacterium thermophilum IAM 14863; identical to SEQ ID NO: 8529
  CDS (1)..(1755): transl_table=11

SEQ ID NO: 26599 - protein, 584 aa, Symbiobacterium thermophilum IAM 14863; identical to SEQ ID NO: 8530

SEQ ID NO: 26600 - DNA, 1758 bp, Bacillus licheniformis ATCC 14580; identical to SEQ ID NO: 15768
  CDS (1)..(1758): transl_table=11

SEQ ID NO: 26601 - protein, 585 aa, Bacillus licheniformis ATCC 14580; identical to SEQ ID NO: 15769

SEQ ID NO: 26602 - DNA, 1581 bp, Mannheimia succiniciproducens MBEL55E; identical to SEQ ID NO: 8531
  CDS (1)..(1581): transl_table=11

SEQ ID NO: 26603 - protein, 526 aa, Mannheimia succiniciproducens MBEL55E; identical to SEQ ID NO: 8532

SEQ ID NO: 26604 - DNA, 1467 bp, Methylococcus capsulatus str. Bath; identical to SEQ ID NO: 8535
  CDS (1)..(1467): transl_table=11

SEQ ID NO: 26605 - protein, 488 aa, Methylococcus capsulatus str. Bath; identical to SEQ ID NO: 8536

SEQ ID NO: 26606 - DNA, 1449 bp, Azoarcus sp. EbN1; identical to SEQ ID NO: 15772
  CDS (1)..(1449): transl_table=11

SEQ ID NO: 26607 - protein, 482 aa, Azoarcus sp. EbN1; identical to SEQ ID NO: 15773

SEQ ID NO: 26608 - DNA, 1446 bp, Silicibacter pomeroyi DSS-3; identical to SEQ ID NO: 16485
  CDS (1)..(1446): transl_table=11

SEQ ID NO: 26609 - protein, 481 aa, Silicibacter pomeroyi DSS-3; identical to SEQ ID NO: 16486

SEQ ID NO: 26610 - DNA, 1755 bp, Bacillus clausii KSM-K16; identical to SEQ ID NO: 8537
  CDS (1)..(1755): transl_table=11

SEQ ID NO: 26611 - protein, 584 aa, Bacillus clausii KSM-K16; identical to SEQ ID NO: 8538

SEQ ID NO: 26612 - DNA, 1434 bp, Corynebacterium glutamicum ATCC 13032; identical to SEQ ID NO: 8543
  CDS (1)..(1434): transl_table=11

SEQ ID NO: 26613 - protein, 477 aa, Corynebacterium glutamicum ATCC 13032; identical to SEQ ID NO: 8544

SEQ ID NO: 26614 - DNA, 1452 bp, Pseudomonas syringae pv. syringae B728a; identical to SEQ ID NO: 16495
  CDS (1)..(1452): transl_table=11

SEQ ID NO: 26615 - protein, 483 aa, Pseudomonas syringae pv. syringae B728a; identical to SEQ ID NO: 16496

SEQ ID NO: 26616 - DNA, 1437 bp, Haemophilus influenzae 86-028NP; identical to SEQ ID NO: 8545
  CDS (1)..(1437): transl_table=11

SEQ ID NO: 26617 - protein, 478 aa, Haemophilus influenzae 86-028NP; identical to SEQ ID NO: 8546

SEQ ID NO: 26618 - DNA, 1452 bp, Pseudomonas fluorescens Pf-5; identical to SEQ ID NO: 15782
  CDS (1)..(1452): transl_table=11

SEQ ID NO: 26619 - protein, 483 aa, Pseudomonas fluorescens Pf-5; identical to SEQ ID NO: 15783

SEQ ID NO: 26620 - DNA, 1452 bp, Colwellia psychrerythraea 34H; identical to SEQ ID NO: 8547
  CDS (1)..(1452): transl_table=11

SEQ ID NO: 26621 - protein, 483 aa, Colwellia psychrerythraea 34H; identical to SEQ ID NO: 8548

SEQ ID NO: 26622 - DNA, 1434 bp, Dechloromonas aromatica RCB; identical to SEQ ID NO: 8549
  CDS (1)..(1434): transl_table=11

SEQ ID NO: 26623 - protein, 477 aa, Dechloromonas aromatica RCB; identical to SEQ ID NO: 8550

SEQ ID NO: 26624 - DNA, 1431 bp, Thermobifida fusca YX; identical to SEQ ID NO: 8551
  CDS (1)..(1431): transl_table=11

SEQ ID NO: 26625 - protein, 476 aa, Thermobifida fusca YX; identical to SEQ ID NO: 8552

SEQ ID NO: 26626 - DNA, 1458 bp, Prochlorococcus marinus str. NATL2A; identical to SEQ ID NO: 16501
  CDS (1)..(1458): transl_table=11

SEQ ID NO: 26627 - protein, 485 aa, Prochlorococcus marinus str. NATL2A; identical to SEQ ID NO: 16502

SEQ ID NO: 26628 - DNA, 1437 bp, Ralstonia eutropha JMP134
  CDS (1)..(1437): transl_table=11
atgacccgctccaccaagatcgtcgccaccatcggccccgcttccagctcgctggaagtgctgacgcgcatgattgccgcgggggtcgacgtggtgcggctgaatttctcgcacggcaccgcgcaggaccatatcgaccgcgccacgctggtgcgcgaagccgcgcaggcctgcgggcgcgaagtggccatcatggccgacctgcagggcccgaagatccgcgtgggcaagttcgagagcggcaaggtcacgctcaagccgggcgacccgttcgtgctcgactcgtcgtgccagctcggcaaccaggaacgcgtcggcctggactaccaggacctgccgcgcgacgtgggcccaggcgacctgctgctgctcaacgacggcctgatcgtgctggtcgtggaccgtgtgctcggcacggagatcttcaccaccgtgcgcatcggcggcgacctgtcgaacaacaagggtatcaaccgccagggcggcgggctgtcggcgccggcgctgacggccaaggacatggacgacatcaagaccgccatggccctgggcgcggactatgtcgcggtgagcttcccgaagaacgccaccgatatggaaatggcgcgccagctcgcagcggtcgcaggccagccgtatggccgcaaggcgcgcatgatcgccaagatcgagcgcgccgaagcgatcaacccgggcgtgcttgaagaaatcctgcaggcgtctgacggcatcatggtcgcgcgcggcgacctggccgtggaagtcggcaatgccgcggtgccggcactgcagaagcgcatgatcaagctcgcgcgcgaggccaacaagctgaccatcaccgccacgcagatgatggaaagcatgatcgtgaacccggtgccgacgcgcgccgaggtgtccgacgtggccaacgccgtgctcgacggcaccgacgccgtcatgctgtcggccgagaccgccgccgggcgctatccggtcgagacggtcgaggccatggccgcagtctgcatcgaagccgagaagtccgaagtcgtgcagcttgacacggacttcctcaatcagaccttttcgcgcatcgaccagtcagtggcaatgggtgcgctgttcaccgcctatcatttgcaggtgaaggcgattgccgcactgaccgattcgggcgcgactgcgctgtggatgagccgtcaccgcatccacgtgccgatctacgcgatgacgcccaacgtggcgtcgcagcgcaagatgcagctgtaccgcaacgtcgtgccgctgccgcttgacgccagcaccgaccgcgacaccgcgctggagcaggccgaagagctgctgctcgcgcagggcgtggtgcagcgcggcgatttcatcgtgctgaccatcggcgagcccatgggccagcccggcggcaccaacaccctcaagatcgtcagggtgggaagttga

SEQ ID NO: 26629 - protein, 478 aa, Ralstonia eutropha JMP134
MTRSTKIVATIGPASSSLEVLTRMIAAGVDVVRLNFSHGTAQDHIDRATLVREAAQACGREVAIMADLQGPKIRVGKFESGKVTLKPGDPFVLDSSCQLGNQERVGLDYQDLPRDVGPGDLLLLNDGLIVLVVDRVLGTEIFTTVRIGGDLSNNKGINRQGGGLSAPALTAKDMDDIKTAMALGADYVAVSFPKNATDMEMARQLAAVAGQPYGRKARMIAKIERAEAINPGVLEEILQASDGIMVARGDLAVEVGNAAVPALQKRMIKLAREANKLTITATQMMESMIVNPVPTRAEVSDVANAVLDGTDAVMLSAETAAGRYPVETVEAMAAVCIEAEKSEVVQLDTDFLNQTFSRIDQSVAMGALFTAYHLQVKAIAALTDSGATALWMSRHRIHVPIYAMTPNVASQRKMQLYRNVVPLPLDASTDRDTALEQAEELLLAQGVVQRGDFIVLTIGEPMGQPGGTNTLKIVRVGS

SEQ ID NO: 26630 - DNA, 1434 bp, Methanosarcina barkeri str. Fusaro; identical to SEQ ID NO: 8553
  CDS (1)..(1434): transl_table=11

SEQ ID NO: 26631 - protein, 477 aa, Methanosarcina barkeri str. Fusaro; identical to SEQ ID NO: 8554

SEQ ID NO: 26632 - DNA, 1434 bp, Thiobacillus denitrificans ATCC 25259; identical to SEQ ID NO: 8555
  CDS (1)..(1434): transl_table=11

SEQ ID NO: 26633 - protein, 477 aa, Thiobacillus denitrificans ATCC 25259; identical to SEQ ID NO: 8556

SEQ ID NO: 26634 - DNA, 1431 bp, Anabaena variabilis ATCC 29413; identical to SEQ ID NO: 15790
  CDS (1)..(1431): transl_table=11

SEQ ID NO: 26635 - protein, 476 aa, Anabaena variabilis ATCC 29413; identical to SEQ ID NO: 15791

SEQ ID NO: 26636 - DNA, 1452 bp, Pseudomonas fluorescens PfO-1
  CDS (1)..(1452): transl_table=11
atgtccgtccgtcgtaccaaaatcgtcgctacccttggcccggccagtaactcgccggaagttctcgaacagctgattctggctggcctggacgtcgcccgtctgaacttctcccacggcacccccgacgagcacaaggctcgcgcgaagctggtgcgtgacctcgcggccaagcacggtcgcttcgtcgccctgctgggtgacctgcaaggcccgaaaatccgtatcgccaaattcgccaacaagcgcatcgagctgaagatcggtgaccagttcaccttctccaccagccatccgctgaccgaaggcaaccagcaagtggtcggcatcgactacccggacctggtcaaggactgcggcgtgggcgacgagctcctgctcgatgacggccgcgtggtcatgcgcgttgaaaccgccaccgccaccgagctgaactgcgtcgtgaccatcggcggtccgctgtccgaccacaaaggcatcaaccgtcgcggtggcggcctgaccgcgccggccctgactgaaaaagacaaggccgacatcaagctcgccgctgaaatggaagtcgactacctcgccgtgtccttcccgcgtgacgccgccgacatgaactacgcccgtcaactgcgcgacgaagccggcggcaccgcctggctggtggcgaagatcgaacgcgccgaagccgtggccgacgacgaaaccctcgacggtctgatcaaggcttccgacgcggtgatggttgcccgtggtgacctcggtgtggaaatcggcgacgccgagctggtgggcatccagaagaaaatcattctgcacgcacgccgccacaacaaggcggtgatcgtggcgacccagatgatggagtcgatgatccagaacccgatgccgacccgcgccgaagtgtccgacgtggccaacgccgtgctcgactacaccgacgccgtgatgctgtctgccgagtccgctgccggcgcttacccgctggaagccgtgcaggcgatggcgcgcatctgtgtcggcgctgaaaagcacccgaccagtaagacctccagccaccgtatcggcaaggaattcgagcgctgcgacgaaagcatcgcgctggcgaccatgtacaccgccaaccacttcccgggcgtcaaggcgatcatcgcactgaccgaaagcggctacaccccgctgatcatgtcgcgtatccgctcctcggtgccgatctactgcttcaccccgcaccgagaagcccaggctcgcgcggcaatgttccgtggcgtgtacaccgtaccgttcgacccggcttcgctggcaccgaacgaagtcagccagaaagccatcgacgaactggtcaagcgcggcgtagtggagaaaggcgactgggtcatcctgaccaagggcgacagctaccacaccaccggcggcaccaacggcatgaagatcctgcacgtgggcgatccgcaggtctga

SEQ ID NO: 26637 - protein, 483 aa, Pseudomonas fluorescens PfO-1
MSVRRTKIVATLGPASNSPEVLEQLILAGLDVARLNFSHGTPDEHKARAKLVRDLAAKHGRFVALLGDLQGPKIRIAKFANKRIELKIGDQFTFSTSHPLTEGNQQVVGIDYPDLVKDCGVGDELLLDDGRVVMRVETATATELNCVVTIGGPLSDHKGINRRGGGLTAPALTEKDKADIKLAAEMEVDYLAVSFPRDAADMNYARQLRDEAGGTAWLVAKIERAEAVADDETLDGLIKASDAVMVARGDLGVEIGDAELVGIQKKIILHARRHNKAVIVATQMMESMIQNPMPTRAEVSDVANAVLDYTDAVMLSAESAAGAYPLEAVQAMARICVGAEKHPTSKTSSHRIGKEFERCDESIALATMYTANHFPGVKAIIALTESGYTPLIMSRIRSSVPIYCFTPHREAQARAAMFRGVYTVPFDPASLAPNEVSQKAIDELVKRGVVEKGDWVILTKGDSYHTTGGTNGMKILHVGDPQV

SEQ ID NO: 26638 - DNA, 1752 bp, Carboxydothermus hydrogenoformans Z-2901; identical to SEQ ID NO: 8561
  CDS (1)..(1752): transl_table=11

SEQ ID NO: 26639 - protein, 583 aa, Carboxydothermus hydrogenoformans Z-2901; identical to SEQ ID NO: 8562

SEQ ID NO: 26640 - DNA, 1485 bp, Synechococcus sp. CC9605
  CDS (1)..(1485): transl_table=11
atggtagtttccgcagggattttcagccgcgatatgggccagttcgacctgaaccgacggaccaagatcgtggccaccatcggccctgccacggagagtccagagcggatcaaagagctggtgaaggctggtgctaccaccttcaggctgaatttttcccacggggaccacagcgagcacgccgcacgcatcgccacgatccgtcaggtgtctgaggaactgggccagaccatcggcatcctccaagacctccagggtccgaagatccggctcgggcggttcgccgaggggccgatcaccctggccaacggcgatccgttcacgctcacctcacggccggtgagctgcgacaagacgatcgcaacggtcacctacgacaagctcgccgacgaagtaaccgccggcagtcgcatcctgctcgacgacggccgtgtggagatgaaggtcgataccgtcgacaaagcggagcagaccttgcattgcaccgtcaccgtgggcggtgttctctccaacaacaaaggcgtcaacttcccagatgttcaactttctgttcgtgccctcacggacaaggacaagaccgacttggcctttggcctcagccagggggtggactgggtggccctcagcttcgtgcgcaatccctcggacatggaggagattcgcggattgatttgtgaacagggccatgagacccctgtagtggcgaagatcgaaaagtttgaggccatcgatcagatcgattcaatcctgccgctctgtgacggcgtgatggtggcccgcggtgacctcggcgtggagatgccggccgaggaagtgccgttgctgcagaaggaactgatccgcaaggccaacagcctgggcatccccatcattactgccacccagatgctggattccatggcctccagcccccggcccacccgagccgaagttagcgacgtggccaacgccatcctggatggcaccgacgccgtgatgctctccaacgagactgcagtgggggatttccccgtggaagccgtccaaaccatggcgaccattgcccgaaggatcgagaaggactacccccaacgctcgatcgacagccaccttcccagcaccattcccaacgccttgagcggtgcggtcagcaccatcgccagccagctcaatgcctcggcgattctccccctcacccgaagtggggccacagctcgcaacgtcagcaagttccggcctgcggcacccatccttgccatcactcctgatcgcaccgtcgcctgtcgtctgcagttggtgtggggcgtgacaccgctggtgattcccgaaggcgagcgaaccacgcagaccttccaggcagcgatgctcaaagccaaggagctcaacctgctgaaggagagtgatctcgtggttcagtccgcaggcacccatgccggagtttccggatccacggatctggtcaaggtgagcatcgtgggcaacgaagcagaggcgacactgatctga

SEQ ID NO: 26641 - protein, 494 aa, Synechococcus sp. CC9605
MVVSAGIFSRDMGQFDLNRRTKIVATIGPATESPERIKELVKAGATTFRLNFSHGDHSEHAARIATIRQVSEELGQTIGILQDLQGPKIRLGRFAEGPITLANGDPFTLTSRPVSCDKTIATVTYDKLADEVTAGSRILLDDGRVEMKVDTVDKAEQTLHCTVTVGGVLSNNKGVNFPDVQLSVRALTDKDKTDLAFGLSQGVDWVALSFVRNPSDMEEIRGLICEQGHETPVVAKIEKFEAIDQIDSILPLCDGVMVARGDLGVEMPAEEVPLLQKELIRKANSLGIPIITATQMLDSMASSPRPTRAEVSDVANAILDGTDAVMLSNETAVGDFPVEAVQTMATIARRIEKDYPQRSIDSHLPSTIPNALSGAVSTIASQLNASAILPLTRSGATARNVSKFRPAAPILAITPDRTVACRLQLVWGVTPLVIPEGERTTQTFQAAMLKAKELNLLKESDLVVQSAGTHAGVSGSTDLVKVSIVGNEAEATLI

SEQ ID NO: 26642 - DNA, 1437 bp, Rhodospirillum rubrum ATCC 11170; identical to SEQ ID NO: 8567
  CDS (1)..(1437): transl_table=11

SEQ ID NO: 26643 - protein, 478 aa, Rhodospirillum rubrum ATCC 11170; identical to SEQ ID NO: 8568

SEQ ID NO: 26644 - DNA, 1695 bp, Burkholderia thailandensis E264
  CDS (1)..(1695): transl_table=11
gtgacgccggcgggcacgcgcgttgcgcgcctcgccggcccggcggctttcgtcaggccgtcaagcggtgcgcccggggcgggcgcgccgaacccgaatcaacgacgcggcgccggccgttcacgccggcgcccgcggacaaagcgacgccgggcgcacgcaccggcgcgcgttccgaagcggcggcggctgggccgcgcggcttcggctctcgcggcgttacatccagcgctttcactcagtcagacgaggagattcatgcatcgcgccaccaagatagtcgccacgatcggtccggcatccagctcgccggaggtcctgttgcagatgatgcacgcgggtctcgacgtcgtgcggctcaatttctcgcacggctccgccgacgatcaccgcgagcgggccgagatggtccgcgaggccgcgcgccgggtcggccgggaaatcgcgatcatggcggacctgcaggggccgaagatccgcgtcggcaagttcgaggcgggcaagacgacgctcacgcccggccagccgttcatcctcgacgcgacgtgcgagctcggcaacgacgagcgggtcggcctcgactacaaggatctgccgcgcgacctgaagccgggcgacgtgctgctgcttaacgacggcctgatcgtgctgaaggtcgaccgcgtgttcggcgatgagattcacacgaccgtcaaggtgggcggcgatctgtcgaacaacaaggggatcaaccggcagggcggcgggctgtcggcgcccgcgctgaccgcgaaggacatggaggacatccgcaccgcgatgtcgctcggcgcggatctcgtcgccgtgtcgttcccgaagaacgcgaccgacatggagatggcgcgccagctcgcgaacatcgcgggtgcgccttacggcatcaagccgaagatgatcgcgaagatcgagcgcgccgaggcgattccggcgctgcaggagattctcgacgcgtcggacggcatcatggtcgcgcgcggcgatttggccgtcgaggtcggcaacgcggccgtgcccgcgctgcagaagcggatgatccggatggcgcgcgagtcgaacaagctcgtgatcaccgcgacgcagatgatggaatcgatgatccacgcgcccgtgccgacgcgcgcggaggtgtcggacgtcgcgaacgccgtgctcgacggcaccgatgcggtgatgctgtcggccgagacggcgacgggcaagtatccggccgtgacgatcgaggcgatggcggcgatctgcgtcgaggcggagaaatccgagcacgtcgagctcgacaaggatttcctcgaccgcacgttcacgcggatcgaccagtcgatcgcgatgggcgcgctcttcaccgcgtaccacctgggcgcgaaggcgatcgtcgcgctgaccgaatcgggcgcgacggcgctctggatgtcgcgccactacacgcacgtgccgatcttcgcgctgacgccgcgagtcggcagcgagcgcgcgatggcgctctttcgcaacgtgacgccgctgcacgtcgacttcgacagcgatcgcgattccgcgctgcagcaggcgctcgagctgatcgtgcggcgcggctacgtcgcgcatggcgacatggtcgtgctgacggtcggcgagccgatggggcaggcgggcggcacgaacacgctgaagatcgtgcgcgtcggcgagcactactga

SEQ ID NO: 26645 - protein, 564 aa, Burkholderia thailandensis E264
MTPAGTRVARLAGPAAFVRPSSGAPGAGAPNPNQRRGAGRSRRRPRTKRRRAHAPARVPKRRRLGRAASALAALHPALSLSQTRRFMHRATKIVATIGPASSSPEVLLQMMHAGLDVVRLNFSHGSADDHRERAEMVREAARRVGREIAIMADLQGPKIRVGKFEAGKTTLTPGQPFILDATCELGNDERVGLDYKDLPRDLKPGDVLLLNDGLIVLKVDRVFGDEIHTTVKVGGDLSNNKGINRQGGGLSAPALTAKDMEDIRTAMSLGADLVAVSFPKNATDMEMARQLANIAGAPYGIKPKMIAKIERAEAIPALQEILDASDGIMVARGDLAVEVGNAAVPALQKRMIRMARESNKLVITATQMMESMIHAPVPTRAEVSDVANAVLDGTDAVMLSAETATGKYPAVTIEAMAAICVEAEKSEHVELDKDFLDRTFTRIDQSIAMGALFTAYHLGAKAIVALTESGATALWMSRHYTHVPIFALTPRVGSERAMALFRNVTPLHVDFDSDRDSALQQALELIVRRGYVAHGDMVVLTVGEPMGQAGGTNTLKIVRVGEHY

SEQ ID NO: 26646 - DNA, 1428 bp, Syntrophus aciditrophicus SB; identical to SEQ ID NO: 8571
  CDS (1)..(1428): transl_table=11

SEQ ID NO: 26647 - protein, 475 aa, Syntrophus aciditrophicus SB; identical to SEQ ID NO: 8572

SEQ ID NO: 26648 - DNA, 1416 bp, Frankia sp. CcI3; identical to SEQ ID NO: 8573
  CDS (1)..(1416): transl_table=11

SEQ ID NO: 26649 - protein, 471 aa, Frankia sp. CcI3; identical to SEQ ID NO: 8574

SEQ ID NO: 26650 - DNA, 1437 bp, Francisella tularensis subsp. holarctica; identical to SEQ ID NO: 8577
  CDS (1)..(1437): transl_table=11

SEQ ID NO: 26651 - protein, 478 aa, Francisella tularensis subsp. holarctica; identical to SEQ ID NO: 8578

SEQ ID NO: 26652 - DNA, 1734 bp, Desulfitobacterium hafniense Y51; identical to SEQ ID NO: 8579
  CDS (1)..(1734): transl_table=11

SEQ ID NO: 26653 - protein, 577 aa, Desulfitobacterium hafniense Y51; identical to SEQ ID NO: 8580

SEQ ID NO: 26654 - DNA, 1443 bp, Saccharophagus degradans 2-40; identical to SEQ ID NO: 8581
  CDS (1)..(1443): transl_table=11

SEQ ID NO: 26655 - protein, 480 aa, Saccharophagus degradans 2-40; identical to SEQ ID NO: 8582

SEQ ID NO: 26656 - DNA, 1443 bp, Methylobacillus flagellatus KT; identical to SEQ ID NO: 8583
  CDS (1)..(1443): transl_table=11

SEQ ID NO: 26657 - protein, 480 aa, Methylobacillus flagellatus KT; identical to SEQ ID NO: 8584

SEQ ID NO: 26658 - DNA, 1440 bp, Ralstonia metallidurans CH34; identical to SEQ ID NO: 8585
  CDS (1)..(1440): transl_table=11

SEQ ID NO: 26659 - protein, 479 aa, Ralstonia metallidurans CH34; identical to SEQ ID NO: 8586

SEQ ID NO: 26660 - DNA, 1530 bp, Acidobacteria bacterium Ellin345; identical to SEQ ID NO: 8587
  CDS (1)..(1530): transl_table=11

SEQ ID NO: 26661 - protein, 509 aa, Acidobacteria bacterium Ellin345; identical to SEQ ID NO: 8588

SEQ ID NO: 26662 - DNA, 1434 bp, Myxococcus xanthus DK 1622; identical to SEQ ID NO: 8591
  CDS (1)..(1434): transl_table=11

SEQ ID NO: 26663 - protein, 477 aa, Myxococcus xanthus DK 1622; identical to SEQ ID NO: 8592

SEQ ID NO: 26664 - DNA, 1419 bp, Mycobacterium sp. MCS
  CDS (1)..(1419): transl_table=11
gtgaatagacgcgggaagatcgtctgtaccctcggtccggccaccggctccgacgacgccgtccggaagctggtggaggccgggatggatgtcgcgcggctcaacttcagccacggcgactaccccgatcacgaagccaactacaagcgggtccgcgcggcctccgaccacaccggacgcgccgtcggcatcctcgccgacctgcagggtccgaagatccggctgggccgcttcgccgacggcccgaccgtatgggccgagggcgagaccgtccggatcaccgtcgacgacgtcgagggcacccacgaccgcgtgtcgaccacctacaaacggttggcagaggacgccacccccggcgaccgggtcctcgtcgacgacggcaacgtcgcgctggtggtcaacgccatcgagggcaacgacgtcgtctgcgaggtcaccgagggtggccgggtcagcaacaacaagggcatgtcgctgcccgggatgaacgtctcggcgcccgcgctgtcggagaaggacatcgaggacctcgagttcgcggtgcgcctcggtgtcgacctggtcgcgctgtcgttcgtgcggtccccggccgacgtcgaactcgtgcacgaggtgatggaccgcgtggggcggcgggtcccggtgatcgccaaactggagaaaccggaggcgatcgacaacctcgaggcgatcgtgctggctttcgacgcgatcatggtcgcccgtggcgatctcggcgtggaactgccgctcgaagaggtcccgctggtgcagaagcgcgccatccagatggcccgcgagaacgccaaacccgtcatcgtcgccacgcagatgctggagtcgatgatcgaaaactcccggcccacccgcgccgaggcatccgacgtcgccaacgcggtgctcgacggcgcggacgcggtcatgctctcgggtgagacatcggtgggcaagtatccgctcgaggccgtgcggacgatggcgcgcatcatcatcgccgtcgaggagaactccgtcgtagtcccgccgctgacccacgtcccgcgcaccaagcgcggcgtgatctcctacgccgcccgcgacatcggggagcggttggacgccaaggcgctcgtcgcgttcacccagtccggggacaccgtgcggcgtctcgcgcggctgcacacgccgctgcccgtgctcgcgttcaccgcgctgcccgaggtgcgcagccaactggccttgacctggggcaccgaaacgttcatcgtgccgcagatcggcaccaccgacggcatgatccgccaggtcgacaagtcgctgctcgaactcggccgctacaagcggggcgatctggtggtcatcgtcgcgggtgcgccgccgggcacagtaggctccacgaatctgatccacgtgcaccggatcggggaggacgacgtctag

SEQ ID NO: 26665 - protein, 472 aa, Mycobacterium sp. MCS
MNRRGKIVCTLGPATGSDDAVRKLVEAGMDVARLNFSHGDYPDHEANYKRVRAASDHTGRAVGILADLQGPKIRLGRFADGPTVWAEGETVRITVDDVEGTHDRVSTTYKRLAEDATPGDRVLVDDGNVALVVNAIEGNDVVCEVTEGGRVSNNKGMSLPGMNVSAPALSEKDIEDLEFAVRLGVDLVALSFVRSPADVELVHEVMDRVGRRVPVIAKLEKPEAIDNLEAIVLAFDAIMVARGDLGVELPLEEVPLVQKRAIQMARENAKPVIVATQMLESMIENSRPTRAEASDVANAVLDGADAVMLSGETSVGKYPLEAVRTMARIIIAVEENSVVVPPLTHVPRTKRGVISYAARDIGERLDAKALVAFTQSGDTVRRLARLHTPLPVLAFTALPEVRSQLALTWGTETFIVPQIGTTDGMIRQVDKSLLELGRYKRGDLVVIVAGAPPGTVGSTNLIHVHRIGEDDV

SEQ ID NO: 26666 - DNA, 1434 bp, Rubrobacter xylanophilus DSM 9941; identical to SEQ ID NO: 8593
  CDS (1)..(1434): transl_table=11

SEQ ID NO: 26667 - protein, 477 aa, Rubrobacter xylanophilus DSM 9941; identical to SEQ ID NO: 8594

SEQ ID NO: 26668 - DNA, 1437 bp, Mesorhizobium sp. BNC1; identical to SEQ ID NO: 8595
  CDS (1)..(1437): transl_table=11

SEQ ID NO: 26669 - protein, 478 aa, Mesorhizobium sp. BNC1; identical to SEQ ID NO: 8596

SEQ ID NO: 26670 - DNA, 1413 bp, Cytophaga hutchinsonii ATCC 33406; identical to SEQ ID NO: 8597
  CDS (1)..(1413): transl_table=11

SEQ ID NO: 26671 - protein, 470 aa, Cytophaga hutchinsonii ATCC 33406; identical to SEQ ID NO: 8598

SEQ ID NO: 26672 - DNA, 1473 bp, Rhodococcus sp. RHA1; identical to SEQ ID NO: 8599
  CDS (1)..(1473): transl_table=11

SEQ ID NO: 26673 - protein, 490 aa, Rhodococcus sp. RHA1; identical to SEQ ID NO: 8600

SEQ ID NO: 26674 - DNA, 1440 bp, Haemophilus somnus 129PT; identical to SEQ ID NO: 8601
  CDS (1)..(1440): transl_table=11

SEQ ID NO: 26675 - protein, 479 aa, Haemophilus somnus 129PT; identical to SEQ ID NO: 8602

SEQ ID NO: 26676 - DNA, 1764 bp, Trichodesmium erythraeum IMS101; identical to SEQ ID NO: 8603
  CDS (1)..(1764): transl_table=11

SEQ ID NO: 26677 - protein, 587 aa, Trichodesmium erythraeum IMS101; identical to SEQ ID NO: 8604

SEQ ID NO: 26678 - DNA, 1440 bp, Shewanella sp. MR-4; identical to SEQ ID NO: 8605
  CDS (1)..(1440): transl_table=11

SEQ ID NO: 26679 - protein, 479 aa, Shewanella sp. MR-4; identical to SEQ ID NO: 8606

SEQ ID NO: 26680 - DNA, 1455 bp, Alkalilimnicola ehrlichei MLHE-1; identical to SEQ ID NO: 8607
  CDS (1)..(1455): transl_table=11

SEQ ID NO: 26681 - protein, 484 aa, Alkalilimnicola ehrlichei MLHE-1; identical to SEQ ID NO: 8608

SEQ ID NO: 26682 - DNA, 1440 bp, Rhizobium leguminosarum bv. viciae 3841; identical to SEQ ID NO: 8611
  CDS (1)..(1440): transl_table=11

SEQ ID NO: 26683 - protein, 479 aa, Rhizobium leguminosarum bv. viciae 3841; identical to SEQ ID NO: 8612

SEQ ID NO: 26684 - DNA, 1452 bp, Pseudomonas aeruginosa UCBPP-PA14; identical to SEQ ID NO: 8613
  CDS (1)..(1452): transl_table=11

SEQ ID NO: 26685 - protein, 483 aa, Pseudomonas aeruginosa UCBPP-PA14; identical to SEQ ID NO: 8614

SEQ ID NO: 26686 - DNA, 1413 bp, Solibacter usitatus Ellin6076; identical to SEQ ID NO: 8619
  CDS (1)..(1413): transl_table=11

SEQ ID NO: 26687 - protein, 470 aa, Solibacter usitatus Ellin6076; identical to SEQ ID NO: 8620

SEQ ID NO: 26688 - DNA, 1452 bp, Magnetococcus sp. MC-1; identical to SEQ ID NO: 8621
  CDS (1)..(1452): transl_table=11

SEQ ID NO: 26689 - protein, 483 aa, Magnetococcus sp. MC-1; identical to SEQ ID NO: 8622

SEQ ID NO: 26690 - DNA, 1419 bp, Mycobacterium smegmatis str. MC2 155
  CDS (1)..(1419): transl_table=11
gtgagcagacgcggaaagatcgtttgtacgcttggccccgccaccagcacggatgagaccgtcagggcgctggtcgaggccgggatggatgtcgcgcggctgaacttcagccacggcgactacagcgaccacgaggccgcctacaagagggtgcgcgcggcatcagatgtcacgggtcatgccgtcggcatcatggccgacctgcagggccccaagatccggctgggccgtttcaaggacggcccgacgtattgggcgaccggtgagaccgtgcgcatcaccgtcgaggactgcgagggcactcacgaccgcgtgtccaccacctacaagcaacttgcgcaggacgccgccagaggtgaccgcctgctcgtcgacgacggcaaggtcgcgctgaaggtcgaagaggtcgacggcgacgacgtcgtctgcacggtcaccgagggcggcccggtgagcaacaacaagggtgtgtcgctgcctggcatgaacgtctccgtgccggcgatgtccgagaaggacatcgaggacctggagttcgcggtgcgcctcggtgtcgacctggtcgcgctgtcgttcgtgcggtcgcccgccgacatcgaactggtccacgaggtgatggaccgcgtcggccgccgcgtgcccgtgatcgccaagctggaaaagcccgaggccatcgagaatctcgaggccgtggtgctggcgttcgacgccgtgatggtcgcccgcggcgacctgggtgtcgagcttccgctcgaagaggtgccgctggttcagaagcgcgccatccagatggccagggagaacgccaaaccggtcatcgtcgcgacccagatgctcgagtcgatgatcgagaactcccggcccacccgcgccgaggcgtccgacgtcgccaacgccgtgctcgacggtgccgacgcggtgatgctgtcgggggagacctcggtgggcaagtacccgctggaggccgtgcgcaccatggcccgcatcatccaagcggtcgaggacaattcggtggtcgtgccgccgctgacccacgtgccccgcaccaagcgcggcgtgatctcttatgccgcacgcgatatcggcgaacgcctggacgccaaggcgttggtcgcgttcacgcagtccggtgacaccgtgcgccgcctggcgcgcctgcacaccccgctgccagtgctggcgttcacggcgctgcccgaggtccgcagccagctcgcactcacgtggggcaccgagacgttcatcgtcccgcagatgtcgaacaccgacgacatgatccggcaggtcgacaagtcgttgctggagctcggccgctacaagcgcggcgagctggtggtcatcgtcgcgggtgctcctccgggcacagtaggctccaccaatctgatccatgtgcatcgcatcggagaggacgacgtctag

SEQ ID NO: 26691 - protein, 472 aa, Mycobacterium smegmatis str. MC2 155
MSRRGKIVCTLGPATSTDETVRALVEAGMDVARLNFSHGDYSDHEAAYKRVRAASDVTGHAVGIMADLQGPKIRLGRFKDGPTYWATGETVRITVEDCEGTHDRVSTTYKQLAQDAARGDRLLVDDGKVALKVEEVDGDDVVCTVTEGGPVSNNKGVSLPGMNVSVPAMSEKDIEDLEFAVRLGVDLVALSFVRSPADIELVHEVMDRVGRRVPVIAKLEKPEAIENLEAVVLAFDAVMVARGDLGVELPLEEVPLVQKRAIQMARENAKPVIVATQMLESMIENSRPTRAEASDVANAVLDGADAVMLSGETSVGKYPLEAVRTMARIIQAVEDNSVVVPPLTHVPRTKRGVISYAARDIGERLDAKALVAFTQSGDTVRRLARLHTPLPVLAFTALPEVRSQLALTWGTETFIVPQMSNTDDMIRQVDKSLLELGRYKRGELVVIVAGAPPGTVGSTNLIHVHRIGEDDV

SEQ ID NO: 26692 - DNA, 1464 bp, Nocardioides sp. JS614
  CDS (1)..(1464): transl_table=11
gtgcgtagagcgaagatcgtgtgcaccctgggccccgcggtggcgaaccctcgacggatccgtgaactggtctatgccggcatggacgtcgcccgcctgaacatgagccacggctcgcacgaggaccatgccgaggcctaccgcctcgtgcgcgaggcctcggacgcgagcggccacggcgtcggcatcttcgccgacctgcagggcccgaagatccggctcgagcggttcgcgaacggtccggtcgtgctgacccgcgggcaggcgtggacgatcaccacccgcgacgtgcccggcgacgaccgcgagtgcgggacgacgtacaagggcctgcccggcgacgtgagcgtcggcgacccgatcctcatcgacgacggcaaggtgcggctgcgggtcaccaaggtcgacggaccggacgtgcacaccgaggtgctcgtgggcggcaaggtcagcgacaacaagggcatcaacctgcccggcgtcgccgtgtccgtgccggcgctgtcggagaaggacatcgaggacctgcgcttcgcgctgcacctcacggtcgacttcatcgcgctgagcttcgtacgcgacgccaaggacgtcgaggacgtccggcggatcatggacgaggagggcgtgcacctcccggtcatcgcgaagatcgagaagccgcaggcgatcgagaacctcgacgaggtgatcgcggcgttcgacggcttcatggtcgcccgcggcgacctcggcgtggagtgcccgctcgaggacgtcccgttcctgcagaagcggatcgtcgagaaggcccgcctcaacgccaagcccgtcatcgtcgcgacccagatgctggagtcgatgatcggcaaccccgcgccgacccgcgccgaggcctccgacgtcgcgaacgccgtcctcgacggcgccgacgcggtgatgctgtccggcgagaccagcgtgggggagtaccccgtccacaccgtcgagacgatggcgcggatcatcgcggcgaccgaggcgcacgccctggcgcagcccccgggccgggccgccctcgccgagatcgactgggacccgcacacccgcggcggcgtgatcgccaaggccgccgaggaggtcgccgagcgggtcggggcgaagtacgtcgtcgccttcacccagagcggtgactccgcgcgccggatgtcgcggctgcgtggcccgatcccgatcctcgcgttcacgccggtcggggtggtgcgctcgcagctcgcgctgacctgggggatcgagacgttcctgacccagcccgtcgagcacaccgacgagatggtccgtcaggtcgacgaccagctgctccggatcggccgggtccgcgagggtgacctcgtggtcatcatcgcgggcgcccctccgggcatccccgggtcgacgaacgcgctgcggatccaccggatgggcgacgcgatcaaccaggtcgcgccggcgtaccgccgcagctga

SEQ ID NO: 26693 - protein, 487 aa, Nocardioides sp. JS614
MRRAKIVCTLGPAVANPRRIRELVYAGMDVARLNMSHGSHEDHAEAYRLVREASDASGHGVGIFADLQGPKIRLERFANGPVVLTRGQAWTITTRDVPGDDRECGTTYKGLPGDVSVGDPILIDDGKVRLRVTKVDGPDVHTEVLVGGKVSDNKGINLPGVAVSVPALSEKDIEDLRFALHLTVDFIALSFVRDAKDVEDVRRIMDEEGVHLPVIAKIEKPQAIENLDEVIAAFDGFMVARGDLGVECPLEDVPFLQKRIVEKARLNAKPVIVATQMLESMIGNPAPTRAEASDVANAVLDGADAVMLSGETSVGEYPVHTVETMARIIAATEAHALAQPPGRAALAEIDWDPHTRGGVIAKAAEEVAERVGAKYVVAFTQSGDSARRMSRLRGPIPILAFTPVGVVRSQLALTWGIETFLTQPVEHTDEMVRQVDDQLLRIGRVREGDLVVIIAGAPPGIPGSTNALRIHRMGDAINQVAPAYRRS

SEQ ID NO: 26694 - DNA, 1443 bp, Azoarcus sp. BH72; identical to SEQ ID NO: 8625
  CDS (1)..(1443): transl_table=11

SEQ ID NO: 26695 - protein, 480 aa, Azoarcus sp. BH72; identical to SEQ ID NO: 8626

SEQ ID NO: 26696 - DNA, 1437 bp, Acidovorax sp. JS42; identical to SEQ ID NO: 8627
  CDS (1)..(1437): transl_table=11

SEQ ID NO: 26697 - protein, 478 aa, Acidovorax sp. JS42; identical to SEQ ID NO: 8628

SEQ ID NO: 26698 - DNA, 1440 bp, Haemophilus somnus 2336
  CDS (1)..(1440): transl_table=11
atgtctagaagactaagaagaacaaaaatagtatgtacactgggaccatccacagatcgaggtaataatttagaaaaaattattgtagccggtgcaaatgttgttcgtatgaatttttctcatggtacaccagaagatcatcttgctcgtgctgaaaaagttcgtgaaattgctaaaaaattaggtaaaactgttgcaattttaggagatctacaaggtccaaaaattcgggtatctacttttaaagagggtaaaattttcttaaatattggtgataattttactttagatgctgatttacccaaaggtgaaggtaatcaagaagccgtaggactggattataaaacattaccacaagatgttgttccgggcgatattttattattagatgacggacgtgttcagttaaaagtgttatcgacagacaatactaaagtatttacagaagtaattgttggcggtccattatcaaataataaaggtatcaataaattaggtggtgggttatctgctaacgcactgacagaaaaagacaaagaagacattattttagctgcacgtattggtgttgattatcttgctgtttctttccctcgttccagtgctgatttaaattatgctcgtgaattagctcaacaagctggtttaaaagccaaaattgtggctaaagttgaaagagcggagactgttattgacgatgaggcaatggacgatattattttagcttctgatgtaattatggttgctcgtggtgatttgggtgttgaaattggtgatccggaattagtcggaatacagaaaaaattaattcgtcgttcacgtcagctaaatcgtgtagtgattaccgcaacacaaatgatggaatctatgattagcaatcctatgccaactcgtgccgaggtgatggatgttgccaatgctgtattagatggcactgatgccgtcatgctttctgcggaaacagcagcaggtcaatacccttcagaaactgtttcagcaatggctaaagtttgtttaggtgctgaaaaaatgcctagtgtaaatatttctcggcatcgcttagataaagaatttgatacgattgaagaaactattgcgatgtctacgatgtttgcagccaaccatatgaaaggtgttgcagccatcatcgcaatgacaagtagtggtcatactgcaaaattgatgtctcgcattagttccggactaccaatttttgccctttctcgaaatgaaagtacgttaaatttatgtgcattgtatcgtggtgttattccaattcattttgatcaggatagtcgtacgcttgaaggattaaaagcagcaatacaatcgctaaaagataaaggttatttagtttccggtgatttggttttattaactcaaggagaccatttaacatcaaatggtacgactacttgccgtgctttagtggttgaatga

SEQ ID NO: 26699 - protein, 479 aa, Haemophilus somnus 2336
MSRRLRRTKIVCTLGPSTDRGNNLEKIIVAGANVVRMNFSHGTPEDHLARAEKVREIAKKLGKTVAILGDLQGPKIRVSTFKEGKIFLNIGDNFTLDADLPKGEGNQEAVGLDYKTLPQDVVPGDILLLDDGRVQLKVLSTDNTKVFTEVIVGGPLSNNKGINKLGGGLSANALTEKDKEDIILAARIGVDYLAVSFPRSSADLNYARELAQQAGLKAKIVAKVERAETVIDDEAMDDIILASDVIMVARGDLGVEIGDPELVGIQKKLIRRSRQLNRVVITATQMMESMISNPMPTRAEVMDVANAVLDGTDAVMLSAETAAGQYPSETVSAMAKVCLGAEKMPSVNISRHRLDKEFDTIEETIAMSTMFAANHMKGVAAIIAMTSSGHTAKLMSRISSGLPIFALSRNESTLNLCALYRGVIPIHFDQDSRTLEGLKAAIQSLKDKGYLVSGDLVLLTQGDHLTSNGTTTCRALVVE

SEQ ID NO: 26700 - DNA, 1401 bp, Actinobacillus pleuropneumoniae serovar 1 str. 4074; identical to SEQ ID NO: 8629
  CDS (1)..(1401): transl_table=11

SEQ ID NO: 26701 - protein, 466 aa, Actinobacillus pleuropneumoniae serovar 1 str. 4074; identical to SEQ ID NO: 8630

SEQ ID NO: 26702 - DNA, 1398 bp, Haemophilus influenzae R2846
  CDS (1)..(1398): transl_table=11
atgggcccatcaactgaccgtgataacaatcttgaaaaaattatcgcagcgggcgcaaacgtagttcgtatgaacttctctcacggtacacctgatgaccatatcggacgtgctgaacgtgtacgttctattgcgaaaaaattaggtaaaaccgtggcaatcttaggtgatttacaaggtcctaaaattcgtgtttctacttttaaagacggtaaaattttcttaaacgttggcgataaattcattcttgatgcagagttaccaaaaggcgaaggcactcaagaatccgttggtttagactataaaacgcttcctcaagatgttgtgcctggcgatattcttttattagatgatggccgtgttcaattaaaagtattatcaactgatggtgcaaaagttttcactgaagttactgttggtggtccattatcaaataataaaggtatcaataaattaggtggcggtttatctgcggatgccctaacagaaaaagataaagccgacattattaccgctgcacgcattggtgttgatttcttagccgtttctttccctcgttcaagtgcagatttaaattatgcacgtgaacttgctcaacaagcaggtttaaatgcaaaaatcgttgctaaagttgaacgtgcagaaaccgttgctaatgatgaagccatggacgatattattttagcatctgatgtaattatggttgctcgtggtgacttaggcgtagaaatcggcgatcctgaattagtcggtgtacagaaaaaattaattcgtcgttcacgtcaattaaatcgtgctgtaattacagcgactcaaatgatggaatcaatgattagtaacccaatgccaacgcgtgctgaagtaatggacgttgcaaacgcagtattagatggaactgatgcagttatgctttctgcagaaacagcagcaggtcaatatccttctgaaacagtggcagcaatggctagcgtatgtttaggtgcagaaaaaatgccaagcattaacgtttctcgtcaccgtatggataaagaatttgaaaccattgaagaatctgttgcgatgtctgcaatgtatgcagcaaaccacatgaaaggtgtagcggcaatcgtcactttaactagcacaggccgtactccattattaatgtcacgcattagctctggcttaccaatctttgctttatctcgtaatcaagaaaccctaaacctttgtgcactataccgcggtgtaacaccaatttatcacggtgaagaaagtcgtacagaagcaggtgcaaaagcagcacttcaatcattaaaagaaaaaggttatttatctactggcgatttagtactggtaacccaaggtggtcaaggtgcgacacaaactaacgtatgtcgtacattaattgttgaataa

SEQ ID NO: 26703 - protein, 465 aa, Haemophilus influenzae R2846
MGPSTDRDNNLEKIIAAGANVVRMNFSHGTPDDHIGRAERVRSIAKKLGKTVAILGDLQGPKIRVSTFKDGKIFLNVGDKFILDAELPKGEGTQESVGLDYKTLPQDVVPGDILLLDDGRVQLKVLSTDGAKVFTEVTVGGPLSNNKGINKLGGGLSADALTEKDKADIITAARIGVDFLAVSFPRSSADLNYARELAQQAGLNAKIVAKVERAETVANDEAMDDIILASDVIMVARGDLGVEIGDPELVGVQKKLIRRSRQLNRAVITATQMMESMISNPMPTRAEVMDVANAVLDGTDAVMLSAETAAGQYPSETVAAMASVCLGAEKMPSINVSRHRMDKEFETIEESVAMSAMYAANHMKGVAAIVTLTSTGRTPLLMSRISSGLPIFALSRNQETLNLCALYRGVTPIYHGEESRTEAGAKAALQSLKEKGYLSTGDLVLVTQGGQGATQTNVCRTLIVE

SEQ ID NO: 26704 - DNA, 1398 bp, Haemophilus influenzae R2866
  CDS (1)..(1398): transl_table=11
atgggcccatcaactgaccgtgataacaatcttgaaaaaattatcgcagcgggcgcaaacgtagttcgtatgaacttctctcacggtacacctgatgaccatatcggacgtgctgaacgtgtacgttctattgcgaaaaaattaggtaaaaccgtggcaatcttaggtgatttacaaggtcctaaaattcgtgtttctacttttaaagacggtaaaattttcttaaacattggcgataaattcattcttgatgcagagttaccaaaaggcgaaggcactcaagaatccgttggtttagactataaaacgcttccacaagatgttgttccgggcgatattcttttattagatgatggccgtgttcaattaaaagtattatcaattgatggtgcaaaagttttcactgaagttactgttggtggtccattatcaaataataaaggtatcaataaattaggtggcggtttatctgcggatgccctaacagaaaaagataaagccgacattattaccgctgcacgtattggtgttgatttcttagccgtttctttccctcgttcaagtgcagatttaaattatgcacgtgaacttgctcaacaagcaggtttaaatgcaaaaatcgttgctaaagttgaacgtgcagaaaccgttgctaatgatgaagccatggacgatattattttagcatccgatgtaattatggttgctcgtggtgacttaggcgtagaaatcggcgatcctgaattagtcggtgtacagaaaaaattaattcgtcgttcacgtcaattaaatcgtgctgtaattacagcgactcaaatgatggaatcaatgattagtaacccaatgccaacgcgtgctgaagtaatggacgttgcaaacgcagtattagatggaactgatgcagttatgctttctgcagaaacagcagcaggtcaatatccttctgaaacagtggcagcaatggctagcgtatgtttaggtgcagaaaaaatgccaagcattaacgtttctcgtcaccgtatggataaagaatttgaaaccattgaagaatctgttgcgatgtctgcaatgtatgcagcaaaccacatgaaaggtgtagcggcaatcgtcactttaagtagcacaggccgtactccattattaatgtcacgcattagctctggcttaccaatctttgctttatctcgtaatcaagaaaccctaaacctttgtgcactataccgcggtgtaacaccaatttatcacggcgaagaaagtcgtacagaagccggtgcaaaagcagcacttcaatcattaaaagaaaaaggttatttatctactggcgatttagtgctggtaacccaaggtggtcaaggtgcgacacaaactaacgtatgtcgtacattaattgttgaataa

SEQ ID NO: 26705 - protein, 465 aa, Haemophilus influenzae R2866
MGPSTDRDNNLEKIIAAGANVVRMNFSHGTPDDHIGRAERVRSIAKKLGKTVAILGDLQGPKIRVSTFKDGKIFLNIGDKFILDAELPKGEGTQESVGLDYKTLPQDVVPGDILLLDDGRVQLKVLSIDGAKVFTEVTVGGPLSNNKGINKLGGGLSADALTEKDKADIITAARIGVDFLAVSFPRSSADLNYARELAQQAGLNAKIVAKVERAETVANDEAMDDIILASDVIMVARGDLGVEIGDPELVGVQKKLIRRSRQLNRAVITATQMMESMISNPMPTRAEVMDVANAVLDGTDAVMLSAETAAGQYPSETVAAMASVCLGAEKMPSINVSRHRMDKEFETIEESVAMSAMYAANHMKGVAAIVTLSSTGRTPLLMSRISSGLPIFALSRNQETLNLCALYRGVTPIYHGEESRTEAGAKAALQSLKEKGYLSTGDLVLVTQGGQGATQTNVCRTLIVE

SEQ ID NO: 26706 - DNA, 1776 bp, Crocosphaera watsonii WH 8501; identical to SEQ ID NO: 8631
  CDS (1)..(1776): transl_table=11

SEQ ID NO: 26707 - protein, 591 aa, Crocosphaera watsonii WH 8501; identical to SEQ ID NO: 8632

SEQ ID NO: 26708 - DNA, 1569 bp, Kineococcus radiotolerans SRS30216; identical to SEQ ID NO: 8633
  CDS (1)..(1569): transl_table=11

SEQ ID NO: 26709 - protein, 522 aa, Kineococcus radiotolerans SRS30216; identical to SEQ ID NO: 8634

SEQ ID NO: 26710 - DNA, 1446 bp, Roseovarius nubinhibens ISM; identical to SEQ ID NO: 8637
  CDS (1)..(1446): transl_table=11

SEQ ID NO: 26711 - protein, 481 aa, Roseovarius nubinhibens ISM; identical to SEQ ID NO: 8638

SEQ ID NO: 26712 - DNA, 1788 bp, Synechococcus sp. WH 5701; identical to SEQ ID NO: 15854
  CDS (1)..(1788): transl_table=11

SEQ ID NO: 26713 - protein, 595 aa, Synechococcus sp. WH 5701; identical to SEQ ID NO: 15855

SEQ ID NO: 26714 - DNA, 1437 bp, Pseudoalteromonas tunicata D2; identical to SEQ ID NO: 8645
  CDS (1)..(1437): transl_table=11

SEQ ID NO: 26715 - protein, 478 aa, Pseudoalteromonas tunicata D2; identical to SEQ ID NO: 8646

SEQ ID NO: 26716 - DNA, 1446 bp, Photobacterium sp. SKA34; identical to SEQ ID NO: 8647
  CDS (1)..(1446): transl_table=11

SEQ ID NO: 26717 - protein, 481 aa, Photobacterium sp. SKA34; identical to SEQ ID NO: 8648

SEQ ID NO: 26718 - DNA, 1437 bp, Oceanospirillum sp. MED92; identical to SEQ ID NO: 8649
  CDS (1)..(1437): transl_table=11

SEQ ID NO: 26719 - protein, 478 aa, Oceanospirillum sp. MED92; identical to SEQ ID NO: 8650

SEQ ID NO: 26720 - DNA, 1482 bp, delta proteobacterium MLMS-1; identical to SEQ ID NO: 15864
  CDS (1)..(1482): transl_table=11

SEQ ID NO: 26721 - protein, 493 aa, delta proteobacterium MLMS-1; identical to SEQ ID NO: 15865

SEQ ID NO: 26722 - DNA, 1431 bp, Rickettsiella grylli; identical to SEQ ID NO: 8657
  CDS (1)..(1431): transl_table=11

SEQ ID NO: 26723 - protein, 476 aa, Rickettsiella grylli; identical to SEQ ID NO: 8658

SEQ ID NO: 26724 - DNA, 1437 bp, Alteromonadales bacterium TW-7; identical to SEQ ID NO: 8661
  CDS (1)..(1437): transl_table=11

SEQ ID NO: 26725 - protein, 478 aa, Alteromonadales bacterium TW-7; identical to SEQ ID NO: 8662

SEQ ID NO: 26726 - DNA, 1455 bp, marine gamma proteobacterium HTCC2080; identical to SEQ ID NO: 8665
  CDS (1)..(1455): transl_table=11

SEQ ID NO: 26727 - protein, 484 aa, marine gamma proteobacterium HTCC2080; identical to SEQ ID NO: 8666

SEQ ID NO: 26728 - DNA, 1416 bp, Pseudomonas putida GB-1; identical to SEQ ID NO: 8667
  CDS (1)..(1416): transl_table=11

SEQ ID NO: 26729 - protein, 471 aa, Pseudomonas putida GB-1; identical to SEQ ID NO: 8668

SEQ ID NO: 26730 - DNA, 1455 bp, Pseudomonas putida GB-1; identical to SEQ ID NO: 8669
  CDS (1)..(1455): transl_table=11

SEQ ID NO: 26731 - protein, 484 aa, Pseudomonas putida GB-1; identical to SEQ ID NO: 8670

SEQ ID NO: 26732 - DNA, 1449 bp, Marinobacter sp. ELB17; identical to SEQ ID NO: 8671
  CDS (1)..(1449): transl_table=11

SEQ ID NO: 26733 - protein, 482 aa, Marinobacter sp. ELB17; identical to SEQ ID NO: 8672

SEQ ID NO: 26734 - DNA, 1437 bp, Moritella sp. PE36
  CDS (1)..(1437): transl_table=11
atgttacgtagaactaaaattgtaaccaccttaggtccagcgacagaccgcgataataatctagaaaaaatcattcttgccggtgccaatatggttcgcatgaatttttctcacggcaacgccgaagaccacatcaagcgcgccaaagatgttcgtgcgatcgctaaaaaacacaataaacacgtggctattttaggtgacttacaaggtcctaagatccgtgtatctaaattcacagacgggaagatccaattaaaccttggtgataaattctgtctagatgcagattttgataaaacggcgggtaaccaagaacgcgttagtatcgattaccctgaattatcaaaagatgtattcgcgggtgatgtactactgcttgacgatggccgcgtacaattaaaagtaatcgaaattaaaggtcaacagatccacactgaagtaacagtagcgggcccattatcaaacaataaaggtatcaacaagcaaggcggagggttatctgccgaagcgctgaccgacaaagataaagcagacattcttactgcggctaaaattgacgtcgactttatcgccgtctctttcccacgtaacggcagtgatatcaattatgcccgtgaacttgttcgagcggcgggctctaatgctaaaatttgtgccaaagtagagcgtgcagagacggtagcgacagaagaaagcatggtagatatcatcctagcatctgatgccattatggtcgcacgtggcgatctaggcgttgagattggcgatgcagcacttgtgggtgtacaaaaatctctcatcaacttatcgcgtaaatataaccgtgttgtgatcactgcaacacaaatgatggaatcaatgatcaccagcccaatgccgacacgtgcagaagtgatggacgtagcgaatgcggtgcttgatggtacagatgctgtcatgctatctgcagagactgcggcgggagatttcccagtcgaaacagtgaaagccatggcagaagtatgtttaggcgcagaaacacacccaagcatcaatgtatcaaaccaccgtattgaatatacattcgattcaattgaagaaacaattgccatgtcgactatgtatgcagcgaatcacctaaaaggtgtaaaagcgattgtggcattaagtgaatccggtactacgccattattgatgtcacgcatcagttcggggttacctatcttctgcttgtctccacatcagaaaacattgaatgcgacagcgctttaccgtggtgtaacacccttacagttttgcactgaaggtttatcgcaggagcagatcgtcgaaggtacttacgcagtactgaaagaaacgggccaagttaaagccggcgacatcatcttactcacgttaggtgataaaatggatacagttggttcaacaaacacctgtaagatcctaacaatcaaataa

SEQ ID NO: 26735 - protein, 478 aa, Moritella sp. PE36
MLRRTKIVTTLGPATDRDNNLEKIILAGANMVRMNFSHGNAEDHIKRAKDVRAIAKKHNKHVAILGDLQGPKIRVSKFTDGKIQLNLGDKFCLDADFDKTAGNQERVSIDYPELSKDVFAGDVLLLDDGRVQLKVIEIKGQQIHTEVTVAGPLSNNKGINKQGGGLSAEALTDKDKADILTAAKIDVDFIAVSFPRNGSDINYARELVRAAGSNAKICAKVERAETVATEESMVDIILASDAIMVARGDLGVEIGDAALVGVQKSLINLSRKYNRVVITATQMMESMITSPMPTRAEVMDVANAVLDGTDAVMLSAETAAGDFPVETVKAMAEVCLGAETHPSINVSNHRIEYTFDSIEETIAMSTMYAANHLKGVKAIVALSESGTTPLLMSRISSGLPIFCLSPHQKTLNATALYRGVTPLQFCTEGLSQEQIVEGTYAVLKETGQVKAGDIILLTLGDKMDTVGSTNTCKILTIK

SEQ ID NO: 26736 - DNA, 1464 bp, Riemerella anatipestifer; identical to SEQ ID NO: 8673
  CDS (1)..(1464): transl_table=11

SEQ ID NO: 26737 - protein, 487 aa, Riemerella anatipestifer; identical to SEQ ID NO: 8674

SEQ ID NO: 26738 - DNA, 1446 bp, Magnetospirillum gryphiswaldense; identical to SEQ ID NO: 8679
  CDS (1)..(1446): transl_table=11

SEQ ID NO: 26739 - protein, 481 aa, Magnetospirillum gryphiswaldense; identical to SEQ ID NO: 8680

SEQ ID NO: 26740 - DNA, 1503 bp, Streptococcus bovis; identical to SEQ ID NO: 15890
  CDS (1)..(1503): transl_table=11

SEQ ID NO: 26741 - protein, 500 aa, Streptococcus bovis; identical to SEQ ID NO: 15891

SEQ ID NO: 26742 - DNA, 1503 bp, Vitis vinifera; identical to SEQ ID NO: 15892
  CDS (1)..(1503)

SEQ ID NO: 26743 - protein, 500 aa, Vitis vinifera; identical to SEQ ID NO: 15893

SEQ ID NO: 26744 - DNA, 1866 bp, Vitis vinifera; identical to SEQ ID NO: 15896
  CDS (1)..(1866)

SEQ ID NO: 26745 - protein, 621 aa, Vitis vinifera; identical to SEQ ID NO: 15897

SEQ ID NO: 26746 - DNA, 1755 bp, Bacillus subtilis; identical to SEQ ID NO: 8681
  CDS (1)..(1755): transl_table=11

SEQ ID NO: 26747 - protein, 584 aa, Bacillus subtilis; identical to SEQ ID NO: 8682

SEQ ID NO: 26748 - DNA, 2100 bp, Ostreococcus tauri; identical to SEQ ID NO: 8685
  CDS (1)..(2100)

SEQ ID NO: 26749 - protein, 699 aa, Ostreococcus tauri; identical to SEQ ID NO: 8686

SEQ ID NO: 26750 - DNA, 1692 bp, Crassostrea gigas; identical to SEQ ID NO: 15908
  CDS (1)..(1692)

SEQ ID NO: 26751 - protein, 563 aa, Crassostrea gigas; identical to SEQ ID NO: 15909

SEQ ID NO: 26752 - DNA, 1533 bp, Arabidopsis thaliana; identical to SEQ ID NO: 8689
  CDS (1)..(1533)

SEQ ID NO: 26753 - protein, 510 aa, Arabidopsis thaliana; identical to SEQ ID NO: 8690

SEQ ID NO: 26754 - DNA, 1536 bp, Capsicum annuum; identical to SEQ ID NO: 8691
  CDS (1)..(1536)

SEQ ID NO: 26755 - protein, 511 aa, Capsicum annuum; identical to SEQ ID NO: 8692

SEQ ID NO: 26756 - DNA, 1731 bp, Medicago truncatula; identical to SEQ ID NO: 15914
  CDS (1)..(1731)

SEQ ID NO: 26757 - protein, 576 aa, Medicago truncatula; identical to SEQ ID NO: 15915

SEQ ID NO: 26758 - DNA, 1590 bp, Medicago truncatula; identical to SEQ ID NO: 15916
  CDS (1)..(1590)

SEQ ID NO: 26759 - protein, 529 aa, Medicago truncatula; identical to SEQ ID NO: 15917

SEQ ID NO: 26760 - DNA, 1437 bp, Nitrosovibrio sp; identical to SEQ ID NO: 8695
  CDS (1)..(1437): transl_table=11

SEQ ID NO: 26761 - protein, 478 aa, Nitrosovibrio sp; identical to SEQ ID NO: 8696

SEQ ID NO: 26762 - DNA, 1437 bp, Nitrosovibrio sp; identical to SEQ ID NO: 15918
  CDS (1)..(1437): transl_table=11

SEQ ID NO: 26763 - protein, 478 aa, Nitrosovibrio sp; identical to SEQ ID NO: 15919

SEQ ID NO: 26764 - DNA, 1437 bp, Nitrosovibrio sp; identical to SEQ ID NO: 16635
  CDS (1)..(1437): transl_table=11

SEQ ID NO: 26765 - protein, 478 aa, Nitrosovibrio sp; identical to SEQ ID NO: 16636

SEQ ID NO: 26766 - DNA, 1455 bp, Nitrosospira sp
  CDS (1)..(1455): transl_table=11
atgattcgaagaacaaaaattgtggcaacgctcggtccggcatccagagaccccaaggtactcgaacgaatgatcaatgccggggtggatgtggtgcggatcaatttttcgcatggcacaagagaagaacatatagaaagcgccgaattggcccgttcgctagcgcgtgccgcaggacacgccgtgggcgttctggcggacttgcaagggccgaagattcgtgtcggcagatttgaaaagggcaatattctgctcaaaattggcgataaattcatacttgacgccgaatgtgaactgggtaaccaggaacgggtgggtctggattacaaagaattgccaaatgacgtggaaacgggctcgacgcttatcctcgacgatggacgcatcgtactgggcgtttcagaggtcaaggggagcaaggtgtactgcgtggttgagcagggcggaatactgtccaataacaaggggatcaaccgcaagggcggcggactcagtgcacccgccttggccgcaaaggacgtggaagacatcaagaccgcggcagcgcttaaagcggactaccttgccgtatccttcccgcgctccggtgatgatatgcgctgggcacgagacgtgatgcgtgatgccggcggtaaaagcctgctaatggcaaagatcgagcgctccgaagcaattctggcgttggatgatattttggaagcctcggatgccatcatggttgcgcgaggtgatcttgcggtagaagtgggcgacgcagtggtaccggctttgcagaaacgaatgatccgaacggcacgcgctaacaacaagctcgtggtgaccgccacgcaaatgatggaatctatggtcaacagccctattccaacccgtgcggaagtgtccgatgtcgctaatgcggtgctggatggtaccgatgcggtaatgctgtcggcggaatccgccgcgggacagtatcccgtcgaatcggtcgcagccatggcaagagtctgcctcgaggcagaaaaagagtatctggtgagcagcgaactccgccggcttcagggcggccttccggaaacgatagaggaagcgattgcacgcgcgaccatgttcactgcggggggattgaaaattcgggccattgccgcgctcacgcagagcggtagaacggtattgttgatgtcgcgcagaagctccaacgtacctatcttcgcgctgagcccccaagaggatacccgccgtaaaatgacgttgtttcgcggcgtctatcccgttaagttcggcggcggatcgaacgatcccgagattatcctgaatcatgctgaaaacgaattgctcaagcgcggcgtcgtgcgcaacggcgatctgattatcatgactattggcgagccggtaggcaaagccggcgggaccaacacgatgaagatcgtcaaggtaggagaacacagaagacatgaacgaaaaccgggatcctga

SEQ ID NO: 26767 - protein, 484 aa, Nitrosospira sp
MIRRTKIVATLGPASRDPKVLERMINAGVDVVRINFSHGTREEHIESAELARSLARAAGHAVGVLADLQGPKIRVGRFEKGNILLKIGDKFILDAECELGNQERVGLDYKELPNDVETGSTLILDDGRIVLGVSEVKGSKVYCVVEQGGILSNNKGINRKGGGLSAPALAAKDVEDIKTAAALKADYLAVSFPRSGDDMRWARDVMRDAGGKSLLMAKIERSEAILALDDILEASDAIMVARGDLAVEVGDAVVPALQKRMIRTARANNKLVVTATQMMESMVNSPIPTRAEVSDVANAVLDGTDAVMLSAESAAGQYPVESVAAMARVCLEAEKEYLVSSELRRLQGGLPETIEEAIARATMFTAGGLKIRAIAALTQSGRTVLLMSRRSSNVPIFALSPQEDTRRKMTLFRGVYPVKFGGGSNDPEIILNHAENELLKRGVVRNGDLIIMTIGEPVGKAGGTNTMKIVKVGEHRRHERKPGS

SEQ ID NO: 26768 - DNA, 1455 bp, Nitrosospira sp
  CDS (1)..(1455): transl_table=11
atgattcgaagaacaaaaatcgtagcgacgctcggtccggcatccagagaccccaaggtactcgagcgaatgataaatgccggggtggatgtggtgcggatcaatttttcgcatggcacaagagaagagcatatagaaagcgccgaattggctcgttcgctggcacgtgccgcgggtcatgccgtgggcgttctggcggacttgcaagggccgaagattcgtgtcggcagatttgaaaagggcaatattctcctaaaaattggcgataaattcatactcgacgccgaatgtgaactgggtaaccaggaacgggtgggtctggattacaaagaactgccaaatgacgtggaaacgggctcgacgcttatcctcgacgatggccgcatcgtactgggcgtttccgaagtcaagggaagcaaggtgtactgcgtggttgagcaaggcggaatactgtccaataacaagggaatcaaccgcaagggcggcggactcagtgcacccgccttgaccgcaaaggacgtggaagatatcaggactgcggcagcgcttaaagcagactaccttgccgtatccttcccgcgctccggtgatgatatgcgctgggcacgagacgtgatgcgcgatgccggcggcaaaagcctgctaatggcaaagatcgagcgctccgaagcaattctggcgttggatgatattttggaagcctccgatgccatcatggttgcgcgaggtgatcttgcggtagaagtgggcgacgcagtggtgccggctttgcagaaacgaatgatccgcacggcacgcgccaacaacaagctcgtggtgaccgccacgcagatgatggaatccatggtcaacagccctattccaacccgtgcggaagtgtccgatgtcgctaatgcggtgctggatggtaccgatgcggtaatgctgtcggcggaatccgccgcaggacagtatcccgtcgaatcggtcgcagccatggcaagagtctgcctcgaggcagaaaaagagtatctggtgagcagcgaactccgccggcttcagggcggccttccggaaacgatagaggaagcgattgcacgtgcgaccatgttcactgcgggggggttgaaaattcgggccattgccgcgctcacgcagagcggcagaacggtattgttgatgtcgcgcagaagctccaacgtacccatcttcgcgctgagcccccaggaggatacccgccgtaaaatgacgttgtttcgtggcgtctatcctgttaagttcggcggcggatcgaacgatcccgagattatcctgaatcatgccgaaaacgaattgctcaagcgcggcgtcgtgcgcaacggcgatctgattatcatgactattggcgaaccggtaggcaaagccggcgggaccaacacaatgaagatcgtcaaggtgggagaacacagaaaacttgaacgaaaaccgggatcctga

SEQ ID NO: 26769 - protein, 484 aa, Nitrosospira sp
MIRRTKIVATLGPASRDPKVLERMINAGVDVVRINFSHGTREEHIESAELARSLARAAGHAVGVLADLQGPKIRVGRFEKGNILLKIGDKFILDAECELGNQERVGLDYKELPNDVETGSTLILDDGRIVLGVSEVKGSKVYCVVEQGGILSNNKGINRKGGGLSAPALTAKDVEDIRTAAALKADYLAVSFPRSGDDMRWARDVMRDAGGKSLLMAKIERSEAILALDDILEASDAIMVARGDLAVEVGDAVVPALQKRMIRTARANNKLVVTATQMMESMVNSPIPTRAEVSDVANAVLDGTDAVMLSAESAAGQYPVESVAAMARVCLEAEKEYLVSSELRRLQGGLPETIEEAIARATMFTAGGLKIRAIAALTQSGRTVLLMSRRSSNVPIFALSPQEDTRRKMTLFRGVYPVKFGGGSNDPEIILNHAENELLKRGVVRNGDLIIMTIGEPVGKAGGTNTMKIVKVGEHRKLERKPGS

SEQ ID NO: 26770 - DNA, 1455 bp, Nitrosospira sp
  CDS (1)..(1455): transl_table=11
atgattcgaagaacaaaaatcgtagcaacactcggtcccgcatcccgagatgcaaaggtactggagcggatgataaacgcgggtgttgatgtagtccgtatcaacttttcccatgggaccagggaagagcatatcgaaggcgccgagttggcgcgctccctggcacgcgccgcgggtcacgcagtgggtgtactggcggacctgcaggggcccaagattcgaatcggcaaatttgaaaataataaaattctgctgaaaacgggcgatcaattcatactcgacgccgaatgcgagcttggaaaccaggaacgggtgggcctggattacaaggaattgcccaccgatgtcgaaaccggcgcaacgctgatcctggatgctggacgtatcgtgctcggcgtttccgaagtcaagggaagccaggtttattgcgtggtcgagcagggtggaatactgtccaacaacaagggaatcaaccgcaaaggcggcggtctgagtgcgcctgccctcaccgccaaggatgtggaagatatccggacggccgcagcgcttaaagccgattatctggcggtatcatttccccgttctggcgatgatatgcgctgggcgcgcgatgtgatgcgcgaggcgggcgggaaaagtttattgatggcgaagatcgaacgatcggaagccatcctggcgctggacgacattctggaggcctccgatgcgatcatggttgcgcgcggagaccttgcggtagaggtaggcgatgcagtggtgccggcgttgcaaaaacggatgatccgcactgctcgaaccaggaacaagctggtggtaaccgccacccagatgatggagtccatggtcagcagtcccattcccacccgcgcggaggtatcggatgtagcaaatgcggtactggacggcactgatgcggtgatgctgtcagcggaatccgccaccgggcaatatcccgttgaagcggttgcggcaatggcgagagtatgcctggaggcggaaaaggaatacctggtaagcagtgaaaaccgtcggctgcaggggggcctgcccgataatatcgaggaagcggttgctcgtgcgaccatgttcaccgcagggggattaaagatcagagccattgcggcgcttacgcaaagcggcaggaccgtgttgctgatgtcgcgcaggagttccaccgtgcccatattcgcgttgagcccgcaggaggatacacagcgcaagatgacgttatttcgcggtgtgtatccggtcaagttcggcggaggttcgaacgaccccgagattatcctgaatcacgccgaaaacgagttgctcaggcggggggcggtgcgtaacggcgacctgatcatcatgaccatcggtgaaccggtaggcaaggcaggcgggaccaataccatgaaaatagtgaaggtcggcgagcacaggaagcaggaacggaaggtggaatcctga

SEQ ID NO: 26771 - protein, 484 aa, Nitrosospira sp
MIRRTKIVATLGPASRDAKVLERMINAGVDVVRINFSHGTREEHIEGAELARSLARAAGHAVGVLADLQGPKIRIGKFENNKILLKTGDQFILDAECELGNQERVGLDYKELPTDVETGATLILDAGRIVLGVSEVKGSQVYCVVEQGGILSNNKGINRKGGGLSAPALTAKDVEDIRTAAALKADYLAVSFPRSGDDMRWARDVMREAGGKSLLMAKIERSEAILALDDILEASDAIMVARGDLAVEVGDAVVPALQKRMIRTARTRNKLVVTATQMMESMVSSPIPTRAEVSDVANAVLDGTDAVMLSAESATGQYPVEAVAAMARVCLEAEKEYLVSSENRRLQGGLPDNIEEAVARATMFTAGGLKIRAIAALTQSGRTVLLMSRRSSTVPIFALSPQEDTQRKMTLFRGVYPVKFGGGSNDPEIILNHAENELLRRGAVRNGDLIIMTIGEPVGKAGGTNTMKIVKVGEHRKQERKVES

SEQ ID NO: 26772 - DNA, 1620 bp, Phaeodactylum tricornutum; identical to SEQ ID NO: 8699
  CDS (1)..(1620)

SEQ ID NO: 26773 - protein, 539 aa, Phaeodactylum tricornutum; identical to SEQ ID NO: 8700

SEQ ID NO: 26774 - DNA, 1632 bp, Phaeodactylum tricornutum; identical to SEQ ID NO: 8701
  CDS (1)..(1632)

SEQ ID NO: 26775 - protein, 543 aa, Phaeodactylum tricornutum; identical to SEQ ID NO: 8702

SEQ ID NO: 26776 - DNA, 1542 bp, Phaeodactylum tricornutum; identical to SEQ ID NO: 8703
  CDS (1)..(1542)

SEQ ID NO: 26777 - protein, 513 aa, Phaeodactylum tricornutum; identical to SEQ ID NO: 8704

SEQ ID NO: 26778 - DNA, 1998 bp, Phaeodactylum tricornutum; identical to SEQ ID NO: 8705
  CDS (1)..(1998)

SEQ ID NO: 26779 - protein, 665 aa, Phaeodactylum tricornutum; identical to SEQ ID NO: 8706

SEQ ID NO: 26780 - DNA, 1500 bp, Propionibacterium freudenreichii subsp
  CDS (1)..(1500): transl_table=11
gtgcgtagagccaagattgtgtgcacgctcgggccggcaacgtcgacccaggagcgtatggaagagatgattcacgcgggtttggatgtggcccggttcaatatgagccacggggaccattccgaacacctgcgtcgccttgaggagacgcgtgccgcggccgaggcggtcggtaagaccgtgggcctgctggcagaccttcagggccccaagatcaggttgggtgtcttcgccgacgggaaggccgagctcgcgctcggccaggagttcatcatcaccaccgatgacgtccccggcgacgcccaccgcgcgtcaaccacctacaagggactgcccgccgacgtgaaggccggcgaccgcatcctcatcgacgatggcaacatccagctggaggccaccggcgtcaccgacaccgatgtgatcaccaaggtcaccgttgccggccccgtgagcaaccacaagggcatcaacctgcccggcgttgccgtcaacgtgcccgcgctgtccgagaaggacgagaacgacctgcgctgggccttgcgcaacgacttcgacatgatcgcgctgtccttcgtgcgccatgccgccgacatcgaccgcgtccacgagatcatggacgaggaggacatgcacctgccggtgatcgccaagctcgagaagccgcaggccatcgagaacctcgacgagatcatcgacgcctttgacggcttcatggttgcccgcggcgacctgggtgtcgagatgcccctcgagcaggtgccgctggtgcagaagaccatcatccgcaaggcccgcaagtgggccaagccggtgatcgtggccacccagatgctggattcgatgatcagcaatccgcgcccgacccgcgccgaggcctccgatgtggccaatgccgtgctcgacggtgccgatgccgtgatgctgtccggcgagacctcggtgggtgccttcccggtgaccaccgtggagacgatggccaatatcgtctccaccaccgagggcgagggcctcaccgacatctcgaagatcaagtgggatccccacaccaccggcggcgtcattgccatggctgccgccacctcgggtgtgcagctgggagccaagttcctggtggccttcacccagtcgggtgataccgcacgccgcatgtcgcggctgcgcaatgacattccgctgctggtcttcacccccgaggcgaagaccgcccagtggctgacgctgtgttggggcgcccaggtgttccacacccccagttactccagcaacgaggaaatggtcaccgccgtcaaccgcaccctgcaggacctcggtctggcggcacccgacgacgtcgtggtgatcatcttcggttccccgatcggcatggtcggcaagaccaacaccatgcgcatccaccggctgaagccgatcgactgggtcgagaaggtcaagctgccgagctatatgcgcggcgaggatggtcccgtcgatggcaccgtggtggccaacgacaggcgctga

SEQ ID NO: 26781 - protein, 499 aa, Propionibacterium freudenreichii subsp
MRRAKIVCTLGPATSTQERMEEMIHAGLDVARFNMSHGDHSEHLRRLEETRAAAEAVGKTVGLLADLQGPKIRLGVFADGKAELALGQEFIITTDDVPGDAHRASTTYKGLPADVKAGDRILIDDGNIQLEATGVTDTDVITKVTVAGPVSNHKGINLPGVAVNVPALSEKDENDLRWALRNDFDMIALSFVRHAADIDRVHEIMDEEDMHLPVIAKLEKPQAIENLDEIIDAFDGFMVARGDLGVEMPLEQVPLVQKTIIRKARKWAKPVIVATQMLDSMISNPRPTRAEASDVANAVLDGADAVMLSGETSVGAFPVTTVETMANIVSTTEGEGLTDISKIKWDPHTTGGVIAMAAATSGVQLGAKFLVAFTQSGDTARRMSRLRNDIPLLVFTPEAKTAQWLTLCWGAQVFHTPSYSSNEEMVTAVNRTLQDLGLAAPDDVVVIIFGSPIGMVGKTNTMRIHRLKPIDWVEKVKLPSYMRGEDGPVDGTVVANDRR

SEQ ID NO: 26782 - DNA, 1533 bp, Solanum tuberosum; identical to SEQ ID NO: 8707
  CDS (1)..(1533)

SEQ ID NO: 26783 - protein, 510 aa, Solanum tuberosum; identical to SEQ ID NO: 8708

SEQ ID NO: 26784 - DNA, 1533 bp, Citrus sinensis; identical to SEQ ID NO: 8709
  CDS (1)..(1533)

SEQ ID NO: 26785 - protein, 510 aa, Citrus sinensis; identical to SEQ ID NO: 8710

SEQ ID NO: 26786 - DNA, 1740 bp, Arabidopsis thaliana; identical to SEQ ID NO: 8711
  CDS (1)..(1740)

SEQ ID NO: 26787 - protein, 579 aa, Arabidopsis thaliana; identical to SEQ ID NO: 8712

SEQ ID NO: 26788 - DNA, 1509 bp, Glycine max; identical to SEQ ID NO: 8713
  CDS (1)..(1509)

SEQ ID NO: 26789 - protein, 502 aa, Glycine max; identical to SEQ ID NO: 8714

SEQ ID NO: 26790 - DNA, 1530 bp, Zea mays; identical to SEQ ID NO: 8715
  CDS (1)..(1530)

SEQ ID NO: 26791 - protein, 509 aa, Zea mays; identical to SEQ ID NO: 8716

SEQ ID NO: 26792 - DNA, 1767 bp, Lactobacillus casei; identical to SEQ ID NO: 15934
  CDS (1)..(1767): transl_table=11

SEQ ID NO: 26793 - protein, 588 aa, Lactobacillus casei; identical to SEQ ID NO: 8718

SEQ ID NO: 26794 - DNA, 1425 bp, Microbispora rosea subsp; identical to SEQ ID NO: 16659
  CDS (1)..(1425): transl_table=11

SEQ ID NO: 26795 - protein, 474 aa, Microbispora rosea subsp; identical to SEQ ID NO: 16660

SEQ ID NO: 26796 - DNA, 1521 bp, Saccharomyces bayanus; identical to SEQ ID NO: 8719
  CDS (1)..(1521)

SEQ ID NO: 26797 - protein, 506 aa, Saccharomyces bayanus; identical to SEQ ID NO: 8720

SEQ ID NO: 26798 - DNA, 1434 bp, Stigmatella aurantiaca; identical to SEQ ID NO: 15938
  CDS (1)..(1434): transl_table=11

SEQ ID NO: 26799 - protein, 477 aa, Stigmatella aurantiaca; identical to SEQ ID NO: 15939

SEQ ID NO: 26800 - DNA, 1584 bp, Arabidopsis thaliana; identical to SEQ ID NO: 8721
  CDS (1)..(1584)

SEQ ID NO: 26801 - protein, 527 aa, Arabidopsis thaliana; identical to SEQ ID NO: 8722

SEQ ID NO: 26802 - DNA, 1533 bp, Glycine max; identical to SEQ ID NO: 8723
  CDS (1)..(1533)

SEQ ID NO: 26803 - protein, 510 aa, Glycine max; identical to SEQ ID NO: 8724

SEQ ID NO: 26804 - DNA, 1536 bp, Glycine max; identical to SEQ ID NO: 8725
  CDS (1)..(1536)

SEQ ID NO: 26805 - protein, 511 aa, Glycine max; identical to SEQ ID NO: 8726

SEQ ID NO: 26806 - DNA, 1791 bp, Arabidopsis thaliana; identical to SEQ ID NO: 8727
  CDS (1)..(1791)

SEQ ID NO: 26807 - protein, 596 aa, Arabidopsis thaliana; identical to SEQ ID NO: 8728

SEQ ID NO: 26808 - DNA, 1584 bp, Arabidopsis thaliana; identical to SEQ ID NO: 8729
  CDS (1)..(1584)

SEQ ID NO: 26809 - protein, 527 aa, Arabidopsis thaliana; identical to SEQ ID NO: 8730

SEQ ID NO: 26810 - DNA, 1665 bp, Drosophila melanogaster; identical to SEQ ID NO: 15948
  CDS (1)..(1665)

SEQ ID NO: 26811 - protein, 554 aa, Drosophila melanogaster; identical to SEQ ID NO: 15949

SEQ ID NO: 26812 - DNA, 1740 bp, Arabidopsis thaliana; identical to SEQ ID NO: 8731
  CDS (1)..(1740)

SEQ ID NO: 26813 - protein, 579 aa, Arabidopsis thaliana; identical to SEQ ID NO: 8732

SEQ ID NO: 26814 - DNA, 1581 bp, Aspergillus oryzae; identical to SEQ ID NO: 8733
  CDS (1)..(1581)

SEQ ID NO: 26815 - protein, 526 aa, Aspergillus oryzae; identical to SEQ ID NO: 8734

SEQ ID NO: 26816 - DNA, 1422 bp, Pseudomonas hydrogenothermophila; identical to SEQ ID NO: 16683
  CDS (1)..(1422): transl_table=11

SEQ ID NO: 26817 - protein, 473 aa, Pseudomonas hydrogenothermophila; identical to SEQ ID NO: 8736

SEQ ID NO: 26818 - DNA, 1704 bp, Arabidopsis thaliana; identical to SEQ ID NO: 8741
  CDS (1)..(1704)

SEQ ID NO: 26819 - protein, 567 aa, Arabidopsis thaliana; identical to SEQ ID NO: 8742

SEQ ID NO: 26820 - DNA, 1533 bp, Lilium longiflorum; identical to SEQ ID NO: 8743
  CDS (1)..(1533)

SEQ ID NO: 26821 - protein, 510 aa, Lilium longiflorum; identical to SEQ ID NO: 8744

SEQ ID NO: 26822 - DNA, 1752 bp, Ricinus communis; identical to SEQ ID NO: 8747
  CDS (1)..(1752)

SEQ ID NO: 26823 - protein, 583 aa, Ricinus communis; identical to SEQ ID NO: 8748

SEQ ID NO: 26824 - DNA, 1782 bp, Nicotiana tabacum; identical to SEQ ID NO: 8749
  CDS (1)..(1782)

SEQ ID NO: 26825 - protein, 593 aa, Nicotiana tabacum; identical to SEQ ID NO: 8750

SEQ ID NO: 26826 - DNA, 1494 bp, Arabidopsis thaliana; identical to SEQ ID NO: 8751
  CDS (1)..(1494)

SEQ ID NO: 26827 - protein, 497 aa, Arabidopsis thaliana; identical to SEQ ID NO: 8752

SEQ ID NO: 26828 - DNA, 1533 bp, Solanum tuberosum; identical to SEQ ID NO: 8753
  CDS (1)..(1533)

SEQ ID NO: 26829 - protein, 510 aa, Solanum tuberosum; identical to SEQ ID NO: 8754

SEQ ID NO: 26830 - DNA, 1536 bp, Glycine max; identical to SEQ ID NO: 8755
  CDS (1)..(1536)

SEQ ID NO: 26831 - protein, 511 aa, Glycine max; identical to SEQ ID NO: 8756

SEQ ID NO: 26832 - DNA, 1527 bp, Nicotiana tabacum; identical to SEQ ID NO: 15976
  CDS (1)..(1527)

SEQ ID NO: 26833 - protein, 508 aa, Nicotiana tabacum; identical to SEQ ID NO: 8758

SEQ ID NO: 26834 - DNA, 1689 bp, Nicotiana tabacum; identical to SEQ ID NO: 8759
  CDS (1)..(1689)

SEQ ID NO: 26835 - protein, 562 aa, Nicotiana tabacum; identical to SEQ ID NO: 8760

SEQ ID NO: 26836 - DNA, 1506 bp, Candida glabrata; identical to SEQ ID NO: 8763
  CDS (1)..(1506)

SEQ ID NO: 26837 - protein, 501 aa, Candida glabrata; identical to SEQ ID NO: 8764

SEQ ID NO: 26838 - DNA, 1413 bp, Escherichia coli O157; identical to SEQ ID NO: 8765
  CDS (1)..(1413): transl_table=11

SEQ ID NO: 26839 - protein, 470 aa, Escherichia coli O157; identical to SEQ ID NO: 8766

SEQ ID NO: 26840 - DNA, 1413 bp, Salmonella typhimurium; identical to SEQ ID NO: 8767
  CDS (1)..(1413): transl_table=11

SEQ ID NO: 26841 - protein, 470 aa, Salmonella typhimurium; identical to SEQ ID NO: 8768

SEQ ID NO: 26842 - DNA, 1503 bp, Saccharomyces cerevisiae; identical to SEQ ID NO: 8769
  CDS (1)..(1503)

SEQ ID NO: 26843 - protein, 500 aa, Saccharomyces cerevisiae; identical to SEQ ID NO: 8770

SEQ ID NO: 26844 - DNA, 1449 bp, Agrobacterium vitis; identical to SEQ ID NO: 15990
  CDS (1)..(1449): transl_table=11

SEQ ID NO: 26845 - protein, 482 aa, Agrobacterium vitis; identical to SEQ ID NO: 15991

SEQ ID NO: 26846 - DNA, 1527 bp, Candida glabrata; identical to SEQ ID NO: 8771
  CDS (1)..(1527)

SEQ ID NO: 26847 - protein, 508 aa, Candida glabrata; identical to SEQ ID NO: 8772

SEQ ID NO: 26848 - DNA, 1443 bp, Escherichia coli; identical to SEQ ID NO: 8363
  CDS (1)..(1443): transl_table=11

SEQ ID NO: 26849 - protein, 480 aa, Escherichia coli; identical to SEQ ID NO: 8364

SEQ ID NO: 26850 - DNA, 1443 bp, Salmonella typhimurium; identical to SEQ ID NO: 8773
  CDS (1)..(1443): transl_table=11

SEQ ID NO: 26851 - protein, 480 aa, Salmonella typhimurium; identical to SEQ ID NO: 8774

SEQ ID NO: 26852 - DNA, 1521 bp, Saccharomyces cerevisiae; identical to SEQ ID NO: 8775
  CDS (1)..(1521)

SEQ ID NO: 26853 - protein, 506 aa, Saccharomyces cerevisiae; identical to SEQ ID NO: 8776

SEQ ID NO: 26854 - DNA, 1599 bp, Agaricus bisporus; identical to SEQ ID NO: 16002
  CDS (1)..(1599)

SEQ ID NO: 26855 - protein, 532 aa, Agaricus bisporus; identical to SEQ ID NO: 16003

SEQ ID NO: 26856 - DNA, 1506 bp, Ashbya gossypii; identical to SEQ ID NO: 8777
  CDS (1)..(1506)

SEQ ID NO: 26857 - protein, 501 aa, Ashbya gossypii; identical to SEQ ID NO: 8778

SEQ ID NO: 26858 - DNA, 1581 bp, Aspergillus niger; identical to SEQ ID NO: 8779
  CDS (1)..(1581)

SEQ ID NO: 26859 - protein, 526 aa, Aspergillus niger; identical to SEQ ID NO: 8780

SEQ ID NO: 26860 - DNA, 1758 bp, Bacillus licheniformis; identical to SEQ ID NO: 8781
  CDS (1)..(1758): transl_table=11

SEQ ID NO: 26861 - protein, 585 aa, Bacillus licheniformis; identical to SEQ ID NO: 8782

SEQ ID NO: 26862 - DNA, 1761 bp, Bacillus psychrophilus; identical to SEQ ID NO: 16010
  CDS (1)..(1761): transl_table=11

SEQ ID NO: 26863 - protein, 586 aa, Bacillus psychrophilus; identical to SEQ ID NO: 8784

SEQ ID NO: 26864 - DNA, 1764 bp, Bacillus stearothermophilus; identical to SEQ ID NO: 8785
  CDS (1)..(1764): transl_table=11

SEQ ID NO: 26865 - protein, 587 aa, Bacillus stearothermophilus; identical to SEQ ID NO: 8786

SEQ ID NO: 26866 - DNA, 1758 bp, Bacillus subtilis; identical to SEQ ID NO: 8787
  CDS (1)..(1758): transl_table=11

SEQ ID NO: 26867 - protein, 585 aa, Bacillus subtilis; identical to SEQ ID NO: 8788

SEQ ID NO: 26868 - DNA, 1443 bp, Buchnera aphidicola subsp; identical to SEQ ID NO: 16016
  CDS (1)..(1443): transl_table=11

SEQ ID NO: 26869 - protein, 480 aa, Buchnera aphidicola subsp; identical to SEQ ID NO: 16017

SEQ ID NO: 26870 - DNA, 1440 bp, Buchnera aphidicola subsp
  CDS (1)..(1440): transl_table=11
atgatacgtcgttttagacgaacaaaaattgttgctacattaggtccgtcaactgataatcatattattttagagaatatgattaaatctggtgttaatgtttttcgtttaaacttttcacatggaacacgagaagaacatatttatagagcaaaactcgtaacaagtattgcaaaaagattaaattgtcacattgctcttttaggtgatttacaaggtcctaaaattcgaatttgtaaatttcaagataaaaaagtttttttaaaagtaaataattatttcatattagacgctaatttaaatgaaaatttagggacatcggaaagagttggaatagattataagaatttacctaaagacgtaaaaaaatgtgatattctcttattagatgatggaaaaatacaattaaaggttattaatatagtagatcaagaaatatttactaaaataattataggtggtgtgttatctaataataagggaattaacaaattaggaggaggtttatcagcaaggattttaactaaaaaagataaaagagatattatcacttcgattgatattggggtagattatttagctgtttcatttccgagatatggaagtgatttagatcatgcacgtaagtgtgcagtaaaatttggtagtaaagcaaaaataattgctaaaatagaaagagctgaagcagtcaaagatttaaaaataattgatgaaataatattagcatctgatgcaataatggtagcacgaggagatttaggtgtagaaataggagaatctgaattagctggaatacaaaaaacattgataaggcgagcacgccaattaaatcgagtagttataactgctacacaaatgatggaatctatgatcaataatcctatgccaactcgtgctgaagtcatggatgttgctaatgctgtattagatggtagtgatgctgttatgttatcagcggaaactgcgtcaggaaaatatcctattgagactattaaagttatgtctaaagtttgtatgggggcagaaaaaatgcctagcatcaatgtttctcagcataggattcatgacaaatttcatgatattgaagaagctattgctatgtctgcaatgtatgctgcaaatcatttaagtggtattactgctattattactatgactgaatctggcaaaacatctttaatgacttctagaattacttctggtttaccaattttcgcgttatcttcacatatacaaacgctgaaattaactgcgttatatcgaggagttacgccaattttttttaatagtagcaaagaaggtgtttctgctgctaatgaagttattaacttattagtaaaaaggggttttttagaacctggaaatttagttattattactcaaggagatattatgggaaaagtaggaaaaactaatacaagtagaattttaaaagtgtga

SEQ ID NO: 26871 - protein, 479 aa, Buchnera aphidicola subsp
MIRRFRRTKIVATLGPSTDNHIILENMIKSGVNVFRLNFSHGTREEHIYRAKLVTSIAKRLNCHIALLGDLQGPKIRICKFQDKKVFLKVNNYFILDANLNENLGTSERVGIDYKNLPKDVKKCDILLLDDGKIQLKVINIVDQEIFTKIIIGGVLSNNKGINKLGGGLSARILTKKDKRDIITSIDIGVDYLAVSFPRYGSDLDHARKCAVKFGSKAKIIAKIERAEAVKDLKIIDEIILASDAIMVARGDLGVEIGESELAGIQKTLIRRARQLNRVVITATQMMESMINNPMPTRAEVMDVANAVLDGSDAVMLSAETASGKYPIETIKVMSKVCMGAEKMPSINVSQHRIHDKFHDIEEAIAMSAMYAANHLSGITAIITMTESGKTSLMTSRITSGLPIFALSSHIQTLKLTALYRGVTPIFFNSSKEGVSAANEVINLLVKRGFLEPGNLVIITQGDIMGKVGKTNTSRILKV

SEQ ID NO: 26872 - DNA, 1428 bp, Corynebacterium glutamicum; identical to SEQ ID NO: 16020
  CDS (1)..(1428): transl_table=11

SEQ ID NO: 26873 - protein, 475 aa, Corynebacterium glutamicum; identical to SEQ ID NO: 16021

SEQ ID NO: 26874 - DNA, 1515 bp, Debaryomyces hansenii; identical to SEQ ID NO: 8793
  CDS (1)..(1515)

SEQ ID NO: 26875 - protein, 504 aa, Debaryomyces hansenii; identical to SEQ ID NO: 8794

SEQ ID NO: 26876 - DNA, 1602 bp, Drosophila melanogaster; identical to SEQ ID NO: 16024
  CDS (1)..(1602)

SEQ ID NO: 26877 - protein, 533 aa, Drosophila melanogaster; identical to SEQ ID NO: 16025

SEQ ID NO: 26878 - DNA, 1581 bp, Emericella nidulans; identical to SEQ ID NO: 8795
  CDS (1)..(1581)

SEQ ID NO: 26879 - protein, 526 aa, Emericella nidulans; identical to SEQ ID NO: 8796

SEQ ID NO: 26880 - DNA, 1437 bp, Haemophilus influenzae; identical to SEQ ID NO: 8373
  CDS (1)..(1437): transl_table=11

SEQ ID NO: 26881 - protein, 478 aa, Haemophilus influenzae; identical to SEQ ID NO: 8374

SEQ ID NO: 26882 - DNA, 1506 bp, Kluyveromyces lactis; identical to SEQ ID NO: 8797
  CDS (1)..(1506)

SEQ ID NO: 26883 - protein, 501 aa, Kluyveromyces lactis; identical to SEQ ID NO: 8798

SEQ ID NO: 26884 - DNA, 1452 bp, Methylobacterium extorquens; identical to SEQ ID NO: 16032
  CDS (1)..(1452): transl_table=11

SEQ ID NO: 26885 - protein, 483 aa, Methylobacterium extorquens; identical to SEQ ID NO: 16033

SEQ ID NO: 26886 - DNA, 1506 bp, Saccharomyces castellii; identical to SEQ ID NO: 8801
  CDS (1)..(1506)

SEQ ID NO: 26887 - protein, 501 aa, Saccharomyces castellii; identical to SEQ ID NO: 8802

SEQ ID NO: 26888 - DNA, 1506 bp, Saccharomyces kluyveri; identical to SEQ ID NO: 8803
  CDS (1)..(1506)

SEQ ID NO: 26889 - protein, 501 aa, Saccharomyces kluyveri; identical to SEQ ID NO: 8804

SEQ ID NO: 26890 - DNA, 1530 bp, Schizosaccharomyces pombe; identical to SEQ ID NO: 8805
  CDS (1)..(1530)

SEQ ID NO: 26891 - protein, 509 aa, Schizosaccharomyces pombe; identical to SEQ ID NO: 8806

SEQ ID NO: 26892 - DNA, 1758 bp, Staphylococcus aureus; identical to SEQ ID NO: 8517
  CDS (1)..(1758): transl_table=11

SEQ ID NO: 26893 - protein, 585 aa, Staphylococcus aureus; identical to SEQ ID NO: 8518

SEQ ID NO: 26894 - DNA, 1617 bp, Trichoderma reesei; identical to SEQ ID NO: 8807
  CDS (1)..(1617)

SEQ ID NO: 26895 - protein, 538 aa, Trichoderma reesei; identical to SEQ ID NO: 8808

SEQ ID NO: 26896 - DNA, 1533 bp, Oryza sativa; identical to SEQ ID NO: 8809
  CDS (1)..(1533)

SEQ ID NO: 26897 - protein, 510 aa, Oryza sativa; identical to SEQ ID NO: 8810

SEQ ID NO: 26898 - DNA, 1752 bp, Oryza sativa; identical to SEQ ID NO: 8811
  CDS (1)..(1752)

SEQ ID NO: 26899 - protein, 583 aa, Oryza sativa; identical to SEQ ID NO: 8812

SEQ ID NO: 26900 - DNA, 1647 bp, Oryza sativa; identical to SEQ ID NO: 8379
  CDS (1)..(1647)

SEQ ID NO: 26901 - protein, 548 aa, Oryza sativa; identical to SEQ ID NO: 8380

SEQ ID NO: 26902 - DNA, 1536 bp, Oryza sativa; identical to SEQ ID NO: 8381
  CDS (1)..(1536)

SEQ ID NO: 26903 - protein, 511 aa, Oryza sativa; identical to SEQ ID NO: 8382

SEQ ID NO: 26904 - DNA, 1737 bp, Oryza sativa; identical to SEQ ID NO: 16058
  CDS (1)..(1737)

SEQ ID NO: 26905 - protein, 578 aa, Oryza sativa; identical to SEQ ID NO: 16059

SEQ ID NO: 26906 - DNA, 1713 bp, Oryza sativa; identical to SEQ ID NO: 8383
  CDS (1)..(1713)

SEQ ID NO: 26907 - protein, 570 aa, Oryza sativa; identical to SEQ ID NO: 8384

SEQ ID NO: 26908 - DNA, 1584 bp, Oryza sativa; identical to SEQ ID NO: 8813
  CDS (1)..(1584)

SEQ ID NO: 26909 - protein, 527 aa, Oryza sativa; identical to SEQ ID NO: 8814

SEQ ID NO: 26910 - DNA, 1584 bp, Oryza sativa; identical to SEQ ID NO: 16068
  CDS (1)..(1584)

SEQ ID NO: 26911 - protein, 527 aa, Oryza sativa; identical to SEQ ID NO: 16069

SEQ ID NO: 26912 - DNA, 1533 bp, Brassica napus; identical to SEQ ID NO: 8815
  CDS (1)..(1533)

SEQ ID NO: 26913 - protein, 510 aa, Brassica napus; identical to SEQ ID NO: 8816

SEQ ID NO: 26914 - DNA, 1716 bp, Brassica napus; identical to SEQ ID NO: 8817
  CDS (1)..(1716)

SEQ ID NO: 26915 - protein, 571 aa, Brassica napus; identical to SEQ ID NO: 8818

SEQ ID NO: 26916 - DNA, 1584 bp, Brassica napus; identical to SEQ ID NO: 8819
  CDS (1)..(1584)

SEQ ID NO: 26917 - protein, 527 aa, Brassica napus; identical to SEQ ID NO: 8820

SEQ ID NO: 26918 - DNA, 1584 bp, Brassica napus; identical to SEQ ID NO: 8823
  CDS (1)..(1584)

SEQ ID NO: 26919 - protein, 527 aa, Brassica napus; identical to SEQ ID NO: 8824

SEQ ID NO: 26920 - DNA, 1581 bp, Glycine max; identical to SEQ ID NO: 16795
  CDS (1)..(1581)

SEQ ID NO: 26921 - protein, 526 aa, Glycine max; identical to SEQ ID NO: 15541

SEQ ID NO: 26922 - DNA, 1509 bp, Glycine max; identical to SEQ ID NO: 8879
  CDS (1)..(1509)

SEQ ID NO: 26923 - protein, 502 aa, Glycine max; identical to SEQ ID NO: 8880

SEQ ID NO: 26924 - DNA, 1581 bp, Glycine max; identical to SEQ ID NO: 8825
  CDS (1)..(1581)

SEQ ID NO: 26925 - protein, 526 aa, Glycine max; identical to SEQ ID NO: 8826

SEQ ID NO: 26926 - DNA, 1545 bp, Triticum aestivum; identical to SEQ ID NO: 8827
  CDS (1)..(1545)

SEQ ID NO: 26927 - protein, 514 aa, Triticum aestivum; identical to SEQ ID NO: 8828

SEQ ID NO: 26928 - DNA, 1584 bp, Triticum aestivum; identical to SEQ ID NO: 8829
  CDS (1)..(1584)

SEQ ID NO: 26929 - protein, 527 aa, Triticum aestivum; identical to SEQ ID NO: 8830

SEQ ID NO: 26930 - DNA, 1497 bp, Helianthus annuus; identical to SEQ ID NO: 8833
  CDS (1)..(1497)

SEQ ID NO: 26931 - protein, 498 aa, Helianthus annuus; identical to SEQ ID NO: 8834

SEQ ID NO: 26932 - DNA, 1584 bp, Brassica napus; identical to SEQ ID NO: 8835
  CDS (1)..(1584)

SEQ ID NO: 26933 - protein, 527 aa, Brassica napus; identical to SEQ ID NO: 8836

SEQ ID NO: 26934 - DNA, 1743 bp, Brassica napus; identical to SEQ ID NO: 8837
  CDS (1)..(1743)

SEQ ID NO: 26935 - protein, 580 aa, Brassica napus; identical to SEQ ID NO: 8838

SEQ ID NO: 26936 - DNA, 1743 bp, Brassica napus; identical to SEQ ID NO: 8839
  CDS (1)..(1743)

SEQ ID NO: 26937 - protein, 580 aa, Brassica napus; identical to SEQ ID NO: 8840

SEQ ID NO: 26938 - DNA, 1764 bp, Brassica napus; identical to SEQ ID NO: 8841
  CDS (1)..(1764)

SEQ ID NO: 26939 - protein, 587 aa, Brassica napus; identical to SEQ ID NO: 8842

SEQ ID NO: 26940 - DNA, 1533 bp, Brassica napus; identical to SEQ ID NO: 8843
  CDS (1)..(1533)

SEQ ID NO: 26941 - protein, 510 aa, Brassica napus; identical to SEQ ID NO: 8844

SEQ ID NO: 26942 - DNA, 1497 bp, Brassica napus; identical to SEQ ID NO: 8845
  CDS (1)..(1497)

SEQ ID NO: 26943 - protein, 498 aa, Brassica napus; identical to SEQ ID NO: 8846

SEQ ID NO: 26944 - DNA, 1584 bp, Brassica napus; identical to SEQ ID NO: 8847
  CDS (1)..(1584)

SEQ ID NO: 26945 - protein, 527 aa, Brassica napus; identical to SEQ ID NO: 8848

SEQ ID NO: 26946 - DNA, 1533 bp, Brassica napus; identical to SEQ ID NO: 8849
  CDS (1)..(1533)

SEQ ID NO: 26947 - protein, 510 aa, Brassica napus; identical to SEQ ID NO: 8850

SEQ ID NO: 26948 - DNA, 1584 bp, Brassica napus; identical to SEQ ID NO: 21831
  CDS (1)..(1584)

SEQ ID NO: 26949 - protein, 527 aa, Brassica napus; identical to SEQ ID NO: 8822

SEQ ID NO: 26950 - DNA, 1584 bp, Brassica napus; identical to SEQ ID NO: 8851
  CDS (1)..(1584)

SEQ ID NO: 26951 - protein, 527 aa, Brassica napus; identical to SEQ ID NO: 8852

SEQ ID NO: 26952 - DNA, 1497 bp, Brassica napus; identical to SEQ ID NO: 8853
  CDS (1)..(1497)

SEQ ID NO: 26953 - protein, 498 aa, Brassica napus; identical to SEQ ID NO: 8854

SEQ ID NO: 26954 - DNA, 1497 bp, Brassica napus; identical to SEQ ID NO: 8855
  CDS (1)..(1497)

SEQ ID NO: 26955 - protein, 498 aa, Brassica napus; identical to SEQ ID NO: 8856

SEQ ID NO: 26956 - DNA, 1584 bp, Zea mays; identical to SEQ ID NO: 8857
  CDS (1)..(1584)

SEQ ID NO: 26957 - protein, 527 aa, Zea mays; identical to SEQ ID NO: 8858

SEQ ID NO: 26958 - DNA, 1728 bp, Glycine max; identical to SEQ ID NO: 8859
  CDS (1)..(1728)

SEQ ID NO: 26959 - protein, 575 aa, Glycine max; identical to SEQ ID NO: 8860

SEQ ID NO: 26960 - DNA, 1584 bp, Glycine max; identical to SEQ ID NO: 8861
  CDS (1)..(1584)

SEQ ID NO: 26961 - protein, 527 aa, Glycine max; identical to SEQ ID NO: 8862

SEQ ID NO: 26962 - DNA, 1584 bp, Glycine max; identical to SEQ ID NO: 8863
  CDS (1)..(1584)

SEQ ID NO: 26963 - protein, 527 aa, Glycine max; identical to SEQ ID NO: 8864

SEQ ID NO: 26964 - DNA, 1638 bp, Glycine max; identical to SEQ ID NO: 8865
  CDS (1)..(1638)

SEQ ID NO: 26965 - protein, 545 aa, Glycine max; identical to SEQ ID NO: 8866

SEQ ID NO: 26966 - DNA, 1638 bp, Glycine max; identical to SEQ ID NO: 8867
  CDS (1)..(1638)

SEQ ID NO: 26967 - protein, 545 aa, Glycine max; identical to SEQ ID NO: 8868

SEQ ID NO: 26968 - DNA, 1728 bp, Glycine max; identical to SEQ ID NO: 8869
  CDS (1)..(1728)

SEQ ID NO: 26969 - protein, 575 aa, Glycine max; identical to SEQ ID NO: 8870

SEQ ID NO: 26970 - DNA, 1749 bp, Glycine max; identical to SEQ ID NO: 8871
  CDS (1)..(1749)

SEQ ID NO: 26971 - protein, 582 aa, Glycine max; identical to SEQ ID NO: 8872

SEQ ID NO: 26972 - DNA, 1584 bp, Glycine max; identical to SEQ ID NO: 8873
  CDS (1)..(1584)

SEQ ID NO: 26973 - protein, 527 aa, Glycine max; identical to SEQ ID NO: 8874

SEQ ID NO: 26974 - DNA, 1749 bp, Glycine max; identical to SEQ ID NO: 8875
  CDS (1)..(1749)

SEQ ID NO: 26975 - protein, 582 aa, Glycine max; identical to SEQ ID NO: 8876

SEQ ID NO: 26976 - DNA, 1728 bp, Glycine max; identical to SEQ ID NO: 8877
  CDS (1)..(1728)

SEQ ID NO: 26977 - protein, 575 aa, Glycine max; identical to SEQ ID NO: 8878

SEQ ID NO: 26978 - DNA, 1749 bp, Glycine max; identical to SEQ ID NO: 8881
  CDS (1)..(1749)

SEQ ID NO: 26979 - protein, 582 aa, Glycine max; identical to SEQ ID NO: 8882

SEQ ID NO: 26980 - DNA, 1542 bp, Hordeum vulgare; identical to SEQ ID NO: 8883
  CDS (1)..(1542)

SEQ ID NO: 26981 - protein, 513 aa, Hordeum vulgare; identical to SEQ ID NO: 8884

SEQ ID NO: 26982 - DNA, 1584 bp, Oryza sativa; identical to SEQ ID NO: 8385
  CDS (1)..(1584)

SEQ ID NO: 26983 - protein, 527 aa, Oryza sativa; identical to SEQ ID NO: 8386

SEQ ID NO: 26984 - DNA, 1584 bp, Oryza sativa; identical to SEQ ID NO: 8885
  CDS (1)..(1584)

SEQ ID NO: 26985 - protein, 527 aa, Oryza sativa; identical to SEQ ID NO: 8886

SEQ ID NO: 26986 - DNA, 1803 bp, Zea mays; identical to SEQ ID NO: 8887
  CDS (1)..(1803)

SEQ ID NO: 26987 - protein, 600 aa, Zea mays; identical to SEQ ID NO: 8888

SEQ ID NO: 26988 - DNA, 1698 bp, Triticum aestivum; identical to SEQ ID NO: 8889
  CDS (1)..(1698)

SEQ ID NO: 26989 - protein, 565 aa, Triticum aestivum; identical to SEQ ID NO: 8890

SEQ ID NO: 26990 - DNA, 1584 bp, Zea mays; identical to SEQ ID NO: 8891
  CDS (1)..(1584)

SEQ ID NO: 26991 - protein, 527 aa, Zea mays; identical to SEQ ID NO: 8892

SEQ ID NO: 26992 - DNA, 1542 bp, Zea mays; identical to SEQ ID NO: 8893
  CDS (1)..(1542)

SEQ ID NO: 26993 - protein, 513 aa, Zea mays; identical to SEQ ID NO: 8894

SEQ ID NO: 26994 - DNA, 1728 bp, Zea mays; identical to SEQ ID NO: 8895
  CDS (1)..(1728)

SEQ ID NO: 26995 - protein, 575 aa, Zea mays; identical to SEQ ID NO: 8896

SEQ ID NO: 26996 - DNA, 1707 bp, Zea mays; identical to SEQ ID NO: 8897
  CDS (1)..(1707)

SEQ ID NO: 26997 - protein, 568 aa, Zea mays; identical to SEQ ID NO: 8898

SEQ ID NO: 26998 - DNA, 1629 bp, Zea mays; identical to SEQ ID NO: 8899
  CDS (1)..(1629)

SEQ ID NO: 26999 - protein, 542 aa, Zea mays; identical to SEQ ID NO: 8900

SEQ ID NO: 27000 - DNA, 1548 bp, Zea mays; identical to SEQ ID NO: 8901
  CDS (1)..(1548)

SEQ ID NO: 27001 - protein, 515 aa, Zea mays; identical to SEQ ID NO: 8902

SEQ ID NO: 27002 - DNA, 1542 bp, Zea mays; identical to SEQ ID NO: 8905
  CDS (1)..(1542)

SEQ ID NO: 27003 - protein, 513 aa, Zea mays; identical to SEQ ID NO: 8906

SEQ ID NO: 27004 - DNA, 1530 bp, Zea mays; identical to SEQ ID NO: 8903
  CDS (1)..(1530)

SEQ ID NO: 27005 - protein, 509 aa, Zea mays; identical to SEQ ID NO: 8904

SEQ ID NO: 27006 - DNA, 1707 bp, Zea mays; identical to SEQ ID NO: 8831
  CDS (1)..(1707)

SEQ ID NO: 27007 - protein, 568 aa, Zea mays; identical to SEQ ID NO: 8832

SEQ ID NO: 27008 - DNA, 1584 bp, Zea mays; identical to SEQ ID NO: 8907
  CDS (1)..(1584)

SEQ ID NO: 27009 - protein, 527 aa, Zea mays; identical to SEQ ID NO: 8908

SEQ ID NO: 27010 - DNA, 1554 bp, Zea mays; identical to SEQ ID NO: 8909
  CDS (1)..(1554)

SEQ ID NO: 27011 - protein, 517 aa, Zea mays; identical to SEQ ID NO: 8910

SEQ ID NO: 27012 - DNA, 1707 bp, Zea mays; identical to SEQ ID NO: 8911
  CDS (1)..(1707)

SEQ ID NO: 27013 - protein, 568 aa, Zea mays; identical to SEQ ID NO: 8912

SEQ ID NO: 27014 - DNA, 1728 bp, Zea mays; identical to SEQ ID NO: 8913
  CDS (1)..(1728)

SEQ ID NO: 27015 - protein, 575 aa, Zea mays; identical to SEQ ID NO: 8914

SEQ ID NO: 27016 - DNA, 20 bp, Artificial sequence
  primer
atgctcgaagaatcgattcg

SEQ ID NO: 27017 - DNA, 21 bp, Artificial sequence
  primer
tcaatggatgacgtcgcccac

SEQ ID NO: 27018 - protein, 506 aa, Artificial sequence
  consensus sequence
  Variant (4)..(5): Xaa in position 4 to 5 is any amino acid
  Variant (7)..(7): Xaa in position 7 is any amino acid
  Variant (10)..(21): Xaa in position 10 to 21 is any amino acid
  Variant (22)..(44): Xaa in position 22 to 44 is any or no amino acid
  Variant (46)..(49): Xaa in position 46 to 49 is any amino acid
  Variant (50)..(50): Xaa in position 50 is any or no amino acid
  Variant (52)..(52): Xaa in position 52 is any amino acid
  Variant (54)..(54): Xaa in position 54 is any amino acid
  Variant (58)..(61): Xaa in position 58 to 61 is any amino acid
  Variant (63)..(84): Xaa in position 63 to 84 is any amino acid
  Variant (85)..(90): Xaa in position 85 to 90 is any or no amino acid
  Variant (92)..(93): Xaa in position 92 to 93 is any amino acid
  Variant (96)..(97): Xaa in position 96 to 97 is any amino acid
  Variant (99)..(110): Xaa in position 99 to 110 is any amino acid
  Variant (111)..(117): Xaa in position 111 to 117 is any or no amino acid
  Variant (119)..(144): Xaa in position 119 to 144 is any amino acid
  Variant (145)..(152): Xaa in position 145 to 152 is any or no amino acid
  Variant (154)..(160): Xaa in position 154 to 160 is any amino acid
  Variant (161)..(166): Xaa in position 161 to 166 is any or no amino acid
  Variant (168)..(172): Xaa in position 168 to 172 is any amino acid
  Variant (174)..(193): Xaa in position 174 to 193 is any amino acid
  Variant (194)..(200): Xaa in position 194 to 200 is any or no amino acid
  Variant (202)..(214): Xaa in position 202 to 214 is any amino acid
  Variant (215)..(221): Xaa in position 215 to 221 is any or no amino acid
  Variant (224)..(225): Xaa in position 224 to 225 is any amino acid
  Variant (226)..(226): Xaa in position 226 is any or no amino acid
  Variant (228)..(241): Xaa in position 228 to 241 is any amino acid
  Variant (242)..(242): Xaa in position 242 is any or no amino acid
  Variant (245)..(248): Xaa in position 245 to 248 is any amino acid
  Variant (249)..(249): Xaa in position 249 is any or no amino acid
  Variant (251)..(265): Xaa in position 251 to 265 is any amino acid
  Variant (266)..(274): Xaa in position 266 to 274 is any or no amino acid
  Variant (276)..(276): Xaa in position 276 is any amino acid
  Variant (278)..(287): Xaa in position 278 to 287 is any amino acid
  Variant (288)..(290): Xaa in position 288 to 290 is any or no amino acid
  Variant (292)..(295): Xaa in position 292 to 295 is any amino acid
  Variant (297)..(298): Xaa in position 297 to 298 is any amino acid
  Variant (307)..(307): Xaa in position 307 is any amino acid
  Variant (309)..(317): Xaa in position 309 to 317 is any amino acid
  Variant (320)..(321): Xaa in position 320 to 321 is any amino acid
  Variant (323)..(331): Xaa in position 323 to 331 is any amino acid
  Variant (333)..(333): Xaa in position 333 is any amino acid
  Variant (334)..(334): Xaa in position 334 is any or no amino acid
  Variant (339)..(340): Xaa in position 339 to 340 is any amino acid
  Variant (343)..(345): Xaa in position 343 to 345 is any amino acid
  Variant (347)..(347): Xaa in position 347 is any amino acid
  Variant (353)..(354): Xaa in position 353 to 354 is any amino acid
  Variant (360)..(361): Xaa in position 360 to 361 is any amino acid
  Variant (364)..(364): Xaa in position 364 is any amino acid
  Variant (366)..(367): Xaa in position 366 to 367 is any amino acid
  Variant (371)..(371): Xaa in position 371 is any amino acid
  Variant (373)..(373): Xaa in position 373 is any amino acid
  Variant (375)..(375): Xaa in position 375 is any amino acid
  Variant (377)..(378): Xaa in position 377 to 378 is any amino acid
  Variant (380)..(382): Xaa in position 380 to 382 is any amino acid
  Variant (384)..(385): Xaa in position 384 to 385 is any amino acid
  Variant (387)..(387): Xaa in position 387 is any amino acid
  Variant (388)..(393): Xaa in position 388 to 393 is any or no amino acid
  Variant (395)..(419): Xaa in position 395 to 419 is any amino acid
  Variant (420)..(447): Xaa in position 420 to 447 is any or no amino acid
  Variant (449)..(450): Xaa in position 449 to 450 is any amino acid
  Variant (452)..(464): Xaa in position 452 to 464 is any amino acid
  Variant (467)..(483): Xaa in position 467 to 483 is any amino acid
  Variant (484)..(502): Xaa in position 484 to 502 is any or no amino acid
  Variant (504)..(505): Xaa in position 504 to 505 is any amino acid
TKIXXTXGPXXXXXXXXXXXXXXXXXXXXXXXXXXXXXXXXXXXGXXXXXRXNXSHGXXXXHXXXXXXXXXXXXXXXXXXXXXXXXXXXXDXXGPXXRXXXXXXXXXXXXXXXXXXXGXXXXXXXXXXXXXXXXXXXXXXXXXXXXXXXXXXGXXXXXXXXXXXXXGXXXXXVXXXXXXXXXXXXXXXXXXXXXXXXXXXNXXXXXXXXXXXXXXXXXXXXKDXXXDXXXXXXXXXXXXXXXSFXXXXXDXXXXXXXXXXXXXXXXXXXXXXXXKXEXXXXXXXXXXXXXIXXXXDXXMVARGDLGXEXXXXXXXXXQKXXIXXXXXXXXXVXXATQMXXSMXXXPXPTRAEXXDVANAXXDGXDXXMLSXEXAXGXXPXXXVXXMXXXXXXXEXXXXXXXXXXXXXXXXXXXXXXXXXXXXXXXXXXXXXXXXXXXXXXXXXXXXXTXXGXXXXXXXXXXXXXPIXXXXXXXXXXXXXXXXXXXXXXXXXXXXXXXXXXXXGXXP

SEQ ID NO: 27019 - protein, 17 aa, Artificial sequence
  protein pattern
  Variant (2)..(2): Xaa in position 2 is any amino acid
  Variant (3)..(3): Xaa in position 3 is Cys, Asp, Asn or Thr
  Variant (4)..(5): Xaa in position 4 to 5 is any amino acid
  Variant (7)..(7): Xaa in position 7 is any amino acid
  Variant (9)..(9): Xaa in position 9 is any amino acid
  Variant (13)..(13): Xaa in position 13 is any amino acid
  Variant (14)..(16): Xaa in position 14 to 16 is any or no amino acid
GXXXXRXNXSHGXXXXH

SEQ ID NO: 27020 - protein, 10 aa, Artificial sequence
  protein pattern
  Variant (2)..(2): Xaa in position 2 is Ile or Leu
  Variant (3)..(3): Xaa in position 3 is Ile or Val
  Variant (4)..(4): Xaa in position 4 is Ala, Cys, Asp, Gly, Ser, Thr or Val
  Variant (6)..(6): Xaa in position 6 is Ile, Leu, Met or Val
  Variant (9)..(9): Xaa in position 9 is any amino acid
  Variant (10)..(10): Xaa in position 10 is Ala, Cys, Ser, Thr or Val
KXXXTXGPXX

SEQ ID NO: 27021 - DNA, 1194 bp, Azotobacter vinelandii
  CDS (1)..(1194): transl_table=11
atggctaaggaaaagttcgagcgtaacaagccgcacgtcaacgttggcaccatcggtcacgtggaccatggcaagaccactctgacggccgctctgaccaaggtttgtgccgagacctggggtggcgccgctcgtgccttcgatcagatcgacaacgctccggaagaaaaggcgcgcggtatcaccatcaacacctcgcacgttgaatacgactccgcgacccgtcactacgcgcacgtcgactgtcccggtcatgccgactacgtgaagaacatgatcaccggcgccgcccagatggacggcgcgatcctggtctgctcggccgccgacggccccatgccgcagacccgcgagcacatcctgctgtcccgccaggtaggcgttccctacatcgtcgtgttcctgaacaaggccgacatggtcgacgacgccgaactgctggaactggtcgagatggaagtgcgtgatctgctgtccacctacgacttcccgggcgacgacaccccgatcatcaccggctctgccctgatggcgctggaaggcaaggacgacaacggcatcggcgtctccgccgtgcgtaagctggtggaaaccctggactcctatattccggagccggtgcgtgccgtcgatcagccgttcctgatgccgatcgaggacgtgttctcgatctccggccgcggcaccgtggtgaccggtcgcgtcgagcgcggcatcgtcaaggtcggcgaggaagtggaaatcgtcggtatccgtccgaccaccaagaccacctgcaccggcgtggaaatgttccgtaagctgctcgacgaagggcgtgccggcgagaacatcggcgccctgctgcgcggcaccaagcgtgaggacgtggagcgcggccaggttctggccaagccgggcaccatcaagccgcacaccaagttcgaagccgaagtgtatgtgctgtccaaggaagaaggtggtcgtcacaccccgttcttcaagggctaccgcccgcagttctacttccgtaccaccgacgtgaccggtaacgtcgagctgccggaaggcgtcgagatggtgatgccgggtgacaacatcaagatgaccgtcaccctgatcgctccgatcgccatggaagacggtctgcgtttcgccatccgcgaaggcggtcgtaccgtcggcgccggtgtggtggccaagatcatcgagtaa

SEQ ID NO: 27022 - protein, 397 aa, Azotobacter vinelandii
MAKEKFERNKPHVNVGTIGHVDHGKTTLTAALTKVCAETWGGAARAFDQIDNAPEEKARGITINTSHVEYDSATRHYAHVDCPGHADYVKNMITGAAQMDGAILVCSAADGPMPQTREHILLSRQVGVPYIVVFLNKADMVDDAELLELVEMEVRDLLSTYDFPGDDTPIITGSALMALEGKDDNGIGVSAVRKLVETLDSYIPEPVRAVDQPFLMPIEDVFSISGRGTVVTGRVERGIVKVGEEVEIVGIRPTTKTTCTGVEMFRKLLDEGRAGENIGALLRGTKREDVERGQVLAKPGTIKPHTKFEAEVYVLSKEEGGRHTPFFKGYRPQFYFRTTDVTGNVELPEGVEMVMPGDNIKMTVTLIAPIAMEDGLRFAIREGGRTVGAGVVAKIIE

SEQ ID NO: 27023 - DNA, 1657 bp, Zea mays subsp. mays
  CDS (100)..(1497)
cttctagataagcagcgcaaacccctactctctcgcctctccctatccatccccaaataatccccacctcccgctcatcctccgcctccgccgcccgccatggcctccctcacctcggcctccacctcactcctcttcccgcaggcctcctcatccaggagccgcgtccggctctccacctccctgggcttctccgcgcagccggcgcggctgcggagccgggcggcggcaggagggcagcggcgcgggagcctgctggtggtgcgcgcggcgaggggaaagttcgagcgcaccaagccgcacgtaaacatcggcaccatcggtcacgtcgaccacggcaagaccaccctcaccgccgcgctcaccatggtgctcgcctccgtcggcggcagcgcgcccaagaagtacgacgagatcgatgccgcccccgaggagcgtgcccgcggtatcaccatcaacaccgccaccgtcgagtacgagaccgagacccgccactacgcgcacgtcgactgccccggccacgccgactatgtcaagaacatgatcaccggcgctgcgcagatggacggcgccatcctcgtcgtctctggcgccgacggtcccatgccgcagaccaaagagcacattctcctcgccaagcaggtcggcgttcccaagatcgttgtcttcctcaacaagaaggacatggtcgacgacgaggagctgctcgagctcgtcgagctggaagtccgcgagctgctcagcaactatgagtacgacggcgacgaggtgccaatcgtcgctggctccgccctcaaggcgctcgaggccctcatgggcaaccctaccctgaagcgcggcgacgatgagtgggtggactgcatcttcaagctggttgattctgtggattcctacattccagtgccacagcggcagaccgacctcccgttcttactcgctgttgaagatgtcttctccatcaccggtcgtggtacagttgccactggccgtatcgagcgtggcaccgtcaagattggtgacacagtcgatatcgttggaatccgggacacccggaactgcaccgtgactggcgttgagatgttccagaagaccatggacgatgccatggctggagacaatgtcggactgctgctccgtggtatgcagaaggatgacattgagagaggcatggtgctggcaaagcccggctctatcacaccgcacaccaagtttgaggctgttgtgtatgtgcttaagaaggaagagggtggccggcactcacctttcttccctggttaccgcccgcagttctacatgaggacaaccgatgtgacagggaatgtgactgtgattatgaatgacaaagatgaggaggcgaagatgtgcatgcctggtgaccgtatcaagatggttgttcagctcatccagcctgttgcttgtgagcagggtatgaggtttgctatccgtgagggtggtaagactgttggtgctggtgtcatcaacaaaatcattgagtaaactggatatatcacatccaccacgagaattttccttgtttactcaaagcgaaatgctctgtagttgttattatgtgttgagttttaggggttgttcatgtgaaattgtagtatgacactctttcgccaagtgaatttgcataatttatgacattcacggc

SEQ ID NO: 27024 - protein, 465 aa, Zea mays subsp. mays
MASLTSASTSLLFPQASSSRSRVRLSTSLGFSAQPARLRSRAAAGGQRRGSLLVVRAARGKFERTKPHVNIGTIGHVDHGKTTLTAALTMVLASVGGSAPKKYDEIDAAPEERARGITINTATVEYETETRHYAHVDCPGHADYVKNMITGAAQMDGAILVVSGADGPMPQTKEHILLAKQVGVPKIVVFLNKKDMVDDEELLELVELEVRELLSNYEYDGDEVPIVAGSALKALEALMGNPTLKRGDDEWVDCIFKLVDSVDSYIPVPQRQTDLPFLLAVEDVFSITGRGTVATGRIERGTVKIGDTVDIVGIRDTRNCTVTGVEMFQKTMDDAMAGDNVGLLLRGMQKDDIERGMVLAKPGSITPHTKFEAVVYVLKKEEGGRHSPFFPGYRPQFYMRTTDVTGNVTVIMNDKDEEAKMCMPGDRIKMVVQLIQPVACEQGMRFAIREGGKTVGAGVINKIIE

SEQ ID NO: 27025 - DNA, 1448 bp, Helicobacter pylori
  CDS (118)..(1317): transl_table=11
ctcttgaatggcgataagacaaaaatgtcttaaattttgtggtagcatttaggaatacttaggattttgtttagtataattctaaaatccatttcaaaaaattaaggagaaatacaaatggcaaaagaaaagtttaacagaactaagccgcatgttaatattggaaccattgggcatgtagaccatggtaaaacgactttgagtgcagcgatttcagcggtgctttctttgaaaggtcttgcagaaatgaaagactatgataatattgataacgcccctgaagaaaaagaaagagggatcactatcgctacttctcacattgaatatgagactgaaaacagacactatgcgcatgtggattgcccaggacacgctgactatgtaaaaaacatgatcaccggtgcggcgcaaatggacggagcgattttggttgtttctgcagctgatggccctatgcctcaaactagggagcatatcttattgtctcgtcaagtaggcgtgcctcacatcgttgttttcttaaacaaacaagacatggtagatgaccaagaattgttagaacttgtagaaatggaagtgcgcgaattgttgagcgcgtatgaatttcctggcgatgacactcctatcgtagcgggttcagctttaagagctttagaagaagcaaaggctggtaatgtgggtgaatggggtgaaaaagtgcttaaacttatggctgaagtggatgcctatatccctactccagaaagagacactgaaaaaactttcttgatgccggttgaagatgtgttctctattgcgggtagagggactgtggttacaggtaggattgaaagaggcgtggtgaaagtaggcgatgaagtggaaatcgttggtatcagacctacacaaaaaacgactgtaaccggtgtagaaatgtttaggaaagagttggaaaaaggtgaagccggcgataatgtgggcgtgcttttgagaggaactaaaaaagaagaagtggaacgcggtatggttctatgcaaaccaggttctatcactccgcacaagaaatttgagggagaaatttatgtcctttctaaagaagaaggcgggagacacactccattcttcaccaattaccgcccgcaattctatgtgcgcacaactgatgtgactggctctatcacccttcctgaaggcgtagaaatggttatgcctggcgataatgtgaaaatcactgtagagttgattagccctgttgcgttagagttgggaactaaatttgcgattcgtgaaggcggtaggaccgttggtgctggtgttgtgagcaatattattgaataatattagcaaaaagagagttaccataaagggtcattatgaaagttaaaatagggttgaagtgttctgattgtgaagatatcaattacagcacaaccaagaacgctaaaactaacactgaaaaactggagctt

SEQ ID NO: 27026 - protein, 399 aa, Helicobacter pylori
MAKEKFNRTKPHVNIGTIGHVDHGKTTLSAAISAVLSLKGLAEMKDYDNIDNAPEEKERGITIATSHIEYETENRHYAHVDCPGHADYVKNMITGAAQMDGAILVVSAADGPMPQTREHILLSRQVGVPHIVVFLNKQDMVDDQELLELVEMEVRELLSAYEFPGDDTPIVAGSALRALEEAKAGNVGEWGEKVLKLMAEVDAYIPTPERDTEKTFLMPVEDVFSIAGRGTVVTGRIERGVVKVGDEVEIVGIRPTQKTTVTGVEMFRKELEKGEAGDNVGVLLRGTKKEEVERGMVLCKPGSITPHKKFEGEIYVLSKEEGGRHTPFFTNYRPQFYVRTTDVTGSITLPEGVEMVMPGDNVKITVELISPVALELGTKFAIREGGRTVGAGVVSNIIE

SEQ ID NO: 27027 - DNA, 1194 bp, Clostridium acetobutylicum
  CDS (1)..(1194): transl_table=11
atggcaaaggaaaaatttgaaagaacgaaaccacatgtaaacataggaacaataggacacgtagatcacggtaaaacaacattaacagcagcaataacaacaatattagcaaaagaaggaaaagcaaaagcattcaattacgaagagattgataaagcaccagaggaaaaagaaagaggaataacaatcaacacagcacacgttgagtatgaaacagagaatagacactatgctcacgttgactgcccaggacatgctgactatgtaaagaacatgattacaggagcagcgcaaatggatggagcaatcctagtagtaagtgcagcagatggtccaatgccacaaacaagagagcacatactattggcatcaagagttggtgttgaatatatagtagtattcttaaataaagcagaccaagtagatgatccagaattaatcgacttagtagaaatggaagtaagagagttattaaacgaatatggattcccaggcgatgatacaccaatcgtagtaggaagtgcgttaaaagcattacagaatccagatgatgcagaagcaataaaaccaataaaagacttaatggcagaagtagatgcatacatcccaacaccagaaagaccaacagataaagcattcttaatgccaatcgaagatgtcttcacaataacaggaagaggaacagttgcaacaggaagagttgaaactggaacattaaaagttggagacgaagtagaaatcgttggaatgaaagatgaaataacaaaagtagtagtaacaggcgtagaaatgttcagaaaaatacttgatagtgcattagcaggagataacatcggagcattattaagaggagtacagagagaagacatcgaaagaggtcaggtattagcaaaaccaggttcaataactccacataataaattcgtaggtcaagtatacgtattaaagaaagaagaaggcggaagacatacaccattcttcaatggatatagaccacaattctatttcagaacaacagacgtaacaggatcaatccagttaccagatggagtagaaatggtaatgccaggagaccacatagatatgacagttgaattaataacaaaagtagcaatgggagacaacttaagattcgctatcagagaaggcggaagaacagttggatcaggagttgttactagtataatagagtaa

SEQ ID NO: 27028 - protein, 397 aa, Clostridium acetobutylicum
MAKEKFERTKPHVNIGTIGHVDHGKTTLTAAITTILAKEGKAKAFNYEEIDKAPEEKERGITINTAHVEYETENRHYAHVDCPGHADYVKNMITGAAQMDGAILVVSAADGPMPQTREHILLASRVGVEYIVVFLNKADQVDDPELIDLVEMEVRELLNEYGFPGDDTPIVVGSALKALQNPDDAEAIKPIKDLMAEVDAYIPTPERPTDKAFLMPIEDVFTITGRGTVATGRVETGTLKVGDEVEIVGMKDEITKVVVTGVEMFRKILDSALAGDNIGALLRGVQREDIERGQVLAKPGSITPHNKFVGQVYVLKKEEGGRHTPFFNGYRPQFYFRTTDVTGSIQLPDGVEMVMPGDHIDMTVELITKVAMGDNLRFAIREGGRTVGSGVVTSIIE

SEQ ID NO: 27029 - DNA, 1200 bp, Alloiococcus otitis
  CDS (16)..(1200): transl_table=11
ggaggaaaaataaacatggcaaaagaaaaatttgatcgttccaaagaacacatgaatattggtaccctaggtcacgtcgaccacggtaaaactaccttaactgcagctatcacttacgttttagctaaaaaaggtttggcagaagcttcagcttacgaccaaattgatggtgctgctgaagagcgtgaacgtggtattaccattgcgactgctcacgttgaatactcaaccgaaaaccgtcactatgcccacgttgactgcccaggacacgctgactatgttaaaaacatgattactggtgcggctcaaatggacggtgctatcttagttgtatcagctgcagatggcccaatgccacaaactcgtgagcacatccttcttgctcgtcaagttggtgttccttacttcgttgtattcttgaacaaagttgaccaagtcgacgatgaagaattacttgaactcgttgaacttgaagttcgtgacctcttaactgaatacgacttcccaggtgacgaagttccagttgttgctggttctgcacttcttgctcttcaagatgatgaagaacaaatgaataacatccttaaattaatggatgaagtagacaactacattccagcgccagaacgtgacgctaacaaagacttcttgatgccagttgaagacatcttctctatcactggtcgtggtactgttgcaaccggccgtgtagaacaaggtcaacttaaagttggtgacgaagttgaaatcgttggtattaaagatactgcgactacaactgttactggtgttgaaatgttccgtaaattgttagactacgctgaagctggtgacaacattggtgccttgttacgtggtctttcacgtgacgatgttgaacgtggtcaagttcttgcaactccaggttccatcacccctcactctaaattcaaaggcgaagtttacgtcttgtcaaaagatgaaggtggccgtcacactccattcttctctaactaccgaccacaattcttcttccgtacaactgacgtaactggtgtcgttaacctaccggaaggtactgaaatggttatgccaggcgacaacactgaaatggaagttgaattgattgctccaatcgcagttgaagaaggtaccaaatttaccatccgtgaaggtggccgtactgttggtgctggtgttgtttctgaaattatcgaataa

SEQ ID NO: 27030 - protein, 394 aa, Alloiococcus otitis
MAKEKFDRSKEHMNIGTLGHVDHGKTTLTAAITYVLAKKGLAEASAYDQIDGAAEERERGITIATAHVEYSTENRHYAHVDCPGHADYVKNMITGAAQMDGAILVVSAADGPMPQTREHILLARQVGVPYFVVFLNKVDQVDDEELLELVELEVRDLLTEYDFPGDEVPVVAGSALLALQDDEEQMNNILKLMDEVDNYIPAPERDANKDFLMPVEDIFSITGRGTVATGRVEQGQLKVGDEVEIVGIKDTATTTVTGVEMFRKLLDYAEAGDNIGALLRGLSRDDVERGQVLATPGSITPHSKFKGEVYVLSKDEGGRHTPFFSNYRPQFFFRTTDVTGVVNLPEGTEMVMPGDNTEMEVELIAPIAVEEGTKFTIREGGRTVGAGVVSEIIE

SEQ ID NO: 27031 - DNA, 1194 bp, Coxiella burnetii
  CDS (1)..(1194): transl_table=11
atgtcgaaggaaaaatttgtaagagagaagccgcacgtgaacgtgggtacgattggtcacgtggatcatgggaagacgacgttaacggcggcattgacgaaggtgttgtcggagaaatacggcggagaaaagaaagcctttgaccagattgacaacgcgccggaagagcgcgcgcgagggatcacgatagcgacgtcgcacgtggaataccaaagcgacaagcgccactacgcgcacgtagactgcccaggccacgcggattatgtgaagaacatgatcacgggagcggcgcaaatggacggagcgatattggtggtgagcgcagcggacggcccgatgccgcaaacgcgggaacacattgtattggcgaagcaagtgggtgttccgaacatagtggtttacttgaacaaagcggacatggtggatgacaaagagctgttggaattagtggaaatggaagtgagggatttattgaacagttatgatttccctggggatgagacgccgataatagtggggtcagcgttaaaggcgttagaaggtgacaagagtgaggttggggagccatcgataatcaaattagtggaaacgatggacacgtacttcccgcagccggagcgagcgatagacaaaccgtttttaatgccgatcgaagatgtgttttcgatatcgggccgagggacggtggtgacgggacgcgtagagcgagggatcatcaaagtgggcgacgagatagagattgtggggatcaaggacacgacgaagacgacgtgcacgggcgttgagatgtttcgcaaattattggatgaaggtcaagcgggtgacaacgtaggaattttattgagagggacgaaacgcgaagaagtggagcgtggtcaagtattggcgaaaccgggatcgatcacgccacacaagaaatttgaggcggagatttatgtgttgtcgaaggaagaagggggacgccacacaccgtttttacaaggctatcgaccgcaattttatttccgcacgacggacgtgacgggccagttattgagtttaccggaggggatagagatggtgatgccgggagataacgtgaaagtgacggttgaattgattgcgccggtagcgatggatgaagggctacgatttgcggtacgggaaggtggccgcacggtgggcgccggagtggtaacgaagattattgaataa

SEQ ID NO: 27032 - protein, 397 aa, Coxiella burnetii
MSKEKFVREKPHVNVGTIGHVDHGKTTLTAALTKVLSEKYGGEKKAFDQIDNAPEERARGITIATSHVEYQSDKRHYAHVDCPGHADYVKNMITGAAQMDGAILVVSAADGPMPQTREHIVLAKQVGVPNIVVYLNKADMVDDKELLELVEMEVRDLLNSYDFPGDETPIIVGSALKALEGDKSEVGEPSIIKLVETMDTYFPQPERAIDKPFLMPIEDVFSISGRGTVVTGRVERGIIKVGDEIEIVGIKDTTKTTCTGVEMFRKLLDEGQAGDNVGILLRGTKREEVERGQVLAKPGSITPHKKFEAEIYVLSKEEGGRHTPFLQGYRPQFYFRTTDVTGQLLSLPEGIEMVMPGDNVKVTVELIAPVAMDEGLRFAVREGGRTVGAGVVTKIIE

SEQ ID NO: 27033 - DNA, 1359 bp, Aedes aegypti
  CDS (1)..(1359)
atggtgtccttactcaggacactgtcgaacattcgcattttcacggggcaagtgaaatattgccatgctcaaagggcgagcattgtctatctagcacagcaacgttatcagcctttgggaagaagggccttcgcatcggaagctaaattcgccgaacactgcaacgtcggtacaattggccatgtggaccacgggaagaccacactgacggccgcaatcaccaaagtactgtctcgggatggccgggcgaattatgttccctacgagcagatcgatcgagcaccggaagaaaaagcgcgcggaattacgattaatgctgctcacattggatacagcaccctaaaaaggcattatgcccacacggactgcccgggacatgcagattacgtgaagaatatgatttcgggggcatcgcaaatggatggcgctatactggtggtggccgcaacggatggccagatgccacaaacgagagaacatttgctcttggccagacaagttggagtggagaagattgtgatattcattaacaaagctgatcaggtggaccaggaagtgatcgaactggtagaaattgaacttcgcgaactactgagcgactttggattcgatggcatcaacagtcccgtggtggtcggttcagctctattagcccttcaaggagaccaatctgaattgggagaaccatcgatacatcgccttttggaagctatcgataagtatgtgccaacacccacgagggacatcacgtctcccttccttctacccattgataatgcatttactgtccctggtcgaggaacggttgtggtcggaacacttgcccggggcacagtcaagaaaaacgccgaagctgaacttttgggattcgacgaacaggtcaaaacctccatcggtggcattcaagtcttcaagaaggatgttaatcaagccattgccggggacaatataggcgccctactgaggaacgttaaaattacggcagttcaacggggtatgctactgtgtgctgcgggaagtgaacgagtttcaaatcatttcaatggaaccgtatacttgctggccaagaatgaaggaggtcgctcgaaaccacttacctcgaaatacattcaacagctttttagcaaaacgtggaacgtcccatgtcgagtggatctcgtggggcaggaaatgctcatgccgggagatcacggtgctatccgattgacactgctcaggaaaatggtaatgtcttgcgggcaaacattcactatccgggagaatgggaaaacggtggccaccgggttggtgacggcagttttggactcggtagatttgccccagaaaaagttgatcaaattgcatttggaccagttgtaa

SEQ ID NO: 27034 - protein, 452 aa, Aedes aegypti
MVSLLRTLSNIRIFTGQVKYCHAQRASIVYLAQQRYQPLGRRAFASEAKFAEHCNVGTIGHVDHGKTTLTAAITKVLSRDGRANYVPYEQIDRAPEEKARGITINAAHIGYSTLKRHYAHTDCPGHADYVKNMISGASQMDGAILVVAATDGQMPQTREHLLLARQVGVEKIVIFINKADQVDQEVIELVEIELRELLSDFGFDGINSPVVVGSALLALQGDQSELGEPSIHRLLEAIDKYVPTPTRDITSPFLLPIDNAFTVPGRGTVVVGTLARGTVKKNAEAELLGFDEQVKTSIGGIQVFKKDVNQAIAGDNIGALLRNVKITAVQRGMLLCAAGSERVSNHFNGTVYLLAKNEGGRSKPLTSKYIQQLFSKTWNVPCRVDLVGQEMLMPGDHGAIRLTLLRKMVMSCGQTFTIRENGKTVATGLVTAVLDSVDLPQKKLIKLHLDQL

SEQ ID NO: 27035 - DNA, 1392 bp, Aedes aegypti
  CDS (1)..(1392)
atgtccacctacgtagcgttgcgtgcggttctgaacccagtggctcggaagacactgacccagttcctgttcaacaccggtgtcagctggaacgccgctcgcatcagtcccaccatctgccaaaagcggttctacgccgaaaaggttgtttttaaacgagacaagccccattgcaacgtcggaacgattggccatgtcgatcacggtaagacaaccctgacggccgctatcaccaaagtcctcgccgataaggatctggccgaaagcaagaagtacgctgacattgacaacgccccggaagagaaagcgagaggaatcactattaacgtagctcatattgagtaccagacggagaatcggcactacggtcatacggactgtcccggccatgccgattacattaagaacatgatcaccggaacggcccaaatggacggagctatcctggtggtggcagctactgacggtgctatgccccaaaccagggaacatttgctgctggccaaacagattggggtcaatcacattgtggtcttcattaacaaagtggacgcggccgatcaggaaatggtagatctggtggaaatggaaatccgcgaactgatgtccgaaatgggcttcgatggggacaatgttcccgtcattaagggatcggccttgtgtgctttggagggcaagagtccggaaattggtgccgatgcggtgatgaagctgctagaggaggtggacaaatacgttccgaccccgactcgggatctggataagcctttcttgctgccggtggagtcggtgcacagcatccccggacgaggtaccgttgtgaccggacgtttggagcgcggcgtcgtgaagaagggcatggaatgcgagttcgttggttacaacaaggtcatcaaatcgacaatcaccggcgtcgaaatgttccacaaaattctggaggaagcccaggccggcgatcagctgggcgccctggtgcgtggtatcaaacgtgacgacatcaagcgcggcatggtcatgtgcaagccgggttcggtcaaggccaacgacaacttcgaggcgcaggtttacattctgagcaaggaggaaggcggacgccacaagcccttcaccagcttcatccagctgcagatgttctcgcgcacgtgggattgtgccacccaggtgcaaattcccggcaaggagatggtcatgcccggtgaggatgccaagctgcatctgcgtctgatgaggcccatggtcattgagcagggacaacgtttcacactgcgcgatggacacattacgctgggaaccggtgtcgtcaccaatgtgctctcgccacttagcgaaaaggaacgaatgtcgctggtcgagggcaagaaggcacgagagaaggccaccggaaaggcctaa

SEQ ID NO: 27036 - protein, 463 aa, Aedes aegypti
MSTYVALRAVLNPVARKTLTQFLFNTGVSWNAARISPTICQKRFYAEKVVFKRDKPHCNVGTIGHVDHGKTTLTAAITKVLADKDLAESKKYADIDNAPEEKARGITINVAHIEYQTENRHYGHTDCPGHADYIKNMITGTAQMDGAILVVAATDGAMPQTREHLLLAKQIGVNHIVVFINKVDAADQEMVDLVEMEIRELMSEMGFDGDNVPVIKGSALCALEGKSPEIGADAVMKLLEEVDKYVPTPTRDLDKPFLLPVESVHSIPGRGTVVTGRLERGVVKKGMECEFVGYNKVIKSTITGVEMFHKILEEAQAGDQLGALVRGIKRDDIKRGMVMCKPGSVKANDNFEAQVYILSKEEGGRHKPFTSFIQLQMFSRTWDCATQVQIPGKEMVMPGEDAKLHLRLMRPMVIEQGQRFTLRDGHITLGTGVVTNVLSPLSEKERMSLVEGKKAREKATGKA

SEQ ID NO: 27037 - DNA, 1185 bp, Klebsiella pneumoniae subsp. pneumoniae MGH 78578
  CDS (1)..(1185): transl_table=11
atgtctaaagaaaagtttgaacgtacaaaaccgcacgttaacgtcggtactatcggccacgttgaccatggtaaaacaacgctgaccgctgccatcactaccgtactggctaaaacctacggtggttccgctcgcgcattcgaccagatcgataacgcgccggaagaaaaagctcgtggtatcaccatcaacacctctcacgttgaatatgacaccccgactcgccactacgcgcacgtagactgcccgggccacgccgactatgttaaaaacatgatcaccggtgctgcgcagatggacggcgcgatcctggttgttgctgcgactgacggcccgatgccgcagactcgtgagcacatcctgctgggtcgtcaggtaggcgttccgtacatcatcgtgttcctgaacaaatgcgacatggttgatgacgaagagctgctggaactggttgagatggaagttcgtgaactgctgtctcagtacgatttcccgggcgacgacactccgatcgttcgtggttctgctctgaaagcgctggaaggcgacgcagagtgggaagcgaaaatcatcgaactggctggccacctggatacctatatcccggaaccagagcgtgcgattgacaagccgttcctgctgccgatcgaagacgtattctccatctccggtcgtggtaccgttgttaccggtcgtgtagagcgcggtatcatcaaagtaggtgaagaagttgaaatcgttggtatcaaagaaaccgcgaaaaccacctgtactggcgttgaaatgttccgcaaactgctggacgaaggccgtgctggtgagaacgtaggtgttctgctgcgtggtatcaaacgtgaagaaatcgaacgtggtcaggtactggctaagccgggcaccatcaacccgcacaccaagttcgaatctgaagtgtacatcctgtccaaagacgaaggcggccgtcatactccgttcttcaaaggctaccgtccgcagttctacttccgtactactgacgtgactggcaccatcgaactgccggaaggcgtagagatggtaatgccgggcgacaacatcaaaatggttgttaccctgatccacccgatcgcgatggacgacggtctgcgtttcgcaatccgtgaaggcggtcgtaccgttggcgcgggcgtggttgctaaagttctcggctaa

SEQ ID NO: 27038 - protein, 394 aa, Klebsiella pneumoniae subsp. pneumoniae MGH 78578
MSKEKFERTKPHVNVGTIGHVDHGKTTLTAAITTVLAKTYGGSARAFDQIDNAPEEKARGITINTSHVEYDTPTRHYAHVDCPGHADYVKNMITGAAQMDGAILVVAATDGPMPQTREHILLGRQVGVPYIIVFLNKCDMVDDEELLELVEMEVRELLSQYDFPGDDTPIVRGSALKALEGDAEWEAKIIELAGHLDTYIPEPERAIDKPFLLPIEDVFSISGRGTVVTGRVERGIIKVGEEVEIVGIKETAKTTCTGVEMFRKLLDEGRAGENVGVLLRGIKREEIERGQVLAKPGTINPHTKFESEVYILSKDEGGRHTPFFKGYRPQFYFRTTDVTGTIELPEGVEMVMPGDNIKMVVTLIHPIAMDDGLRFAIREGGRTVGAGVVAKVLG

SEQ ID NO: 27039 - DNA, 1230 bp, Leptosira terrestris
  CDS (1)..(1230)
atggcacgtcaaaagtttgaacgtaaaaaaccacatgttaatattggcacaattggacatgtagatcatggcaaaacaacattaacagctgctattactatggctatggctgctcggggtggcggaaaaggaaaaaagtatgatgatattgattcagcacccgaagaaaaacaaagaggtattacaataaatactgctcatgtagaatatgaaacagaaaaacgccactatgcccacgtagattgcccaggccatgctgattatgtgaagaatatgattacgggtgctgcacaaatggacggtgctattttagttgtttcaggtgctgatggtccaatgcctcaaaccaaggagcacattcttttagcaaagcaagtaggtgttccaaatgttgtagtttttttaaataaagaagaccaggtagatgatgcagaactactagaattagttgaactagaagtgcgtgaaacattagataattatgagtttccaggtgatgaaattccaattgttccaggctctgcactacttgctttgcaagctttaagtgaaaatccagaaatcacaccaggacaaaatccatgggttgataaaatttttaagttaatggatactgtggatgcttatattccaacacctgaacgtgatactgaaaaaccatttttaatggcagtagaagacgttttttctattacaggtcgcggtactgttgcaactggtcgagtagaaagaggtagtgttaaagttggtgaaaccattgaaattgtaggtttgcgcgaaactcgtactactacagtaactggactagaaatgtttcaaaagactttagaagaaagtgttgcaggtgataatgtaggcgttttattacggggtattcaaaaaattgatattcaacgcggtatggttttagccaaacctggaagtattacacctcataccaaatttacagctcaagtatatattttaactcgcgatgaaggaggtcgtcacacaccgttttttgcaggttatagacctcaattctatgtgcgaacaacagatgtaacaggcaaaattgaaacttttcgtactgatgatgatcaaccaacacagatggttatgcctggtgatcgtataaaaatggaggttgaattaattcaacctattgcaattgaaaaaggtatgcgatttgctattcgagaaggcggacgaacagttggagcaggtgttgtatctgctattgttttgtaa

SEQ ID NO: 27040 - protein, 409 aa, Leptosira terrestris
MARQKFERKKPHVNIGTIGHVDHGKTTLTAAITMAMAARGGGKGKKYDDIDSAPEEKQRGITINTAHVEYETEKRHYAHVDCPGHADYVKNMITGAAQMDGAILVVSGADGPMPQTKEHILLAKQVGVPNVVVFLNKEDQVDDAELLELVELEVRETLDNYEFPGDEIPIVPGSALLALQALSENPEITPGQNPWVDKIFKLMDTVDAYIPTPERDTEKPFLMAVEDVFSITGRGTVATGRVERGSVKVGETIEIVGLRETRTTTVTGLEMFQKTLEESVAGDNVGVLLRGIQKIDIQRGMVLAKPGSITPHTKFTAQVYILTRDEGGRHTPFFAGYRPQFYVRTTDVTGKIETFRTDDDQPTQMVMPGDRIKMEVELIQPIAIEKGMRFAIREGGRTVGAGVVSAIVL

SEQ ID NO: 27041 - DNA, 1191 bp, Xanthobacter autotrophicus Py2
  CDS (1)..(1191): transl_table=11
atggccaaagagaagttcaaccgctcgaagccgcactgcaacatcggcacgatcggtcacgtggatcatggcaagacgtcgctgactgcggcgatcacgaagatccttgcggagacgggcggcgcgacgttcacggcgtacgaccagatcgacaaggcgccggaagagaaggcgcgcggcatcacgatctcgaccgctcacgtggaatacgagacccagaaccgccactacgcgcacgtggactgccccgggcacgccgactatgtgaagaacatgatcaccggcgcggcgcagatggacggcgcgatcctggtggtgtcggcggccgacggcccgatgccgcagacccgcgagcacatcctgctcgcccgtcaggtcggcgtgccggcgctggtggtgttcctcaacaagtgcgacatggtcgacgatgaggagctgctggagctggtcgagctggaagtgcgcgagctgctgtccaagtacgacttccccggcgacgacatcccgatcatccgtggctcggcgctggtggcgctggagaacggcgatccgaagctcggccgcgacgcggtgctgaagctgatggaggcggtcgacgcctacatcccgcagcccgagcgtccggtggacctgccgttcctgatgcccatcgaggacgtgttctcgatctcgggccgcggcacggtggtgaccggccgcgtggagcgcggcatcatcaaggtcggtgaggaagtggaaatcgtgggcatccgcccgacgcagaagaccacggtcaccggcgtcgagatgttccgtaagctgctcgaccagggccaggccggtgacaacgtcggcatcctggtgcgcggcaccaagcgtgaggacgtggagcgcggccaggtggtgtgcaagccgggtacggtgaagccacacaccaagttcaaggccgaagcctacatcctgaccaaggaagagggcggccgtcacaccccgttcttcaccaactaccgcccgcagttctacttccggaccacggacgtgaccggcgtgtgcacgctgccggaaggcaccgagatggtgatgccgggcgacaacgtgtccatggacgtggcgctgatcgttccgatcgccatggaagagaagctgcgcttcgccatccgcgagggtggccgcacggtgggcgccggcgtcgtcgcctccatcatcgagtga

SEQ ID NO: 27042 - protein, 396 aa, Xanthobacter autotrophicus Py2
MAKEKFNRSKPHCNIGTIGHVDHGKTSLTAAITKILAETGGATFTAYDQIDKAPEEKARGITISTAHVEYETQNRHYAHVDCPGHADYVKNMITGAAQMDGAILVVSAADGPMPQTREHILLARQVGVPALVVFLNKCDMVDDEELLELVELEVRELLSKYDFPGDDIPIIRGSALVALENGDPKLGRDAVLKLMEAVDAYIPQPERPVDLPFLMPIEDVFSISGRGTVVTGRVERGIIKVGEEVEIVGIRPTQKTTVTGVEMFRKLLDQGQAGDNVGILVRGTKREDVERGQVVCKPGTVKPHTKFKAEAYILTKEEGGRHTPFFTNYRPQFYFRTTDVTGVCTLPEGTEMVMPGDNVSMDVALIVPIAMEEKLRFAIREGGRTVGAGVVASIIE

SEQ ID NO: 27043 - DNA, 1386 bp, Apis mellifera
  CDS (1)..(1386)
atgggtaaagaaaagattcatattaatattgtcgttattggacacgtcgactctggcaagtctaccaccactggtcatttgatctacaaatgtggtggtattgataaacgtaccattgaaaaattcgagaaggaagcccaggaaatgggcaaaggatccttcaaatatgcctgggtattggataagttaaaagctgaacgtgaacgtggtattacgattgatattgctttgtggaaattcgaaacgtcaaaatactatgttactattattgatgctcctggacacagagatttcatcaaaaacatgattactggtacctctcaggctgattgtgctgtattaattgttgctgctggtactggagagttcgaagcaggcatttcaaagaatggacaaactcgtgagcatgctttgctcgcttttactcttggtgtgaaacaattgattgttggtgttaataagatggactccactgaaccaccgtattctgaaacccgatttgaagaaattaaaaaagaagtgtcatcttacattaaaaaaattggttataatccagctgcagttgcatttgtgccaatttctggttggcatggagataatatgttggaagtttcttcaaaaatgccttggtttaagggatggacggttgaacgtaaagaaggaaaagttgaaggaaaatgtctcattgaagcgcttgatgctattcttccacctactagacctacagacaaggctctccgtcttcctcttcaggacgtatataaaatcggtggtattggaacagtaccagttggtcgtgtcgaaactggtgtgttgaaaccaggtatggttgtcacattcgctcctgctggtttgactactgaagtcaaatctgttgaaatgcatcacgaagctttgcaagaggctgttcctggtgataatgttggttttaacgtcaagaacgtatctgtcaaagaattacgtcgtggttatgttgctggtgattcaaagaataatccacctaaaggtgctgctgattttactgcacaagttattgtattgaatcaccctggtcaaatcagcaatggttatacaccagtattggattgtcatactgcacatattgcatgtaaattcgctgatatcaaagagaaatgcgatcgtcgtaatggaaagacaactgaagaaaatccgaaaagcatcaaatctggagatgctgccatcgttatgcttgtgccaagcaagcctatgtgcgctgaggctttccaagaatttccgcctttggggcgtttcgctgttcgtgacatgcgtcaaacggtagctgttggtgttatcaaagctgtaactttcaaggacgctgctggcaaggtcaccaaggctgccgagaaggctcagaaaaagaaataa

SEQ ID NO: 27044 - protein, 461 aa, Apis mellifera
MGKEKIHINIVVIGHVDSGKSTTTGHLIYKCGGIDKRTIEKFEKEAQEMGKGSFKYAWVLDKLKAERERGITIDIALWKFETSKYYVTIIDAPGHRDFIKNMITGTSQADCAVLIVAAGTGEFEAGISKNGQTREHALLAFTLGVKQLIVGVNKMDSTEPPYSETRFEEIKKEVSSYIKKIGYNPAAVAFVPISGWHGDNMLEVSSKMPWFKGWTVERKEGKVEGKCLIEALDAILPPTRPTDKALRLPLQDVYKIGGIGTVPVGRVETGVLKPGMVVTFAPAGLTTEVKSVEMHHEALQEAVPGDNVGFNVKNVSVKELRRGYVAGDSKNNPPKGAADFTAQVIVLNHPGQISNGYTPVLDCHTAHIACKFADIKEKCDRRNGKTTEENPKSIKSGDAAIVMLVPSKPMCAEAFQEFPPLGRFAVRDMRQTVAVGVIKAVTFKDAAGKVTKAAEKAQKKK

SEQ ID NO: 27045 - DNA, 1398 bp, Bombyx mori
  CDS (1)..(1398)
atggcttcaataacatttgtgaaaagtttggttagtccagctgtgaaattagttctgaagcaaagccagtgtgcaaatgtacgaaacacaacagtcctgtcaggattgactccattaagtataatactcaagagacattatgcagaaaaacaaatctttgaacgtacaaagccccattgcaatgttggcacaatcggacatgttgatcacgggaagactacactaacagcagcaataactaaggtattatctgatctcaatctggcacagaaaaaaggttatgcagatattgacaatgcccccgaggagaaggctcgaggtatcactattaatgtggctcatgtcgaataccaaaccgaacagaggcattatggacacactgactgcccaggtcatgctgactacattaagaacatgattacaggcacagcacaaatggatggtgctatattagtagtagctgcaactgatggtgtaatgccacaaacacgcgaacatttactacttgccaaacagattggtattcaacatgtggtggtgttcataaacaaagtggatgccgctgatgaggaaatggtagaactggttgagatggagatcagagagttgatgactgagatgggatatgatggtgacaagatacctgttattaaaggttctgctctctgtgctcttgaaggcaaaagtcctgaaataggggctgatgctatcactaaacttcttaaagaagtggacacattcattccaacacctatccgagagctcgaaaaacctttcctgatgccagttgagtctgttcactcaattcctggacgaggaactgtcattacaggccgtttatacagaggtgtcttgaagaagggtactgattgtgaaattgttggtcatggtaaaacaatgaaaacaaccgtaaccggagttgaaatgttccacaaaaccttggaggaagcacaagccggagatcaacttggagctcttgtgcgttccatcaaaagggaacaaatcaaacgcggtatggtcatggcgaagcccggtactgctaaagcccatgacaacttggaagccgctgtatacatacttagcaaggaggaaggcggtagatcgaaaccgttcacatcatacattcagttacaaatgttttcaatgacctgggactgcgccagtcaagttaccattcctgaaaaggaaatggtaatgcccggcgaggacgctacgttaaaactgaaactcttaaaaccaatggtgtgcgaaacaggccaaagattcacactccgccttggagacattactttaggtactggagtcattactaaaataaacaataatctatctgaggaagaaagaagcaaactaatggaaggcaagaaggcgcgagaaaaggcagccgcaaagaagtaa

SEQ ID NO: 27046 - protein, 465 aa, Bombyx mori
MASITFVKSLVSPAVKLVLKQSQCANVRNTTVLSGLTPLSIILKRHYAEKQIFERTKPHCNVGTIGHVDHGKTTLTAAITKVLSDLNLAQKKGYADIDNAPEEKARGITINVAHVEYQTEQRHYGHTDCPGHADYIKNMITGTAQMDGAILVVAATDGVMPQTREHLLLAKQIGIQHVVVFINKVDAADEEMVELVEMEIRELMTEMGYDGDKIPVIKGSALCALEGKSPEIGADAITKLLKEVDTFIPTPIRELEKPFLMPVESVHSIPGRGTVITGRLYRGVLKKGTDCEIVGHGKTMKTTVTGVEMFHKTLEEAQAGDQLGALVRSIKREQIKRGMVMAKPGTAKAHDNLEAAVYILSKEEGGRSKPFTSYIQLQMFSMTWDCASQVTIPEKEMVMPGEDATLKLKLLKPMVCETGQRFTLRLGDITLGTGVITKINNNLSEEERSKLMEGKKAREKAAAKK

SEQ ID NO: 27047 - DNA, 1971 bp, Oryza sativa (japonica cultivar-group)
  CDS (1)..(1971)
atgccacgcaaggttgtctctgggcctgactacgatgacgagtacgacgatgactatgatgagtatgatgaggactacgatgattacggtgagaccgggcacagtgacgacattcagcaccccgtgaaggaggagaaagagtcatcgaagaagtcctcaagtacggtgcctgtgctttggagatgctccatgtgcatgttcgataatcatgaaagcatggtgtattgtgagatgtgtggggtttttcgagaatcctttatgaaatctgccaaggatggttcaataaaagtccatgggataccaagtgattttgggacaccttcgatgccgaaatctgactgtaccaagatgccagtgaatactcgtactacagactttgatggtgaccctgagataaagaatgctagcatatctcatgagaaagttggttccacgcagtacacatctgctggtagctcatcaggcgctgggaaaaagctgaaggaggaccagagtagtagggctagcagttctgcgcagaatgaggatgtggcccagaaactttcttctgacatacagaagctaggtttagaaaagaatgaagtagatactgcaaaaccttatttacctgaagaatataagcctgagaagtggatgttcgctaatgaggaatcaggagtgctgagccaactaaaccttgcaatagtaggtcatgttgattctggcaagtcaacactctctgggagactgctacatctgttaggaaggatatcgaaaaaagatatgcacaagaatgagaaggaggctaaagaaaaaggaaaaggatcatttgcttatgcgtgggctatggatgaaagcagtgaagaaagagaaagaggcgtgacaatgactgtggccgtggcttatttggagactaagaagtaccgtgtagttttgcttgactctccaggccataaagattttgtaccaaatatgatatctggcgcaacgcaagctgatgcagctattcttgttgttgatgcttgcactggttcatttgaagctggcatggacggtgaaggagggaaaagtgttggccagacaaaagaacatgctcagcttattagaagcttcggcgttgaacagcttattgttgcggtcaacaagatggatgccatcggctactcgaaagaaagatttgagttcatcaaggttcaacttggtagttttctgcggtcatgcaatttcaaagattcatctgttacctggattcctcttagtgctgttgaaaatcagaatttgatcaaaattccttctgatgtccgtttaacttcctggtatcaaggattttgtctcttggatgctatagattccttgcagcttccatctcgggatgtttcaaagcccctcattcttcctatctgtgatgttatcaagtctcagtcaacagggcagtttgcagcctttggaaaattagagactggagctattcgaattggttcaaaggttttaatttcaccttgtggggaagtggcggcagtgaaatccatcgagcgggattcaaattcatgtgacatagcaagagctggtgataatgtagcggttagtttacagggtatcgatgggagtaagctaatactaggtgggattctttgcaaccctggtttcccagtgcctgtctctaacttcttggagctaagggttctagtgttagacgtcaccattcctatccttattggctatcaggtcgaatttcacatacatcatgtgaaggaggctgcgagggttacgaaaatcgtggcattgcttgacaaggctggcaaaccaagcaaaactgcacctcgttttcttaagtcaaagcagaatgcagttgtgcaggttaccttagacgctccggtctgtgttcaagaattctccaaatgccgagctcttggcagggcattcttaaggtcttctggaagcacgatcgctgttggagtcgtaacgcgggtactccggcaagatcagaactga

SEQ ID NO: 27048 - protein, 656 aa, Oryza sativa (japonica cultivar-group)
MPRKVVSGPDYDDEYDDDYDEYDEDYDDYGETGHSDDIQHPVKEEKESSKKSSSTVPVLWRCSMCMFDNHESMVYCEMCGVFRESFMKSAKDGSIKVHGIPSDFGTPSMPKSDCTKMPVNTRTTDFDGDPEIKNASISHEKVGSTQYTSAGSSSGAGKKLKEDQSSRASSSAQNEDVAQKLSSDIQKLGLEKNEVDTAKPYLPEEYKPEKWMFANEESGVLSQLNLAIVGHVDSGKSTLSGRLLHLLGRISKKDMHKNEKEAKEKGKGSFAYAWAMDESSEERERGVTMTVAVAYLETKKYRVVLLDSPGHKDFVPNMISGATQADAAILVVDACTGSFEAGMDGEGGKSVGQTKEHAQLIRSFGVEQLIVAVNKMDAIGYSKERFEFIKVQLGSFLRSCNFKDSSVTWIPLSAVENQNLIKIPSDVRLTSWYQGFCLLDAIDSLQLPSRDVSKPLILPICDVIKSQSTGQFAAFGKLETGAIRIGSKVLISPCGEVAAVKSIERDSNSCDIARAGDNVAVSLQGIDGSKLILGGILCNPGFPVPVSNFLELRVLVLDVTIPILIGYQVEFHIHHVKEAARVTKIVALLDKAGKPSKTAPRFLKSKQNAVVQVTLDAPVCVQEFSKCRALGRAFLRSSGSTIAVGVVTRVLRQDQN

SEQ ID NO: 27049 - DNA, 1599 bp, Arabidopsis thaliana
  CDS (1)..(1599)
atggatcttgaggctgagatccgcgcattacagcttgaatcggcagatgaaaacaatggtgttgtcattccagaagttcataactcacatgaagttgagaatttggataaagcaccggaagacttgaaagatgaagtgcaagaatcaattccagttcctgatgagcaagaagcttctgaggatcatgatgaagtaatgcttcatccagtccataatccagcgaaagctaaagagaaagctgctcaagagaaggctgccaaagaggaagctgaagatgttgcagaagcaaataaaaagagacacttgaatgttgtgttcattgggcatgttgatgctggtaagtccacaattggaggacagattctttttcttagtggtcaggtggatgatcgacaaatccaaaagtatgagaaggaagcaaaagacaaaagtagagaaagctggtatatggcatatataatggatacaaatgaagaagagaggcttaagggcaaaacagttgaagttggaagggctcactttgaaacggagagcactagattcactattttagatgctccggggcacaagagttacgtacccaatatgattagtggagcatctcaagcggacattggtgtgctggtgatttcagctcgaaaaggtgaatttgaaacaggatatgagaggggtgggcagacacgtgaacatgttcaacttgccaaaacattgggtgtctctaaactgattgttgttgtgaacaagatggatgacccaactgtgaactggtcgaaagaaaggtacgatgaaatagaacaaaaaatggtaccgttcctgaaagcctctggctacaacacaaagaaagatgttgtcttcttgcctatatctggtctaatgggcaaaaatatggaccagaggatgggtcaagaaatttgtccttggtggagtggccctagcttttttgaagtacttgattctattgaaattccgccacgcgatcctaatggtccattcaggatgccaattattgataagttcaaggacatgggaactgttgttatgggaaaagtagaatctggcagcattcgggagggtgattccttggttgttatgccgaacaaggaacaagtgaaagttgttgctatatattgcgatgaggataaagttaagcgtgcaggaccgggtgagaatttgagagttcgtattactggcattgaagatgaggacatcctttctggttttgttttatccagcattgtaaaccctgtccctgctgttaccgagtttgttgcccaactacaaatccttgagctgcttgacaacgctatttttacagctggttacaaggcaattctccacatccatgcggttgtcgaggagtgtgagattatcgaattgaaaagccaaattgatctcaagacaaggaaaccaatgaaaaagaaagttttgtttgtgaagaatggtgctgctgttgtgtgccgcatccaggttacgaattcaatttgtattgaaaaattctcagatttccctcaacttggaagattcactctacgaactgaaggaaaaacaattgctgttggaaaggttaccgagctcttaagttctgtctcaagcgcttga

SEQ ID NO: 27050 - protein, 532 aa, Arabidopsis thaliana
MDLEAEIRALQLESADENNGVVIPEVHNSHEVENLDKAPEDLKDEVQESIPVPDEQEASEDHDEVMLHPVHNPAKAKEKAAQEKAAKEEAEDVAEANKKRHLNVVFIGHVDAGKSTIGGQILFLSGQVDDRQIQKYEKEAKDKSRESWYMAYIMDTNEEERLKGKTVEVGRAHFETESTRFTILDAPGHKSYVPNMISGASQADIGVLVISARKGEFETGYERGGQTREHVQLAKTLGVSKLIVVVNKMDDPTVNWSKERYDEIEQKMVPFLKASGYNTKKDVVFLPISGLMGKNMDQRMGQEICPWWSGPSFFEVLDSIEIPPRDPNGPFRMPIIDKFKDMGTVVMGKVESGSIREGDSLVVMPNKEQVKVVAIYCDEDKVKRAGPGENLRVRITGIEDEDILSGFVLSSIVNPVPAVTEFVAQLQILELLDNAIFTAGYKAILHIHAVVEECEIIELKSQIDLKTRKPMKKKVLFVKNGAAVVCRIQVTNSICIEKFSDFPQLGRFTLRTEGKTIAVGKVTELLSSVSSA

SEQ ID NO: 27051 - DNA, 2004 bp, Arabidopsis thaliana
  CDS (1)..(2004)
atgcctcgtaaaggattatccaatttcgatgattatgatgatggttttgatgatgatgacgatgcttttgattatgactatgatgttgatatagatgaacatgaagaagctgctgctgaaccaaaggaagaaattgctaaaacgcaagggctttggcgatgtgctatctgtacatatgacaatgttgagactatgtttgtgtgtgatatctgcggtgttcttcgtcatcctgtcgccggaaatcaaagtatcaataagaatacagcacctttcaagtttgatgctccatcgccagatgatttagtctccaatggactaacatcctcaaaaactggtccaaaaggctcaggtgatgctagcatgagacagaaggagaagcaagatagcgtagaacagaaacctttaaagaaaggaggagatagttcagaaacaagctcccgaggtagacatgataaacttgatgataagggcggtgctggcggcataaaatcaggcaaaagtttgccaaaagcaaaagcagatatgtctaatgagacaagttcgtcctctaaatatatggagacgtcggagagtcttactggtactatgaacaagatgtctttgattggggaaacagaaaactctagcgatattaaaattagaggaccaaaatcacaatctaagcataagccagaggagtggatgcttcttgataaagaatcagatgcactaagccagcttaatcttgccatcgtggggcatgttgattccggtaagtctacactttcgggtagattattgcatcttttgggaagaatatcgcagaagcaaatgcacaagtatgagaaagaagcaaagttgcagggcaaagggtcctttgcatatgcctgggcattggatgagagtgctgaagagagggaacgaggaataacaatgactgtggctgttgcttatttcaattccaaaagacatcatgttgttttgctcgactctcctggacacaaagattttgttccaaacatgatagcaggagcaacacaagcagatgctgcgattcttgtcatagatgcatctgttggtgcttttgaagctggttttgataatttgaaagggcagacaagggagcatgcacgggttctgagaggttttggcgtggagcaagtcatagttgcaatcaacaaaatggatattgttggctactcaaaggaaagatttgatttgattaagcagcacgttggatcttttttgcaatcctgtcgttttaaggattcttctctgacatggattccattaagtgccatggaaaaccaaaacttggtggcagctccctctgataaccgcctatcctcatggtatcaaggtccatgtttattggatgccgtcgactctgtcaagtctcctgatagagacgtctcaaagcctctactcatgcctatatgtgacgctgtaagatcaacttcgcaagggcaggtatctgcatgtggcaaacttgaagctggagctgtccggccaggatctaaggtaatggttatgccatcaggagatcaaggaaccatacgatcactagagcgtgactctcaggcttgcaccattgcaagagctggagataacgtagcgttagcgttgcaagggatcgatgcaaatcaagtaatggcaggagatgtattgtgccatcctgatttccctgtatcagtagcaactcatttggaattgatggtgctcgtcttggaaggcgcaacaccgatcttgctcggttctcagttggagtttcatgtgcatcatgcaaaggaagcagcaacagttgtgaaacttgtggcaatgcttgatcccaaaacagggcagccaacaaagaagtctcctcgttgtctaactgctaaacagagcgcaatgcttgaggttagtctccaaaatccagtatgtgtggagacattttctgagagtagagctcttggaagagtgttccttagatcatcgggaagaactgttgctatgggcaaagttactcggattatccaagactcataa

SEQ ID NO: 27052 - protein, 667 aa, Arabidopsis thaliana
MPRKGLSNFDDYDDGFDDDDDAFDYDYDVDIDEHEEAAAEPKEEIAKTQGLWRCAICTYDNVETMFVCDICGVLRHPVAGNQSINKNTAPFKFDAPSPDDLVSNGLTSSKTGPKGSGDASMRQKEKQDSVEQKPLKKGGDSSETSSRGRHDKLDDKGGAGGIKSGKSLPKAKADMSNETSSSSKYMETSESLTGTMNKMSLIGETENSSDIKIRGPKSQSKHKPEEWMLLDKESDALSQLNLAIVGHVDSGKSTLSGRLLHLLGRISQKQMHKYEKEAKLQGKGSFAYAWALDESAEERERGITMTVAVAYFNSKRHHVVLLDSPGHKDFVPNMIAGATQADAAILVIDASVGAFEAGFDNLKGQTREHARVLRGFGVEQVIVAINKMDIVGYSKERFDLIKQHVGSFLQSCRFKDSSLTWIPLSAMENQNLVAAPSDNRLSSWYQGPCLLDAVDSVKSPDRDVSKPLLMPICDAVRSTSQGQVSACGKLEAGAVRPGSKVMVMPSGDQGTIRSLERDSQACTIARAGDNVALALQGIDANQVMAGDVLCHPDFPVSVATHLELMVLVLEGATPILLGSQLEFHVHHAKEAATVVKLVAMLDPKTGQPTKKSPRCLTAKQSAMLEVSLQNPVCVETFSESRALGRVFLRSSGRTVAMGKVTRIIQDS

SEQ ID NO: 27053 - DNA, 1206 bp, Borrelia burgdorferi B31
  CDS (1)..(1206): transl_table=11
atgaaatttaggaggttagtcatggcaaaagaagtttttcaaagaacaaagccgcacatgaatgttggaacaataggtcatgttgatcatggtaaaacaacactaacagcggctattagtatttattgttcaaaattaaataaagatgcaaaagcattaaagtatgaagatattgataatgcacctgaagagaaagcaagaggaataacaattaatgctaggcatattgagtacgaaacagctaatagacattatgctcatgtagattgtccaggccatgccgattatataaaaaatatgattacaggagcagctcaaatggatgcagcgatacttttagttgctgctgatagtggtgctgagcctcaaacaaaagagcatttgcttcttgctcaaagaatgggaataaagaaaataatagtttttttaaataaattggacttagcagatcctgaacttgttgagcttgttgaagttgaagttttagaacttgttgaaaaatatggcttttcagctgatactccaataatcaaaggttcagcttttggggctatgtcaaatccagaagatcctgaatctacaaaatgcgttaaagaacttcttgaatctatggataattattttgatcttccagaaagagatattgacaagccatttttgcttgctgttgaagatgtattttctatttcaggaagaggcactgttgctactgggcgtattgaaagaggtattattaaagttggtcaagaagttgaaatagttggaattaaagaaaccagaaaaactactgttactggtgttgaaatgttccagaaaattcttgagcaaggtcaagcaggggataatgttggtcttcttttgagaggcgttgataaaaaagacattgagagggggcaagttttgtcagctccaggtacaattactccacacaagaaatttaaagcttcaatttattgtttgactaaagaagaaggcggtaggcacaagccatttttcccagggtatagaccacagttcttttttagaacaaccgatgttactggagttgttgctttagagggcaaagaaatggttatgcctggtgataatgttgatattattgttgagctgatctcttcaatagctatggataagaatgtagaatttgctgttcgagaaggtggaagaaccgttgcttcaggaagaattcttgagatattggaatag

SEQ ID NO: 27054 - protein, 401 aa, Borrelia burgdorferi B31
MKFRRLVMAKEVFQRTKPHMNVGTIGHVDHGKTTLTAAISIYCSKLNKDAKALKYEDIDNAPEEKARGITINARHIEYETANRHYAHVDCPGHADYIKNMITGAAQMDAAILLVAADSGAEPQTKEHLLLAQRMGIKKIIVFLNKLDLADPELVELVEVEVLELVEKYGFSADTPIIKGSAFGAMSNPEDPESTKCVKELLESMDNYFDLPERDIDKPFLLAVEDVFSISGRGTVATGRIERGIIKVGQEVEIVGIKETRKTTVTGVEMFQKILEQGQAGDNVGLLLRGVDKKDIERGQVLSAPGTITPHKKFKASIYCLTKEEGGRHKPFFPGYRPQFFFRTTDVTGVVALEGKEMVMPGDNVDIIVELISSIAMDKNVEFAVREGGRTVASGRILEILE

SEQ ID NO: 27055 - DNA, 1185 bp, Neisseria meningitidis MC58
  CDS (1)..(1185): transl_table=11
atggctaaggaaaaatttgaacgtagcaaaccgcacgtaaacgttggcaccatcggtcacgttgaccatggtaaaaccactctgactgctgctttgactactattttgtctaaaaaattcggtggcgctgcaaaagcttatgaccaaatcgacaacgctcctgaagaaaaagctcgtggtattaccattaatacctcacacgtagaatacgaaactgaaacccgtcactacgcacacgtagactgcccggggcacgccgactacgttaaaaacatgattaccggcgccgcacaaatggacggtgcaatcctggtatgttccgcagccgacggccctatgccgcaaacccgcgaacacatcctgctggcccgccaagtaggcgtaccttacatcatcgtgttcatgaacaaatgcgacatggtcgacgatgccgagctgttggaactggttgaaatggaaatccgcgacctgctgtccagctacgacttccccggcgatgactgcccgattgtacaaggttccgcactgaaagccttggaaggcgatgccgcttacgaagaaaaaatcttcgaactggctgccgcattggacagctacatcccgactcccgagcgagccgtggacaaaccgttcctgctgcctatcgaagacgtgttctccatttccggccgcggtacagtagtaaccggccgtgtagagcgcggtatcatccacgttggtgacgagattgaaatcgtcggtctgaaagaaacccaaaaaaccacttgtaccggtgttgaaatgttccgcaaactgctggacgaaggtcaggcgggcgacaacgtaggcgtattgctgcgcggtaccaaacgtgaagacgtggaacgcggtcaggtattggctaaaccgggtactatcactcctcacaccaaattcaaagcagaagtatacgtactgagcaaagaagagggtggtcgtcacactccgttcttcgccaactaccgtccgcaattctacttccgtaccaccgacgtaaccggcgcggttactttggaagaaggtgtggaaatggtaatgccgggtgaaaacgtaaccatcaccgtagaactgattgcgcctatcgctatggaagaaggcctgcgctttgcgattcgcgaaggcggccgtaccgtgggtgccggcgtggtttcttctgttatcgcttaa

SEQ ID NO: 27056 - protein, 394 aa, Neisseria meningitidis MC58
MAKEKFERSKPHVNVGTIGHVDHGKTTLTAALTTILSKKFGGAAKAYDQIDNAPEEKARGITINTSHVEYETETRHYAHVDCPGHADYVKNMITGAAQMDGAILVCSAADGPMPQTREHILLARQVGVPYIIVFMNKCDMVDDAELLELVEMEIRDLLSSYDFPGDDCPIVQGSALKALEGDAAYEEKIFELAAALDSYIPTPERAVDKPFLLPIEDVFSISGRGTVVTGRVERGIIHVGDEIEIVGLKETQKTTCTGVEMFRKLLDEGQAGDNVGVLLRGTKREDVERGQVLAKPGTITPHTKFKAEVYVLSKEEGGRHTPFFANYRPQFYFRTTDVTGAVTLEEGVEMVMPGENVTITVELIAPIAMEEGLRFAIREGGRTVGAGVVSSVIA

SEQ ID NO: 27057 - DNA, 1185 bp, Escherichia coli O157:H7 EDL933
  CDS (1)..(1185): transl_table=11
  misc_feature (336)..(336): n is a, g, c or t
  misc_feature (353)..(353): n is a, g, c or t
  misc_feature (354)..(354): n is a, g, c or t
  misc_feature (355)..(355): n is a, g, c or t
atgtctaaagaaaagtttgaacgtacaaaaccgcacgttaacgtcggtactatcggccacgttgaccatggtaaaacaacgctgaccgctgcaatcactaccgtactggctaaaacctacggcggtgctgctcgcgcattcgaccagatcgataacgcgccggaagaaaaagctcgtggtatcaccatcaacacttctcacgttgaatacgacaccccgacccgtcactacgcacacgtagactgcccggggcacgccgactatgttaaaaacatgatcaccggtgctgctcagatggacggcgcgatcctggtagttgctgcgactgacgggccnatgccccaaacttgtgnnnacattctgttgggtcgtcaggtaggcgttccgtacatcatcgtgttcctgaacaaatgcgacatggttgatgacgaagagctgctggaactggttgaaatggaagttcgtgaacttctgtctcagtacgacttcccgggcgacgacactccgatcgttcgtggttctgctctgaaagcgctggaaggcgacgcagagtgggaagcgaaaatcctggaactggctggcttcttggattcctacattccggaaccagagcgtgcgattgacaagccgttcctgctgccgatcgaagacgtattctccatctccggtcgtggtaccgttgttaccggtcgtgtagaacgcggtatcatcaaagttggtgaagaagttgaaatcgttggtatcaaagagactcagaagtctacctgtactggcgttgaaatgttccgcaaactgctggacgaaggccgtgctggtgagaacgtaggtgttctgctgcgtggtatcaaacgtgaagaaatcgaacgtggtcaggtactggctaagccgggcaccatcaagccgcacaccaagttcgaatctgaagtgtacattctgtccaaagatgaaggcggccgtcatactccgttcttcaaaggctaccgtccgcagttctacttccgtactactgacgtgactggtaccatcgaactgccggaaggcgtagagatggtaatgccgggcgacaacatcaaaatggttgttaccctgatccacccgatcgcgatggacgacggtctgcgtttcgcaatccgtgaaggcggccgtaccgttggcgcgggcgttgtagcaaaagttctgagctaa

SEQ ID NO: 27058 - protein, 394 aa, Escherichia coli O157:H7 EDL933
  misc_feature (118)..(118): The Xaa at location 118 stands for Ala, Asp, Glu, Gly, or Val.
  misc_feature (119)..(119): The Xaa at location 119 stands for Asn, Asp, His, or Tyr.
MSKEKFERTKPHVNVGTIGHVDHGKTTLTAAITTVLAKTYGGAARAFDQIDNAPEEKARGITINTSHVEYDTPTRHYAHVDCPGHADYVKNMITGAAQMDGAILVVAATDGPMPQTCXXILLGRQVGVPYIIVFLNKCDMVDDEELLELVEMEVRELLSQYDFPGDDTPIVRGSALKALEGDAEWEAKILELAGFLDSYIPEPERAIDKPFLLPIEDVFSISGRGTVVTGRVERGIIKVGEEVEIVGIKETQKSTCTGVEMFRKLLDEGRAGENVGVLLRGIKREEIERGQVLAKPGTIKPHTKFESEVYILSKDEGGRHTPFFKGYRPQFYFRTTDVTGTIELPEGVEMVMPGDNIKMVVTLIHPIAMDDGLRFAIREGGRTVGAGVVAKVLS

SEQ ID NO: 27059 - DNA, 1470 bp, Drosophila melanogaster
  CDS (1)..(1470)
atgtcacatgcatttgccgccgccgtctgccggtccaccgcatccatgtcattggccctgcgctgcagccggcgcgccatgagctctgccagaatgctgcgtatggcgggtgccactgccacctccacggcctgcaaggattggcagagaaacggactacttgctgcgcccagaaccggcaacatgcagcagtacctgcgcgagtacgccaacgagaagaaggtgttcgagcgaaccaagccccattgcaatgtgggcaccattggccatgtggatcacggcaagaccacgctcacggcggccattaccaaggtcctggccgacaagcagctggccgagagcaagaagtacaatgaaatcgacaatgcgcccgaggagaaggctcgtggtattaccatcaatgtagcccacgtggagtaccagacggagacgcgtcactacggccacacagattgtccgggacatgccgattatattaagaacatgatcaccggcacagcccagatggatggcgccattctcgttgtggccgccaccgatggcgccatgccccaaactcgcgagcatatgctgctagccaagcagatcggcattgatcacatcgtggtgttcatcaacaaggtggacgccgccgatgaggagatggtcgacctggtggagatggagatccgagagctgcttaccgagatgggctatgatggtgacaagatccctgtggtaaagggctcggcgctgtgcgccctcgaggacaagagtcccgagatcggcaaggaggcgatcctgaaactgctccaggaggtggatagcttcatccccacgcctgtgcgcgagctggacaagcccttcctgctgcctgttgagaatgtgtattcgattcccggacgcggcaccgtcgtcactggtcgcctggagcgcggagtggtcaagaagggcatggagtgcgagttcgtgggctataacaaggtgctgaagtcgacggtgacgggcgtggagatgttccaccagattctggaggaggcgcaagccggtgatcagctgggagctctggtgcgcggcgttaagcgagatgacatcaagcgcggcatggtcatgtgcaagccgggcagtgtgaaggcactcgatcagctggaggcccaggtgtacatcctgtccaaggatgaaggcggtcgcacaaagcccttcatgtccttcatccaactgcagatgttctcccgcacctgggactgtgccgtgcaggtgcagattcccgataaggagatggtcatgcccggcgaagacaccaagctcattctgcgcctcatccggccaatggtcctggagcagggacaacgcttcacgctgcgtgacggaaacctgaccctgggcactggtgtcgtcaccagcactctgcccccattgactgaatcgcagcgatccgagttgacggagggcaagaaggcgcgcgagaagaaggtggcggctaagaagtag

SEQ ID NO: 27060 - protein, 489 aa, Drosophila melanogaster
MSHAFAAAVCRSTASMSLALRCSRRAMSSARMLRMAGATATSTACKDWQRNGLLAAPRTGNMQQYLREYANEKKVFERTKPHCNVGTIGHVDHGKTTLTAAITKVLADKQLAESKKYNEIDNAPEEKARGITINVAHVEYQTETRHYGHTDCPGHADYIKNMITGTAQMDGAILVVAATDGAMPQTREHMLLAKQIGIDHIVVFINKVDAADEEMVDLVEMEIRELLTEMGYDGDKIPVVKGSALCALEDKSPEIGKEAILKLLQEVDSFIPTPVRELDKPFLLPVENVYSIPGRGTVVTGRLERGVVKKGMECEFVGYNKVLKSTVTGVEMFHQILEEAQAGDQLGALVRGVKRDDIKRGMVMCKPGSVKALDQLEAQVYILSKDEGGRTKPFMSFIQLQMFSRTWDCAVQVQIPDKEMVMPGEDTKLILRLIRPMVLEQGQRFTLRDGNLTLGTGVVTSTLPPLTESQRSELTEGKKAREKKVAAKK

SEQ ID NO: 27061 - DNA, 1221 bp, Brucella melitensis 16M
  CDS (1)..(1221): transl_table=11
ttgtgctggcgcttgagcggttctagaacaaagagaacaacggcgatggcaaagagtaagtttgaacgtacgaagccccatgttaacatcggcacgattggtcacgttgaccatggcaagacgtcgctgacggcggcgatcacgaagtttttcggcgaattcaaggcgtatgaccagatcgacgctgcgcctgaagaacgcgcccgcggcatcacgatctcgacggcacacgtcgagtacgaaaccgcaaaccgtcactatgcgcacgtcgattgccccggccacgccgactatgtgaagaacatgatcaccggcgctgcccagatggatggcgcgatcctggtggtttcggctgctgacggcccgatgccgcagacccgcgagcacattctgcttgcccgtcaggttggcgttccggcgattgtcgtgttcctcaacaagtgcgaccaggttgacgatgcagaactgctcgaactggttgaactggaagtgcgcgaacttctgtcgaagtacgaattccccggcgacgaaatcccgatcatcaagggctcggctcttgctgctctggaagattcttccaaggaactgggcgaagatgccatccgcaacctgatggacgcggttgacagctacattccgaccccggaacgcccgatcgaccagccgttcctgatgccgatcgaagacgtgttctcgatctccggccgtggtacggttgtgacgggtcgcgttgagcgcggtatcgttaaggtcggtgaagaagttgaaatcgtcggcatcaaggcgacgacgaagaccacggttaccggcgttgaaatgttccgcaagctgctcgaccagggccaggctggcgacaacattggcgcgctgatccgcggcgttggccgtgaagacgttgaacgcggccaggttctctgcaagccgggttctgtgaagccgcacaccaagtttaaggcagaagcctatattctgaccaaggatgaaggtggccgtcatacgccgttcttcaccaactaccgtccgcagttctacttccgtacgacggacgtgacgggtgttgtgacgcttccggctggcacggaaatggtcatgcctggcgataacgtcgccatggacgttaccctgatcgtgccgatcgccatggaagagaagcttcgcttcgctatccgtgaaggcggccgcaccgtcggtgccggcatcgtctcgtcgatcatcgagtaa

SEQ ID NO: 27062 - protein, 406 aa, Brucella melitensis 16M
MCWRLSGSRTKRTTAMAKSKFERTKPHVNIGTIGHVDHGKTSLTAAITKFFGEFKAYDQIDAAPEERARGITISTAHVEYETANRHYAHVDCPGHADYVKNMITGAAQMDGAILVVSAADGPMPQTREHILLARQVGVPAIVVFLNKCDQVDDAELLELVELEVRELLSKYEFPGDEIPIIKGSALAALEDSSKELGEDAIRNLMDAVDSYIPTPERPIDQPFLMPIEDVFSISGRGTVVTGRVERGIVKVGEEVEIVGIKATTKTTVTGVEMFRKLLDQGQAGDNIGALIRGVGREDVERGQVLCKPGSVKPHTKFKAEAYILTKDEGGRHTPFFTNYRPQFYFRTTDVTGVVTLPAGTEMVMPGDNVAMDVTLIVPIAMEEKLRFAIREGGRTVGAGIVSSIIE

SEQ ID NO: 27063 - DNA, 1371 bp, Drosophila melanogaster
  CDS (1)..(1371)
atgagcggactccttccgaagttgtggcgccaatgtgaagcggggctagtgcgccgtatcagccaggcactgattggacccggcgccagtcagagccggtggacagggacccgtctcctggccaccagtgcggataaaaatccggccccggggctgcgggagctgccccactgcaatgtgggcaccattggtcacgttgaccatggtaaaacgaccctgaccgccgccattaccagaatccagtcacagaagggtctggcggagtacctgtcctacgaccagattgatcgggcgcccgaggagaaggcgcgtggcataactataaatgcttgccatattgggtattccactacagaacgcacctacgctcacacggattgcccgggtcatgcggactacataaagaacatgatctcgggcgcctcccaaatggatggcgccattctagtggtggctgccaccgatggtcaaatgccccagactcgcgagcaccttcttctggcaaaacaagtgggcatccagcgcatcatagtgtttataaacaaggccgatttggtggaccaggaggtgctggaactggtcgagatcgagatgcgtgagatgctaagtgatttcggctttgatggcgtgaatagcccggtaatttgtggctcagcgctgctggcccttcgcgaagataaatcggagttcggggttccgtcaattgaaaagctacttgagcaatgcgactcttacataccaacgccgcagcgcgatatctcgtccccatttatcctgccaatagacaatgcttttacggtacccggaaggggaaccgtggtcgtgggaaccatcaaaaggggcaccattccccggaacgcggatgcagacctactgggcttcaatcagaacctgaagacaagcatcagcgacatccagatattccggaagagcgtgcctcaggcacaggctggcgagaacgtcggcgcactgctgcgaggtattaagatatccgccgtggagcggggaatgctactgtgcgcaaccggctccgaggatatatccaaccactttgaaggctccatgtatctgctatcgcgggccgagggtggtcgtgtcaagcccatgctctccaagtatatacagcagctcttcagccagacgtggaatgttccagctagaattgacatagttccaagtgaggctatgcttatgccgggtgagcatggccaggtgcgcgtcacgctgctgcggaaaatggtcatgactccgggccaagccttcacaattcgcgagaacggagcgacggtggctaccggtatggtgacgcagcgcctgccgtcccttgacctgcccaagaacaagttatcaaaagtcttcgtggattgttaa

SEQ ID NO: 27064 - protein, 456 aa, Drosophila melanogaster
MSGLLPKLWRQCEAGLVRRISQALIGPGASQSRWTGTRLLATSADKNPAPGLRELPHCNVGTIGHVDHGKTTLTAAITRIQSQKGLAEYLSYDQIDRAPEEKARGITINACHIGYSTTERTYAHTDCPGHADYIKNMISGASQMDGAILVVAATDGQMPQTREHLLLAKQVGIQRIIVFINKADLVDQEVLELVEIEMREMLSDFGFDGVNSPVICGSALLALREDKSEFGVPSIEKLLEQCDSYIPTPQRDISSPFILPIDNAFTVPGRGTVVVGTIKRGTIPRNADADLLGFNQNLKTSISDIQIFRKSVPQAQAGENVGALLRGIKISAVERGMLLCATGSEDISNHFEGSMYLLSRAEGGRVKPMLSKYIQQLFSQTWNVPARIDIVPSEAMLMPGEHGQVRVTLLRKMVMTPGQAFTIRENGATVATGMVTQRLPSLDLPKNKLSKVFVDC

SEQ ID NO: 27065 - DNA, 1230 bp, Thermosynechococcus elongatus BP-1
  CDS (1)..(1230): transl_table=11
atggcacgcgctaaatttgaacgaaccaaaccccacgttaacgttggtaccattggtcacgtcgaccacggtaaaacgacactgactgcagccatcaccatgacactggctgcccaggggaaagctcaggctcgcaaatacgatgagattgatgctgcccctgaagaaaaagcccgtgggattacgatcaacaccgctcacgtggagtatgaaactgagaaacgccactatgcccacgtggattgccccggccacgctgactatgtgaaaaacatgatcacgggtgccgctcaaatggacggtgccattctggtcgtggccgcaacggatggtgcaatgccccaaaccaaagagcacattctcttggcccgtcaggtgggggtgcccagcatcgtcgtcttcctgaacaaagtggatatggtggatgacgaagagctgttggagctggtggaactagaactgcgagaactgcttaatgaatatgaattccccggcgacgaagtgcccatcatccgtggttcgggtctgaaagccctcgaagccatgaccgccaacccgaaaactctgcgcggtgaaaacgagtgggtagataaaatctacgagctcatggatgccgtggataactacattcctacccctgagcgggatgtggataagcccttcctgatggctgtggaagatgttttctccattaccggtcgcggtactgtggcgacgggtcggattgagcgcggtcgcattaaactcaacgaaaccgttgaactcgtgggcctgcgggaaacgcggacaacgacggtcaccggtattgaaatgtttaagaagagcctcgaagaagggattgccggtgacaacgccggtttgctcctgcggggtctaaaaaaagaggatgtggagcgggggatggtgattgctaagcccggctccattacgccccacaccaagtttgagggtgaagtgtacgtgctcactgaaaaagagggcggtcgtaaaactcccttctttgcgggttatcgtcctcagttctatgtgcgtaccactgatgtgactggcacgattacctcctttacgtctgacgatggtagtgccgctgaaatggtgatgcctggtgaccgcatcaaaatgaccgtggaactgatccagcccattgccattgagcaggggatgcgctttgcgatccgtgaaggtggtcgtaccattggggcgggtgtcgtctccaaaatcattgagtag

SEQ ID NO: 27066 - protein, 409 aa, Thermosynechococcus elongatus BP-1
MARAKFERTKPHVNVGTIGHVDHGKTTLTAAITMTLAAQGKAQARKYDEIDAAPEEKARGITINTAHVEYETEKRHYAHVDCPGHADYVKNMITGAAQMDGAILVVAATDGAMPQTKEHILLARQVGVPSIVVFLNKVDMVDDEELLELVELELRELLNEYEFPGDEVPIIRGSGLKALEAMTANPKTLRGENEWVDKIYELMDAVDNYIPTPERDVDKPFLMAVEDVFSITGRGTVATGRIERGRIKLNETVELVGLRETRTTTVTGIEMFKKSLEEGIAGDNAGLLLRGLKKEDVERGMVIAKPGSITPHTKFEGEVYVLTEKEGGRKTPFFAGYRPQFYVRTTDVTGTITSFTSDDGSAAEMVMPGDRIKMTVELIQPIAIEQGMRFAIREGGRTIGAGVVSKIIE

SEQ ID NO: 27067 - DNA, 1221 bp, Chaetosphaeridium globosum
  CDS (1)..(1221): transl_table=11
atgaatatatttcgtgacaaaaaaacccatataaatattgctacaattggacattttaatcatggtaaaacaactttaagcgcagcgatagctatgacattggctaataaaaaatatagattagataaaaagtcaattaaagttactcttgaagagaaaaatcaaggaataggtatttatacacatcatttccaatatgaaacaacactgcgccattattcacatacagattgtccaggtcatactgattatataaataatatgattgcgggtatatcgcaagtcgatagtactattttagttgtatctgctgtagatggttctatgtctcaaacaaaagaacatctcttaattgctaaattattaggaatatctagttttattgtatttataaataaagaagatcaattagatgatgataaatttgtttatttagtacaaaaagaaatttctcaatttttaatgtctcatggttttcaaacgaataaaattcccatagtgtcaggttctgctttattagcacttgaaaccctgattcaacaacctaatgtattgagaggagaaaattattgggtagacaaaatttatacattaattgaattacttgattcatatatacctaaacctaaaagaaaaaaagacaaacattttttaatgtggatagattcggtaaaattcctacctaatataggtcctatagcgatgggtagaatcgaacaaggtacaataaaagttggtgaatttattgatatagtcggcttcagagaaacgagaacggctaaaataattagtttggaattttttaatcaatcgtgtatgcaagttctagcgggtgatgatataggtgtttcaattgaaggtacaaaaaatcataatgatataaaaaaaggaatgattatttcaacaccgggtacaataaaatcatggctagaatttgaggcccaggtttatattctaaaacgtgaagaaggaggacgtactagtcctttttttaaaggttattgccctcaatttttttttaaaactacttgtgtaacaggtagaattgaagctattgaatatactacaggtagtaaaacttggatgattatgcctggtgataaactaaaaatacaagtaaatttggtctatccaataggaatcaaaaaaagaatgagatttttaattagagaaggaggtgttttagttggggtaggtattattagtaatttaataaagtaa

SEQ ID NO: 27068 - protein, 406 aa, Chaetosphaeridium globosum
MNIFRDKKTHINIATIGHFNHGKTTLSAAIAMTLANKKYRLDKKSIKVTLEEKNQGIGIYTHHFQYETTLRHYSHTDCPGHTDYINNMIAGISQVDSTILVVSAVDGSMSQTKEHLLIAKLLGISSFIVFINKEDQLDDDKFVYLVQKEISQFLMSHGFQTNKIPIVSGSALLALETLIQQPNVLRGENYWVDKIYTLIELLDSYIPKPKRKKDKHFLMWIDSVKFLPNIGPIAMGRIEQGTIKVGEFIDIVGFRETRTAKIISLEFFNQSCMQVLAGDDIGVSIEGTKNHNDIKKGMIISTPGTIKSWLEFEAQVYILKREEGGRTSPFFKGYCPQFFFKTTCVTGRIEAIEYTTGSKTWMIMPGDKLKIQVNLVYPIGIKKRMRFLIREGGVLVGVGIISNLIK

SEQ ID NO: 27069 - DNA, 1197 bp, Streptococcus agalactiae 2603V/R
  CDS (1)..(1197): transl_table=11
atggcaaaagaaaaatacgatcgtagtaaaccacacgttaacattggtacaatcggacacgttgaccacggtaaaactactttaacagcagctatcacaactgtattggcacgtcgcttgcctacttcagttaaccaaccaaaagattacgcttctatcgatgctgctccagaagagcgcgaacgcggaatcacaatcaacactgcacacgttgagtacgaaactgaaaaacgtcactatgcccacatcgacgctccaggacacgcggactacgttaaaaacatgatcactggtgctgctcaaatggacggagctatccttgtagttgcttcaactgatggaccaatgccacaaactcgtgagcacatccttctttcacgtcaagttggtgttaaacaccttatcgtattcatgaacaaagttgaccttgttgatgatgaagaattgcttgaattggttgaaatggaaattcgtgaccttctttcagaatacgacttcccaggtgatgaccttccagttatccaaggttcagctcttaaagcacttgaaggcgacgaaaaatacgaagacatcatcatggaattgatgagcactgttgatgagtacattccagaaccagaacgtgatactgacaaacctttacttcttccagttgaagatgtattctcaatcactggacgtggtacagttgcttcaggacgtatcgaccgtggtactgttcgtgtcaacgacgaagttgaaatcgttggtattaaagaagatatccaaaaagcagttgttactggtgttgaaatgttccgtaaacaacttgacgaaggtcttgcaggggacaacgttggtgttcttcttcgtggtgttcaacgtgatgaaatcgaacgtggtcaagttcttgctaaaccaggttcaatcaacccacacactagatttaaaggtgaagtttacatcctttctaaagaagaaggtggacgtcatactccattcttcaacaactaccgtccacaattctacttccgtacaactgacgtaacaggttcaatcgaacttccagcaggaacagaaatggttatgcctggtgataacgttactatcgaagttgaattgattcacccaatcgccgtagaacaaggtactactttctcaatccgtgaaggtggacgtactgttggttcaggtatcgtttcagaaatcgaagcttaa

SEQ ID NO: 27070 - protein, 398 aa, Streptococcus agalactiae 2603V/R
MAKEKYDRSKPHVNIGTIGHVDHGKTTLTAAITTVLARRLPTSVNQPKDYASIDAAPEERERGITINTAHVEYETEKRHYAHIDAPGHADYVKNMITGAAQMDGAILVVASTDGPMPQTREHILLSRQVGVKHLIVFMNKVDLVDDEELLELVEMEIRDLLSEYDFPGDDLPVIQGSALKALEGDEKYEDIIMELMSTVDEYIPEPERDTDKPLLLPVEDVFSITGRGTVASGRIDRGTVRVNDEVEIVGIKEDIQKAVVTGVEMFRKQLDEGLAGDNVGVLLRGVQRDEIERGQVLAKPGSINPHTRFKGEVYILSKEEGGRHTPFFNNYRPQFYFRTTDVTGSIELPAGTEMVMPGDNVTIEVELIHPIAVEQGTTFSIREGGRTVGSGIVSEIEA

SEQ ID NO: 27071 - DNA, 1200 bp, Bifidobacterium longum NCC2705
  CDS (1)..(1200): transl_table=11
atggcaaaggaaaagtacgagcgtactaagccgcacgttaacatcggtaccatcggccacgtcgaccacggtaagactaccctgactgccgccatctccaaggtgctgcacgaggagttcccggatgtcaacccggagtacgacttcaaccagatcgattccgctccggaagaggccgcccgcggtatcaccatcaacatcgcccacatcgagtaccagaccgagaagcgtcactacgctcacgtcgactgcccgggccacgccgacttcgtgaagaacatgattaccggtgctgcccagatggatggcgctatcctcgttgtggccgccaccgacggcccgatggcccagactcgcgagcacgtgctgctcgcccgtcaggttggcgttccgaagatcctcgtcgccctgaacaagtgcgacatggtcgacgatgaagagctcatcgagctcgtcgaagaagaggtccgcgacctcctcgacgagaacggcttcgaccgtgactgcccggtcatccacacctccgcttacggtgctctgcacgacgacgctccggaccacgagaagtgggtccagtccgttaaggacctcatggacgctgtcgacgactacatcccgaccccggttcacgacctggacaagccgttcctgatgccgatcgaggacgtcttcaccatctccggccgtggtaccgttgtcaccggtcgtgtcgagcgtggccagctggccgtcaacaccccggtcgagatcgttggtatccgtccgacccagcagaccaccgtcacctccatcgagaccttccacaagaccatggacgcctgcgaggctggcgacaacaccggtctgcttctgcgtggtctcggccgtgacgatgtcgagcgtggccaggttgtggccaagccgggctccgtcaccccgcacaccaagttcgagggcgaagtctacgtgctgaccaaggacgaaggcggccgtcactcgccgttcttctccaactaccgtccgcagttctacttccgcaccaccgacgtcaccggcgtcatcgagctgccggaaggcgtcgagatggttcagccgggcgaccacgctaccttcaccgttgagctgattcagcccatcgctatggaggaaggcctgaccttcgctgtgcgtgaaggtggccacaccgtcggctccggtcgtgtgaccaagatcctcgcctga

SEQ ID NO: 27072 - protein, 399 aa, Bifidobacterium longum NCC2705
MAKEKYERTKPHVNIGTIGHVDHGKTTLTAAISKVLHEEFPDVNPEYDFNQIDSAPEEAARGITINIAHIEYQTEKRHYAHVDCPGHADFVKNMITGAAQMDGAILVVAATDGPMAQTREHVLLARQVGVPKILVALNKCDMVDDEELIELVEEEVRDLLDENGFDRDCPVIHTSAYGALHDDAPDHEKWVQSVKDLMDAVDDYIPTPVHDLDKPFLMPIEDVFTISGRGTVVTGRVERGQLAVNTPVEIVGIRPTQQTTVTSIETFHKTMDACEAGDNTGLLLRGLGRDDVERGQVVAKPGSVTPHTKFEGEVYVLTKDEGGRHSPFFSNYRPQFYFRTTDVTGVIELPEGVEMVQPGDHATFTVELIQPIAMEEGLTFAVREGGHTVGSGRVTKILA

SEQ ID NO: 27073 - DNA, 1185 bp, Shewanella oneidensis MR-1
  CDS (1)..(1185): transl_table=11
atggctaaagctaaatttgaacgttctaagccccatgtaaacgtgggcaccatcggtcacgttgaccatggtaaaaccactctgactgcagctatctctcacgtactggctaagacctacggtggtgaagctaaagacttctctcaaatcgataacgctccagaagagcgtgagcgcggtattaccatcaatacctctcacatcgaatatgacacgccttcacgccactacgcacacgtagactgcccaggccacgctgactatgttaaaaacatgatcactggtgctgcacagatggacggcgcgatattagtagttgcttctacagacggtccaatgccacaaacgcgtgagcacatcctgctgtctcgccaagtaggcgtaccattcatcatcgtattcatgaacaaatgtgacatggttgacgatgctgagctgttagaattagtcgaaatggaagtacgtgaactgttatcagaatacgacttcccaggtgatgacttacccgtaatccaaggttcagctctgaaagcgctagaaggcgagccagagtgggaagcgaagatccttgagctggcagcagctttagactcttacattccagaaccagagcgtgatatcgataagccattcctgatgccaatcgaagacgtattctcaatctctggccgtggtacagtagtaactggtcgtgttgagcgtggtatcgtacgtgttggtgacgaagtagaaatcgttggtatccgtactacaactaagaccacctgtactggtgttgaaatgttccgtaaactgcttgacgaaggtcgtgcaggtgagaactgtggtattttattacgtggtactaagcgtgatgatgtagaacgtggccaagtattatctaagccaggttcaatcaacccacacaccacttttgaatcagaagtctacgtactgtcaaaagaagaaggtggtcgtcacacgccattcttcaaaggctaccgtccacagttctacttccgtacaactgacgtaaccggtactatcgaactgccagaaggcgtagagatggtaatgccaggcgacaacatcaagatgaaagtgactctgatctgcccaatcgcgatggacgaaggtttacgcttcgcaatccgtgaaggtggccgtacagtaggcgctggtgttgtagcgaagattttcgcttaa

SEQ ID NO: 27074 - protein, 394 aa, Shewanella oneidensis MR-1
MAKAKFERSKPHVNVGTIGHVDHGKTTLTAAISHVLAKTYGGEAKDFSQIDNAPEERERGITINTSHIEYDTPSRHYAHVDCPGHADYVKNMITGAAQMDGAILVVASTDGPMPQTREHILLSRQVGVPFIIVFMNKCDMVDDAELLELVEMEVRELLSEYDFPGDDLPVIQGSALKALEGEPEWEAKILELAAALDSYIPEPERDIDKPFLMPIEDVFSISGRGTVVTGRVERGIVRVGDEVEIVGIRTTTKTTCTGVEMFRKLLDEGRAGENCGILLRGTKRDDVERGQVLSKPGSINPHTTFESEVYVLSKEEGGRHTPFFKGYRPQFYFRTTDVTGTIELPEGVEMVMPGDNIKMKVTLICPIAMDEGLRFAIREGGRTVGAGVVAKIFA

SEQ ID NO: 27075 - DNA, 1185 bp, Shewanella oneidensis MR-1
  CDS (1)..(1185): transl_table=11
gtggcaaaagctaaatttgaacgtagtaagcctcacgtaaacgtgggcaccatcggtcacgttgaccatggtaaaaccactctgactgcagctatctctcacgtactggctaagacctacggtggtgaagctaaagacttctctcaaatcgataacgctccagaagagcgtgagcgcggtattaccatcaatacctctcacatcgaatatgacacgccttcacgccactacgcacacgtagactgcccaggccacgctgactatgttaaaaacatgatcactggtgctgcacagatggacggcgcgatattagtagttgcttctacagacggtccaatgccacaaacgcgtgagcacatcctgctgtctcgccaagtaggcgtaccattcatcatcgtattcatgaacaaatgtgacatggttgacgatgctgagctgttagaattagtcgaaatggaagtacgtgaactgttatcagaatacgacttcccaggtgatgacttacccgtaatccaaggttcagctctgaaagcgctagaaggcgagccagagtgggaagcgaagatccttgagctggcagcagctttagactcttacattccagaaccagagcgtgatatcgataagccattcctgatgccaatcgaagacgtattctcaatctctggccgtggtacagtagtaactggtcgtgttgagcgcggtatcgtacgtgttggtgatgaagtagaaatcgtaggtatccgtactactactaagactacctgtactggtgttgaaatgttccgtaagctgcttgacgaaggtcgtgcaggtgagaactgtggtattttattacgtggtactaagcgtgatgacgtggaacgtggtcaagtattatctaagccaggttcaatcaacccacacaccacttttgaatcagaagtctacgtactgtcaaaagaagaaggtggtcgtcacacgccattcttcaaaggctaccgtccacagttctacttccgtacaactgacgtaaccggtactatcgaactgccagaaggcgtagagatggtaatgcctggtgacaacattaagatggttgtaacgctgatctgcccaatcgcgatggacgaaggtttacgcttcgcaatccgcgaaggtggccgtacagtaggcgctggtgtagtagctaagatcattgcttaa

SEQ ID NO: 27076 - protein, 394 aa, Shewanella oneidensis MR-1
MAKAKFERSKPHVNVGTIGHVDHGKTTLTAAISHVLAKTYGGEAKDFSQIDNAPEERERGITINTSHIEYDTPSRHYAHVDCPGHADYVKNMITGAAQMDGAILVVASTDGPMPQTREHILLSRQVGVPFIIVFMNKCDMVDDAELLELVEMEVRELLSEYDFPGDDLPVIQGSALKALEGEPEWEAKILELAAALDSYIPEPERDIDKPFLMPIEDVFSISGRGTVVTGRVERGIVRVGDEVEIVGIRTTTKTTCTGVEMFRKLLDEGRAGENCGILLRGTKRDDVERGQVLSKPGSINPHTTFESEVYVLSKEEGGRHTPFFKGYRPQFYFRTTDVTGTIELPEGVEMVMPGDNIKMVVTLICPIAMDEGLRFAIREGGRTVGAGVVAKIIA

SEQ ID NO: 27077 - DNA, 1191 bp, Bradyrhizobium japonicum USDA 110
  CDS (1)..(1191): transl_table=11
atggccaaagcaaagtttgaacgtaacaagccgcactgcaacatcggcaccatcggtcacgtcgaccatggcaagacgtcgctgaccgcggcgatcaccaagatcctcgccgagaccggcggtgcgacgttcaccgcgtacgaccagatcgacaaggcgccggaagagaaggcgcgcggcatcacgatctcgaccgcgcacgtcgagtacgagaccaagaaccgccactacgcccacgtcgactgccccggccacgccgactacgtgaagaacatgatcaccggcgccgcccagatggacggcgcgatcctggtcgtgtcggccgctgacggcccgatgccgcagacccgcgagcacatcctgctcgcccgccaggtcggcgtgcccgcgctcgtcgtgttcctcaacaagtgcgacatggtcgacgatcccgagctgctcgagctcgtcgagctcgaagtccgcgagctgctctcgaagtacgaattcccgggcgacaagatcccgatcatcaagggctcggcgctcgccgctctcgaagattcggacaagaagctcggccacgacgccatcctcgaactgatgcgcaacgtcgacgagtacatcccgcagccggagcgtccgatcgaccagccgttcctgatgccggttgaagacgtgttctcgatctcgggccgcggcaccgtggtgaccggccgtgtcgagcgcggcatcgtcaaggtcggcgaggaaatcgagatcgtcggtctgcgtgcgacccagaagaccaccgtcaccggcgtcgaaatgttccgcaagctgctcgatcagggccaggccggcgacaacatcggcgctctgctccgcggcaccaagcgcgaggacgtcgagcgcggccaggtgctggcgaagccgggttcggtcaagccgcacaccaagttcaaggctgaggcctacatcctcaccaaggaagagggcggtcgccacaccccgttcttcaccaactaccgtccgcagttctacttccgcaccaccgacgtgaccggtgtcgtgcatctgccggaaggtaccgagatggtgatgccgggcgacaacatcgcgatggaagtgcacctgatcgtgccgatcgcgatggaagagaagctccgcttcgcgatccgcgagggcggtcgtaccgtcggcgccggcgtcgtcgcctcgatcatcgagtaa

SEQ ID NO: 27078 - protein, 396 aa, Bradyrhizobium japonicum USDA 110
MAKAKFERNKPHCNIGTIGHVDHGKTSLTAAITKILAETGGATFTAYDQIDKAPEEKARGITISTAHVEYETKNRHYAHVDCPGHADYVKNMITGAAQMDGAILVVSAADGPMPQTREHILLARQVGVPALVVFLNKCDMVDDPELLELVELEVRELLSKYEFPGDKIPIIKGSALAALEDSDKKLGHDAILELMRNVDEYIPQPERPIDQPFLMPVEDVFSISGRGTVVTGRVERGIVKVGEEIEIVGLRATQKTTVTGVEMFRKLLDQGQAGDNIGALLRGTKREDVERGQVLAKPGSVKPHTKFKAEAYILTKEEGGRHTPFFTNYRPQFYFRTTDVTGVVHLPEGTEMVMPGDNIAMEVHLIVPIAMEEKLRFAIREGGRTVGAGVVASIIE

SEQ ID NO: 27079 - DNA, 1194 bp, Tropheryma whipplei str. Twist
  CDS (1)..(1194): transl_table=11
atggcaaaggccaagtttgagcggactaaaccccatgtgaatattgggactataggtcatgttgaccacggtaaaaccacactgaccgccgccatatcgagggttttgtccgagaggcttccttcgaatacgaatgtaaagcaggactttgatgcaattgactcggccccggaagagcgccagaggggtattacgatcaatatttcgcatatcgagtacgagacggaaaagaggcactacgcccatgttgatgccccaggacatgccgattacataaagaatatgattactggcgccgctcagatggatggtgcgattcttgttgttgcagcgacagacggtgcaatggcccagacccgtgagcatgtcttgcttgccaagcaggtcggcgtcccctatctccttgtggcactcaataaagccgatatggtgtctgatgaggaaatactcgagcttgttgagcttgaggtgcgcgagctgttgtcaaatcacggctttgacggtgagaatgttcccgttgtacgcgtatctggccttaaagcacttgaaggtgatcaaaagtggggcgatgcggttatggagcttatgaaagccgttgatgagagcattccggaccccgttagagatagggataaaccctttttgatgcccattgaggatgtgttcacaatcactgggcgcggaacggttgttacaggccgtgcagagcgtggtgttcttgcggttaattccgaggttgaaatagtcggtatacgcccgacgcagaaaaccactgtaacgggaattgaaatgtttcgcaagcagttggatgaggcgtgggcaggtgagaactgcggcctgctgcttcgcggcacaaaacgagaggatgtcgagcgtgggcaggttgttgtgaaacctggcagtgttacaccgcatacaaagtttgagggaaaggcgtatattctgtcgaaagatgagggtggaaggcataacccgttctatagtaactatcgcccacagttttacttcaggacaactgacgtgactggcgttataacccttcctgagggaacagaaatggttatgcccggcgataccatctctataacagtcgacttgattcagccaattgctatggaagaaggcttgggttttgcgattcgcgagggtggcagaactgttggcgcaggcactgtagtgaaaattcttgaatag

SEQ ID NO: 27080 - protein, 397 aa, Tropheryma whipplei str. Twist
MAKAKFERTKPHVNIGTIGHVDHGKTTLTAAISRVLSERLPSNTNVKQDFDAIDSAPEERQRGITINISHIEYETEKRHYAHVDAPGHADYIKNMITGAAQMDGAILVVAATDGAMAQTREHVLLAKQVGVPYLLVALNKADMVSDEEILELVELEVRELLSNHGFDGENVPVVRVSGLKALEGDQKWGDAVMELMKAVDESIPDPVRDRDKPFLMPIEDVFTITGRGTVVTGRAERGVLAVNSEVEIVGIRPTQKTTVTGIEMFRKQLDEAWAGENCGLLLRGTKREDVERGQVVVKPGSVTPHTKFEGKAYILSKDEGGRHNPFYSNYRPQFYFRTTDVTGVITLPEGTEMVMPGDTISITVDLIQPIAMEEGLGFAIREGGRTVGAGTVVKILE

SEQ ID NO: 27081 - DNA, 1188 bp, Enterococcus faecalis V583
  CDS (1)..(1188): transl_table=11
atggcaaaagaaaaatttgaccgttctaaatcccatgttaacattggtactatcggacacgttgaccatggtaaaactacattaacagctgcaattgctactgtattatcaaaacacggtggcggggaagcacaaagctacgattctatcgataacgctccagaagaaaaagaacgtggaatcacaatcaacacttctcatatcgaatatgaaactgaaactcgtcactatgcacacgttgactgcccaggacatgcggactacgttaaaaacatgatcactggtgctgctcaaatggacggagctatcttagtagtttctgctgctgatggtcctatgcctcaaacacgtgaacatatcttattatcacgtaacgttggtgtaccatacatcgttgtattcttaaacaaaatggatatggttgatgacgaagaattattagaattagtagaaatggaagttcgtgacttattatcagaatacgatttcccaggcgatgatgttccagttatcgcaggttctgctttgaaagctttagaaggcgacgagtcttatgaagaaaaaatcttagaattaatggctgcagttgacgaatatatcccaactccagaacgtgatactgacaaaccattcatgatgccagtcgaagacgtattctcaatcactggacgtggtactgttgctacaggccgtgttgaacgtggtgaagttcgcgttggtgacgaagttgaaatcgttggtattaaagacgaaacatctaaaacaactgttacaggtgttgaaatgttccgtaaattattagactacgctgaagcaggcgacaacatcggtgctttattacgtggtgtagcacgtgaagatatcgaacgtggacaagtattagctaaaccagctacaatcactccacacacaaaattcaaagctgaagtatacgtattatcaaaagaagaaggcggacgtcacactccattcttcactaactaccgtcctcaattctacttccgtacaacagacgttactggtgttgtagaattgccagaaggtactgaaatggtaatgcctggtgataacgttgctatggacgttgaattaattcacccaatcgctatcgaagacggaactcgtttctctattcgtgaaggcggacgtactgtaggttcaggcgttgttactgaaatcgttaaataa

SEQ ID NO: 27082 - protein, 395 aa, Enterococcus faecalis V583
MAKEKFDRSKSHVNIGTIGHVDHGKTTLTAAIATVLSKHGGGEAQSYDSIDNAPEEKERGITINTSHIEYETETRHYAHVDCPGHADYVKNMITGAAQMDGAILVVSAADGPMPQTREHILLSRNVGVPYIVVFLNKMDMVDDEELLELVEMEVRDLLSEYDFPGDDVPVIAGSALKALEGDESYEEKILELMAAVDEYIPTPERDTDKPFMMPVEDVFSITGRGTVATGRVERGEVRVGDEVEIVGIKDETSKTTVTGVEMFRKLLDYAEAGDNIGALLRGVAREDIERGQVLAKPATITPHTKFKAEVYVLSKEEGGRHTPFFTNYRPQFYFRTTDVTGVVELPEGTEMVMPGDNVAMDVELIHPIAIEDGTRFSIREGGRTVGSGVVTEIVK

SEQ ID NO: 27083 - DNA, 1191 bp, Nitrosomonas europaea ATCC 19718
  CDS (1)..(1191): transl_table=11
atggcgaagagtaaatttgagcgggtgaagccgcatgtgaatgtgggaacgattggtcatgtggatcatggaaagacgacgttgacggcggcgattacgacgatactgacgaagaagtttggtggagaagccaaatcatacgatcagattgactcggcgccggaagagcgtgcacgcggaattactatcaatacatcccatgttgaatacgaaacagacaagcgccattacgcacacgtagattgtcctggtcatgctgactatgtgaagaacatgattaccggagcggcacaaatggatggtgccattctggtggtatcagcagctgatggtccgatgccgcaaacgcgtgagcatattttgctggctcggcaagtgggggtgccctacatcatcgttttcatgaacaaagcggacatggtagacgatgctgaattgcttgaacttgtcgaaatggagatacgcgaactattgtccaactatgattttccgggtgacgacacacctattatcattggttcggcattgaaagcgctggaaggagataagagtgatattggtgaagccgccattctgaaattggcagaggcactggattcgtatataccggagccagaaagggcaattgatggggctttcatcatgcctgtggaagacgtcttctcaatctctgggcgtgggaccgtagtcacggggcgtgtggagcgtgggatagtcaaagtaggtgatgaaatcgaaatcgttggattgaaacccacgatcaagacagtatgtaccggtgtggagatgttccgtaaattgctggatcaggggcaggctggtgataacgtgggtatcctgttaagaggtaccaagcgagaagaagtggagcgtgggcaggtacttgccaaacccggcagcatactgccacacaccaagtttactgcagagatctatgtgttgagcaaagaagagggtggtcgtcatacaccattttttgcgggatatcgcccacagttttatttcagaacaacggatgtgacaggatcgattgagttaccggcaggtgttgagatggtgatgcccggggataatatctcggtcacagtcaatctgattgcgccgattgcaatggatgaagggctgcgttttgcaatccgtgaaggtggacgtaccgtaggcgcaggcgtggtcgctaaagtgatcgaataa

SEQ ID NO: 27084 - protein, 396 aa, Nitrosomonas europaea ATCC 19718
MAKSKFERVKPHVNVGTIGHVDHGKTTLTAAITTILTKKFGGEAKSYDQIDSAPEERARGITINTSHVEYETDKRHYAHVDCPGHADYVKNMITGAAQMDGAILVVSAADGPMPQTREHILLARQVGVPYIIVFMNKADMVDDAELLELVEMEIRELLSNYDFPGDDTPIIIGSALKALEGDKSDIGEAAILKLAEALDSYIPEPERAIDGAFIMPVEDVFSISGRGTVVTGRVERGIVKVGDEIEIVGLKPTIKTVCTGVEMFRKLLDQGQAGDNVGILLRGTKREEVERGQVLAKPGSILPHTKFTAEIYVLSKEEGGRHTPFFAGYRPQFYFRTTDVTGSIELPAGVEMVMPGDNISVTVNLIAPIAMDEGLRFAIREGGRTVGAGVVAKVIE

SEQ ID NO: 27085 - DNA, 1197 bp, Mycoplasma gallisepticum R
  CDS (1)..(1197): transl_table=4
atatttaaaaaaatggcaaaagaaaggttcgatcgtagtaaacctcacgttaatattggaacaatcggtcatattgaccacgggaaaactacattaaccgcagcaatttgtaccgtgttatcaaaagccggtacatctgaagctaaaaaatatgatgaaattgatgctgcaccagaagaaaaagctcgtgggattacaattaacactgcacacgtagaatacgcaactcaaaatcgtcactatgcacacgttgactgtcccggtcacgccgactacgttaaaaacatgattacaggtgctgctcaaatggacggtggtatcttagttgtgtctgcaactgatggtccaatgcctcaaactcgtgaacacatcctattagctcgccaagttggtgttcctaagatggttgtattcttaaacaaatgtgatgtagctgatgatccagaaatgcaagaattagttgaaatggaagttagagatcttcttaaatcttacggatttgatggtgataacactccagtaatcagaggttctgctttaggtgctcttaatggtgaacctgcatgagaagaaaaaattcatgaactaatgaaagcagttgatgaatacatcccaactcctgaccgtgaagttgataaaccatttttattaccaatcgaagatactatgacaattactggtcgtggtactgtagtaactggtagagttgaacgtggtcaacttaaagttggtgaagaagttgaaatcgttggtattactgacactagaaaagtagtagtaactggtattgaaatgttcagaaaagaactagatgctgctatggctggtgacaacgctgggatcttacttcgtggtgtagaccgtaaagatgtacaacgtggtcaagttttagctaaacctggttcaattactccacacaagaaattcagagctgaaatttatgcgcttaagaaggatgaaggtggtcgtcacacagctttcttaaatggttacagacctcaattctacttcagaacaactgacgtaactggttcaatccaattaaaagaaggaactgaaatggttatgcctggtgataacacagaaattatcgttgaattaatttcttcaatcgcttgtgaaaaaggttctaagttctctatccgtgaaggtggtagaactgtaggtgctggtacagttgtagaagtacttgaatag

SEQ ID NO: 27086 - protein, 398 aa, Mycoplasma gallisepticum R
MFKKMAKERFDRSKPHVNIGTIGHIDHGKTTLTAAICTVLSKAGTSEAKKYDEIDAAPEEKARGITINTAHVEYATQNRHYAHVDCPGHADYVKNMITGAAQMDGGILVVSATDGPMPQTREHILLARQVGVPKMVVFLNKCDVADDPEMQELVEMEVRDLLKSYGFDGDNTPVIRGSALGALNGEPAWEEKIHELMKAVDEYIPTPDREVDKPFLLPIEDTMTITGRGTVVTGRVERGQLKVGEEVEIVGITDTRKVVVTGIEMFRKELDAAMAGDNAGILLRGVDRKDVQRGQVLAKPGSITPHKKFRAEIYALKKDEGGRHTAFLNGYRPQFYFRTTDVTGSIQLKEGTEMVMPGDNTEIIVELISSIACEKGSKFSIREGGRTVGAGTVVEVLE

SEQ ID NO: 27087 - DNA, 1200 bp, Helicobacter hepaticus ATCC 51449
  CDS (1)..(1200): transl_table=11
atggcaaaagaaaagtttgtgaaaaacaaacctcacgtaaatgtgggaacaatcgggcatgttgatcatggtaaaacaactttgagtgcagctatttctgctgtgttggcaactaaaggtcttgcagaattgaaagactatgataacattgataacgcaccagaggaaaaggaaagaggtattactatcgcgacttctcatattgaatatgagacagaaaatcgccactacgcgcacgtggattgccccggacacgctgactatgttaaaaatatgattacaggtgcagctcaaatggacggagcaattcttgttgtttctgccgcagatggtcctatgccacaaacacgtgagcatatcttgttgtctcgccaagtaggtgtgcattacatcgttgtatttttaaataaacaagatatggttgatgatgctgaattacttgagcttgtggaaatggaagtgcgtgaattgcttagtcaatatgatttccctggagatgatactcctatcattgcaggttctgctctcaaagcgcttgaagaagcaaaagcaggtaatgtaggtgaatggggtgaaaaagtattaaaattaatggaagaagttgataaatatattccaactccacaacgtgatactgaaaaaacattccttatgcctgtagaagatgtattctcaatcgctggtcgtggaacggttgtaacaggaagagtagaaagaggtgttgtgcaagtaggcgatgaagtagaaatcgtaggaatccgcgacactcaaaaaacaacagttacaggcgttgaaatgtttagaaaagagcttgataaaggtgaggcaggagataatgtcggtattttgttgcgaggaacaaaaaaagaagaagtagaaagaggtatggttctttgtaagcccggctcaattactccacataagaaatttgaaggtgaaatttatgtcctttcaaaagatgaaggtggaagacatacaccatttttcaatggctatcgcccacaattttatgtgcgaactaccgatgttaccggttctattgagcttccaagtggcgtagaaatggttatgcccggtgataatgtaaaaatcacagtggaacttattgctcctgtggcacttgaagatggaactcgttttgcgattcgtgaaggtggtagaacagttggttcaggtgttgtaacaaaaattattgagtaa

SEQ ID NO: 27088 - protein, 399 aa, Helicobacter hepaticus ATCC 51449
MAKEKFVKNKPHVNVGTIGHVDHGKTTLSAAISAVLATKGLAELKDYDNIDNAPEEKERGITIATSHIEYETENRHYAHVDCPGHADYVKNMITGAAQMDGAILVVSAADGPMPQTREHILLSRQVGVHYIVVFLNKQDMVDDAELLELVEMEVRELLSQYDFPGDDTPIIAGSALKALEEAKAGNVGEWGEKVLKLMEEVDKYIPTPQRDTEKTFLMPVEDVFSIAGRGTVVTGRVERGVVQVGDEVEIVGIRDTQKTTVTGVEMFRKELDKGEAGDNVGILLRGTKKEEVERGMVLCKPGSITPHKKFEGEIYVLSKDEGGRHTPFFNGYRPQFYVRTTDVTGSIELPSGVEMVMPGDNVKITVELIAPVALEDGTRFAIREGGRTVGSGVVTKIIE

SEQ ID NO: 27089 - DNA, 1191 bp, Bordetella pertussis Tohama I
  CDS (1)..(1191): transl_table=11
atggcaaaaggcaagtttgaacgtaccaagccgcacgtgaacgtgggtacgattggtcacgttgaccacggcaaaacgacgttgacggcggcgatcacgacggtgctgtcgaacaagttcggcggcgaggctcgcggctacgaccagattgacgcggcgccggaagagaaggcgcgtgggatcacgatcaacacctcgcacgttgagtacgagacggagacgcgtcactacgcgcacgttgattgcccgggtcacgctgactacgtgaagaacatgatcacgggtgctgcgcagatggacggcgcgatcctggtggtgtcggccgcagacggcccgatgccgcagacgcgcgagcacattttgctgtcgcgccaggttggcgtgccgtacatcatcgtgttcctgaacaaggcggacatggttgatgacgcggagctgctcgagctggtggagatggaagtccgcgaactgctgagcaagtacgatttcccgggcgatgacacgccgatcgtgaagggttcggccaagctggcgctggaaggcgacaagggcgaactgggcgagcaggcgattctgtcgctggcgcaagcgctggacacgtacattccgacgccggagcgcgcggtcgacggtgcgttcctgatgccggtggaagacgtgttctcgatctcgggccgtggcacggtggtgactggccgtatcgagcgcggcgtggtgaaggttggcgaggaaatcgaaatcgtgggcatcaagccgacggtgaagacgacctgcacgggcgtggagatgttccgcaagctgctggaccagggccaggcgggcgacaacgtgggtatcttgctgcgcggcaccaagcgtgaagacgtcgagcgtggccaggtgctggccaagccgggttcgatcaacccgcacacggacttcacggccgaggtgtacattctgtccaaggaagagggtggccgtcacacgccgttcttcaacggctatcgtccgcagttctacttccgcacgacggacgtgaccggcacgatcgacctgccggcggacaaggaaatggtgctgccgggcgacaacgtgtcgatgaccgtcaagctgctggccccgatcgccatggaagaaggtctgcgtttcgccatccgtgaaggcggtcgtaccgtcggcgccggcgtcgtcgccaagatcatcaagtaa

SEQ ID NO: 27090 - protein, 396 aa, Bordetella pertussis Tohama I
MAKGKFERTKPHVNVGTIGHVDHGKTTLTAAITTVLSNKFGGEARGYDQIDAAPEEKARGITINTSHVEYETETRHYAHVDCPGHADYVKNMITGAAQMDGAILVVSAADGPMPQTREHILLSRQVGVPYIIVFLNKADMVDDAELLELVEMEVRELLSKYDFPGDDTPIVKGSAKLALEGDKGELGEQAILSLAQALDTYIPTPERAVDGAFLMPVEDVFSISGRGTVVTGRIERGVVKVGEEIEIVGIKPTVKTTCTGVEMFRKLLDQGQAGDNVGILLRGTKREDVERGQVLAKPGSINPHTDFTAEVYILSKEEGGRHTPFFNGYRPQFYFRTTDVTGTIDLPADKEMVLPGDNVSMTVKLLAPIAMEEGLRFAIREGGRTVGAGVVAKIIK

SEQ ID NO: 27091 - DNA, 1200 bp, Prochlorococcus marinus subsp. pastoris str. CCMP1986
  CDS (1)..(1200): transl_table=11
atggctcgcgagaagttcgaaaggaacaaaccacatgtcaacataggtactattggccacgttgatcatggaaaaacaaccctgactgctgctattactaatgttttagctaaaaaaggtcaagcacaagctcaagactatggagacatcgatggtgctccagaagaaagagagcgtggtattacaattaatactgcacacgttgaatacgaaacagccgaaagacattatgcacacgttgactgtccaggtcacgctgattatgtgaaaaacatgatcactggtgcagctcaaatggatggtgcaattttagtttgtgcagcaacagatggtcctatggctcaaacaaaagaacacattcttttagcaaaacaagttggagttcctgctttggttgttgctttgaataaatgtgacatggtagatgatgaagaaatcattgaacttgttgaaatggaaatcagagaacttcttgatagttatgatttccctggtgatgatatacccatcgttcaagtttcaggtctaaaagctttagaaggagattctacttgggaatctaaaattgaagaattaatgactgccgttgatgctagtattcctgaacctgagagagaaatcgacaagccatttttgatggcagttgaagatgtattttctatcacaggtagaggaacagttgccactggaagaatagagagaggaaaagtcaaagtaggggaagaagttgaaatagttggaataagagatacaagattgaccactgtcacgggtgttgaaatgttccgtaaacttcttgatgaaggtatggctggagataatgttggactacttttacgtggtgttcagaaagaagatattgaaagaggtatggttcttgttaaaaaaggttcgattactcctcatacaaaatttgaaggagaagtttatgtccttaagaaagaagagggtggtagacatacacctttctttgctggttacagaccacaattttatataagaacaacagatgtaactggacaaatcactgcattcacagctgatgatggagccaatgttgagatggtaatgccaggtgacaggataaaaatgactggagaattaatttgtccagttgcaattgaacaaggtatgcgctttgctattcgcgaaggaggtcgtactattggagctggtgttgtttctaaaattattgaataa

SEQ ID NO: 27092 - protein, 399 aa, Prochlorococcus marinus subsp. pastoris str. CCMP1986
MAREKFERNKPHVNIGTIGHVDHGKTTLTAAITNVLAKKGQAQAQDYGDIDGAPEERERGITINTAHVEYETAERHYAHVDCPGHADYVKNMITGAAQMDGAILVCAATDGPMAQTKEHILLAKQVGVPALVVALNKCDMVDDEEIIELVEMEIRELLDSYDFPGDDIPIVQVSGLKALEGDSTWESKIEELMTAVDASIPEPEREIDKPFLMAVEDVFSITGRGTVATGRIERGKVKVGEEVEIVGIRDTRLTTVTGVEMFRKLLDEGMAGDNVGLLLRGVQKEDIERGMVLVKKGSITPHTKFEGEVYVLKKEEGGRHTPFFAGYRPQFYIRTTDVTGQITAFTADDGANVEMVMPGDRIKMTGELICPVAIEQGMRFAIREGGRTIGAGVVSKIIE

SEQ ID NO: 27093 - DNA, 1191 bp, Chromobacterium violaceum ATCC 12472
  CDS (1)..(1191): transl_table=11
atggcaaaagaaaagtttgagcggaccaaaccgcacgtaaacgtaggcaccatcggtcacgtggaccacggtaagaccaccctgaccgctgctatcaccacgattctgtcgaagaagttcggtggcgaagccaaagactactcccagatcgacagcgcgccggaagagaaggctcgtggtatcaccatcaataccgcgcacgttgaatacgaaaccgagacccgccactacgctcacgtagactgcccgggccacgccgactacgttaagaacatgatcaccggtgctgcccagatggacggcgcgatcctggtctgctcggccgctgacggtccgatgccgcaaacccgcgaacacatcctgctgtcccgccaggttggcgtgccgtacatcatcgtctacctgaacaaggctgacctggttgacgacgccgagctgctggaactggtggaaatggaagtgcgcgatctgctgtcttcctatgacttcccgggcgacgacaccccgatcgtgaccggctccgctcgtctggcgctggaaggcgaccagtccgaaatgggcgaaccgtcgatcttccgtctggctgacgcgctggattcctacatcccgactccggagcgcgccatcgacaagccgttcctgctgccgatcgaagacgtgttctcgatctccggccgcggcaccgtggtgaccggtcgcgtagagcgcggcatcgtgaaagtgggtgaagaactggaaatcgtgggtctgaaagacaccgtgaagaccacctgcaccggcgtggaaatgttccgcaagctgctggaccaaggtcaagccggcgacaacgtgggcgtgctgctgcgcggcaccaagcgtgaagacgtggagcgcggccaggttctggccaagccgggcaccatcaccccgcacaccaagttcgaagcttcggtgtacgttctgtccaaggacgaaggtggccgtcacaccccgttcttcgcgaactaccgtccgcagttctatttccgcaccaccgacgtgaccggcgcgatctcgctggccgaaggcgtggaaatggtaatgccgggcgacaacgtggaaatcaaggttgagctgatcgccccgatcgccatggaagaaggtctgcgcttcgccatccgcgaaggcggccgtaccgtcggcgccggcgtggttgccaagatcatcgcttaa

SEQ ID NO: 27094 - protein, 396 aa, Chromobacterium violaceum ATCC 12472
MAKEKFERTKPHVNVGTIGHVDHGKTTLTAAITTILSKKFGGEAKDYSQIDSAPEEKARGITINTAHVEYETETRHYAHVDCPGHADYVKNMITGAAQMDGAILVCSAADGPMPQTREHILLSRQVGVPYIIVYLNKADLVDDAELLELVEMEVRDLLSSYDFPGDDTPIVTGSARLALEGDQSEMGEPSIFRLADALDSYIPTPERAIDKPFLLPIEDVFSISGRGTVVTGRVERGIVKVGEELEIVGLKDTVKTTCTGVEMFRKLLDQGQAGDNVGVLLRGTKREDVERGQVLAKPGTITPHTKFEASVYVLSKDEGGRHTPFFANYRPQFYFRTTDVTGAISLAEGVEMVMPGDNVEIKVELIAPIAMEEGLRFAIREGGRTVGAGVVAKIIA

SEQ ID NO: 27095 - DNA, 1185 bp, Photorhabdus luminescens subsp. laumondii TTO1
  CDS (1)..(1185): transl_table=11
gtgtctaaagaaaaatttgaacgtaaaaaaccgcacgttaacgttggtactatcggccacgttgaccatggtaaaactaccctgactgctgccatcactactgtactggctaaaaccttcggtggtaacgctcgcgcattcgaccagattgataacgcgccagaagaaaaagcgcgtggtatcaccatctctacttctcacgtagaatatgatacgccaagccgtcactatgcgcacgttgactgcccaggccacgccgactacgtgaaaaacatgatcaccggtgcggctcagatggacggcgcaatcctggtagttgccgcgactgacggtccaatgccacagacgcgtgagcacatcctgttaggccgtcaggtaggcgttccttacatcatcgtgttcctgaacaaatgtgacatggtagacgacgaagagctgctggaactggttgagatggaagtgcgtgagctgctgtctcagtacgatttcccaggcgacgacacgccagtcatccgtggttctgctctgaaagcgctggaaggtgatgcagagtgggaagccaaaatcatcgaactggcagaggccctggatagctacattccagagccagagcgtgctattgaccagccattcctgctgccaatcgaagacgtattctctatttcaggccgtggtactgtagttaccggtcgtgtagagcgcggtatcgttaaagtgggtgaagaagttgaaatcgtgggtatcaaagacacgactaaaaccacttgtactggcgtagaaatgttccgcaaactgctggacgaaggccgtgcaggtgagaacgtcggtgttctgctgcgtggtaccaagcgtgacgaaatcgaacgtggtcaggtactggcgaaaccgggttcaatcaagccacacaccactttcgaatcagaagtttatattctgagcaaagacgaaggtggccgtcatacgccattcttcaaaggctaccgtccacagttctacttccgtacaactgacgtgaccggtaccattgaactgccagaaggcgtggaaatggtgatgccaggtgataacattcagatgaaagttaccctgattgccccaatcgcaatggaccagggtctgcgttttgctatccgtgaaggtggccgtacagtaggtgctggtgttgttgctaaagttatcgcataa

SEQ ID NO: 27096 - protein, 394 aa, Photorhabdus luminescens subsp. laumondii TTO1
MSKEKFERKKPHVNVGTIGHVDHGKTTLTAAITTVLAKTFGGNARAFDQIDNAPEEKARGITISTSHVEYDTPSRHYAHVDCPGHADYVKNMITGAAQMDGAILVVAATDGPMPQTREHILLGRQVGVPYIIVFLNKCDMVDDEELLELVEMEVRELLSQYDFPGDDTPVIRGSALKALEGDAEWEAKIIELAEALDSYIPEPERAIDQPFLLPIEDVFSISGRGTVVTGRVERGIVKVGEEVEIVGIKDTTKTTCTGVEMFRKLLDEGRAGENVGVLLRGTKRDEIERGQVLAKPGSIKPHTTFESEVYILSKDEGGRHTPFFKGYRPQFYFRTTDVTGTIELPEGVEMVMPGDNIQMKVTLIAPIAMDQGLRFAIREGGRTVGAGVVAKVIA

SEQ ID NO: 27097 - DNA, 1185 bp, Photorhabdus luminescens subsp. laumondii TTO1
  CDS (1)..(1185): transl_table=11
atgtctaaagaaaagtttgaacgtacaaaaccgcacgttaacgttggtactatcggccacgttgaccacggtaaaactaccctgactgctgctattactactgtactggctaaaacctacggtggtaatgctcgtgcattcgaccaaatcgataacgcaccagaagaaaaagcgcgtggtatcaccatctctacttctcacgtagaatacgatactccaagccgccactatgcgcacgttgactgcccaggccacgccgactacgtgaaaaacatgatcaccggtgcggctcagatggacggcgcaatcctggtagttgccgcgactgacggtccaatgccacagacgcgtgagcacatcctgttaggccgtcaggtaggcgttccttacatcatcgtgttcctgaacaaatgtgacatggtagacgacgaagagctgctggaactggttgagatggaagtgcgtgagctgctgtctcagtacgatttcccaggcgacgacacgccagtcatccgtggttctgctctgaaagcgctggaaggtgatgcagagtgggaagccaaaatcatcgaactggcagaggccctggatagctacattccagagccagagcgtgctattgaccagccattcctgctgccaatcgaagacgtattctctatttcaggccgtggtactgtagttaccggtcgtgtagagcgcggtatcgttaaagtgggtgaagaagttgaaatcgtgggtatcaaagacacgactaaaaccacttgtactggcgtagaaatgttccgcaaactgctggacgaaggccgtgcaggtgagaacgtcggtgttctgctgcgtggtaccaagcgtgacgaaatcgaacgtggtcaggtactggcgaaaccgggttcaatcaagccacacaccactttcgaatcagaagtttatattctgagcaaagacgaaggtggccgtcatacgccattcttcaaaggctaccgtccacagttctacttccgtacaactgacgtgaccggtaccattgaactgccagaaggcgtggaaatggtgatgccaggtgataacattcagatgaaagttaccctgattgccccaatcgcaatggaccagggtctgcgcttcgctatccgtgaaggtggccgtacagtaggtgctggtgttgttgctaaagttatcgcttaa

SEQ ID NO: 27098 - protein, 394 aa, Photorhabdus luminescens subsp. laumondii TTO1
MSKEKFERTKPHVNVGTIGHVDHGKTTLTAAITTVLAKTYGGNARAFDQIDNAPEEKARGITISTSHVEYDTPSRHYAHVDCPGHADYVKNMITGAAQMDGAILVVAATDGPMPQTREHILLGRQVGVPYIIVFLNKCDMVDDEELLELVEMEVRELLSQYDFPGDDTPVIRGSALKALEGDAEWEAKIIELAEALDSYIPEPERAIDQPFLLPIEDVFSISGRGTVVTGRVERGIVKVGEEVEIVGIKDTTKTTCTGVEMFRKLLDEGRAGENVGVLLRGTKRDEIERGQVLAKPGSIKPHTTFESEVYILSKDEGGRHTPFFKGYRPQFYFRTTDVTGTIELPEGVEMVMPGDNIQMKVTLIAPIAMDQGLRFAIREGGRTVGAGVVAKVIA

SEQ ID NO: 27099 - DNA, 1191 bp, Rhodopseudomonas palustris CGA009
  CDS (1)..(1191): transl_table=11
atggccaaagcaaagtttgaacgtacgaagccgcattgcaacatcgggacgatcggtcacgtcgaccacggcaagacgtcgctgacggcggcgatcaccaaggttctggcggagacgggcggtgcgacgttcacggcctatgaccagatcgacaaggcgccggaagagaaggcgcgcggcatcacgatttcgaccgcgcacgtcgagtacgagacgcagaaccgtcactacgcgcacgtcgactgccccggccacgccgactacgtgaagaacatgatcaccggtgcggcgcagatggacggcgcgatcctggtggtgtcggcggccgacggcccgatgccgcagacccgcgagcacatcctgctggcccgtcaggtcggcgtgccggcgctggtcgtgttcctgaacaagtgcgacatggtcgacgatccggaactgctcgagctggtcgagatggaagtgcgcgagcttctgtcgaagtacgacttcccgggcgacgacattccgatcgtcaagggttcggcgctggcggcgctggagaactcggacgccaagctcggtcacgacgcgatcctggagctgatgcgccaggtcgacgcctacatcccgcagccggagcgtccgatcgaccagccgttcctgatgccggtggaagacgtgttctcgatctcgggccgcggcaccgtggtgaccggccgtgtcgagcgcggcattctgaaggtcggcgacgaaatcgagatcgtcggcatccgcgacacgcagaagaccacctgcaccggcgtcgaaatgttccgcaagctgctcgatcagggccaggcgggcgacaacatcggcgcgctgctgcgcggcaccaagcgtgaggacgtcgagcgtggccaggtgctgtgcaagccgggttcggtgaagccgcacaccaagttcaaggccgaagcctacatcctgaccaaggaagagggcggccgccacaccccgttcttcaccaactaccgtccgcagttctacttccgcaccaccgacgtgaccggtgttgtgcacctgccggaaggcaccgagatggtgatgccgggcgacaacatcgcgatggaagtgcacctgatcgtgccgatcgcgatggaagaaaagctgcgcttcgccatccgcgaaggcggccgcacggtcggtgccggcgtcgtcgccgcgatcatcgagtaa

SEQ ID NO: 27100 - protein, 396 aa, Rhodopseudomonas palustris CGA009
MAKAKFERTKPHCNIGTIGHVDHGKTSLTAAITKVLAETGGATFTAYDQIDKAPEEKARGITISTAHVEYETQNRHYAHVDCPGHADYVKNMITGAAQMDGAILVVSAADGPMPQTREHILLARQVGVPALVVFLNKCDMVDDPELLELVEMEVRELLSKYDFPGDDIPIVKGSALAALENSDAKLGHDAILELMRQVDAYIPQPERPIDQPFLMPVEDVFSISGRGTVVTGRVERGILKVGDEIEIVGIRDTQKTTCTGVEMFRKLLDQGQAGDNIGALLRGTKREDVERGQVLCKPGSVKPHTKFKAEAYILTKEEGGRHTPFFTNYRPQFYFRTTDVTGVVHLPEGTEMVMPGDNIAMEVHLIVPIAMEEKLRFAIREGGRTVGAGVVAAIIE

SEQ ID NO: 27101 - DNA, 1185 bp, Onion yellows phytoplasma OY-M
  CDS (1)..(1185): transl_table=11
atggctaatgaaaaatttatacgaaacaaaccgcatttaaatgtaggtactattggacacgtagaccacggtaaaactactcttacagcagctattacccaagttttgtctactcgtggcttggctaaaagtagagcttatgatcaaattgataatgctcctgaagaaagagaacgtggaatcactattaaaacttcacacgtagaatatgaaacagaaaaacgtcactatgctcacgttgactgtcctggacacgccgattatgttaaaaacatgattactggtgctgctcaaatggatgctgctattttagttgtttctggtgcagatagtgttatgcctcaaactagagaacacattttattagcgcgccaagttggtgttccaaaaattgttgttttcttaaataaatgtgatctttccccagacgaacaaattttagaattagtagaaatggaagttcgtgaattattatctcaatacgatttcccaggagacgacattcctgttattagaggatctgcattaaaagctttagaaggtgacgctcattacgttgctcaagtaaacgaattaatcgaaactctagacacctacattgaagacccggtgcgcgaagttgacaaacctttcttaatgcctgtagaagatgttttcactattactggtagaggaactgttgttactggtagagtagaaagaggtcaagtaaaagctggtgatgaagtagaaatcgtaggacttaaagaaactagaaaaactattgtaactgcagtagaaatgtttaaaaaagacctagattttgctcaagcaggagacaacgttggagctttattacgtggaattaaccgtgaagacgtacaacgtggacaagttttagctaaaccaggttctgttaagcctcattctaaatttgttgctcaagtttatgttttaactaaagaagaaggaggacgtcacactgcctttttctctcaataccgtcctcaattctatttccgtactacagatattacaggagtagttgaattacaaggtgatgttaaaatggtaatgccaggtgacaacgctgaattagtagttacccttaacaacccaattgctatcgaagaaggaactaaattttctattcgtgaaggtggaaaaacagttggtgcaggatcagtttccaaacttcttaactaa

SEQ ID NO: 27102 - protein, 394 aa, Onion yellows phytoplasma OY-M
MANEKFIRNKPHLNVGTIGHVDHGKTTLTAAITQVLSTRGLAKSRAYDQIDNAPEERERGITIKTSHVEYETEKRHYAHVDCPGHADYVKNMITGAAQMDAAILVVSGADSVMPQTREHILLARQVGVPKIVVFLNKCDLSPDEQILELVEMEVRELLSQYDFPGDDIPVIRGSALKALEGDAHYVAQVNELIETLDTYIEDPVREVDKPFLMPVEDVFTITGRGTVVTGRVERGQVKAGDEVEIVGLKETRKTIVTAVEMFKKDLDFAQAGDNVGALLRGINREDVQRGQVLAKPGSVKPHSKFVAQVYVLTKEEGGRHTAFFSQYRPQFYFRTTDITGVVELQGDVKMVMPGDNAELVVTLNNPIAIEEGTKFSIREGGKTVGAGSVSKLLN

SEQ ID NO: 27103 - DNA, 1191 bp, Geobacter sulfurreducens PCA
  CDS (1)..(1191): transl_table=11
atggcaaaggcaaaattcgagaggacgaaaccgcacgtcaacataggaacgatcggccacgtagaccatggcaagaccacgctgacggcggccataaccaaggtattggcagagcgcggccaggcagagttccgtggttttgaccagattgacaacgctccggaagagcgcgagcgcggtatcaccatcgccacgtcccatgtggagtacgagaccgagaagcgtcactacgcccacgtggactgcccgggtcacgccgactatgtaaagaacatgatcaccggtgcggcgcagatggacggcgcgatcctcgtcgtatccgccgccgatggccccatgccgcagacccgcgagcacatcctgcttgcccgtcaggttggcgtgccctacattgtcgtgttcctgaacaaggccgacatggtagacgacgaagagctgctcgagctggtagagctcgagattcgcgagctgctctcctcctacgacttcccgggtgacgacatcccgatcatcaaggggagcgcgctcaaggggctcaatggcgacaaggacgagctgggcgaagaagccatcctgaagctgatggaagccgttgacaactatattcccgagcccgagcgggccgtagacaagccgttcctgatgcctgtggaggacgtattctcgatctccggtcgcggtaccgtagccacggggcgtgtggagcgcggaattgtcaaggtgggtgaggaggtcgagatcgtcgggatcaaggccactgccaagaccacggtgaccggagtcgagatgttccgcaagcttctggacgaaggccgcgccggtgacaacatcggtgcccttctgcggggggtgaagcgtgaagacatcgagcgtggccaggtgcttgcgaagccggggagcatcactccgcacaccaagttcaaggccgaggcgtacatcctgacgaaggaagaaggtggccgtcacacgccgttcttcaacgggtaccgtccgcagttctacttccgtacgacggacgtgactggcgtagtagaccttcctgccgggactgagatggtaatgcctggcgacaacgtggcggtgacgatcaacctgatcacgccgatcgcgatggatgaaggtcttcggttcgcgattcgcgaaggtggccgtactgtgggcgccggcgtcgtcagctccattatcgaataa

SEQ ID NO: 27104 - protein, 396 aa, Geobacter sulfurreducens PCA
MAKAKFERTKPHVNIGTIGHVDHGKTTLTAAITKVLAERGQAEFRGFDQIDNAPEERERGITIATSHVEYETEKRHYAHVDCPGHADYVKNMITGAAQMDGAILVVSAADGPMPQTREHILLARQVGVPYIVVFLNKADMVDDEELLELVELEIRELLSSYDFPGDDIPIIKGSALKGLNGDKDELGEEAILKLMEAVDNYIPEPERAVDKPFLMPVEDVFSISGRGTVATGRVERGIVKVGEEVEIVGIKATAKTTVTGVEMFRKLLDEGRAGDNIGALLRGVKREDIERGQVLAKPGSITPHTKFKAEAYILTKEEGGRHTPFFNGYRPQFYFRTTDVTGVVDLPAGTEMVMPGDNVAVTINLITPIAMDEGLRFAIREGGRTVGAGVVSSIIE

SEQ ID NO: 27105 - DNA, 1173 bp, Wolbachia endosymbiont of Drosophila melanogaster
  CDS (1)..(1173): transl_table=11
atgacagcgatagtggaagcatttggaaagccgcatgtaaatgtgggaacaataggacatgtggatcatgggaagacgacgttaacagcggcgataacgaagcattatggaaattttgtagcgtacgatcagatagataaagcgccagaagaaaggaagagggggataacgatagcaacagcgcatgttgagtatcagacggaaaaaaggcattatgcacacgttgattgtcctggacacgctgactatgtaaagaatatgatagtaggtgcagcacagatggatgcggcgatattggtagtgtcgggggttgatgggccaatgccacaaacgagagagcatatattgctggcgaagcaggtaggtgttggatatatcgtggtgtatataaataaagctgatgttgctgatgctgatatgatagatttagtagaaatggaagtgagggaattactgagtaaatacggatttccaggggatgaagtgcctgtggtggttggttcagcgctcaaggcgctggaggatgacagcagcgaatatggaaagaaatcaatagataaattgatggaaaagttagatgaatatgtagcggttccaccaaggcctgtggatttaccatttttattgccaatcgaagatgtattttcgatatcggggcgaggaacagtggtaacaggaagaatagagaagggagagataaagacgggagaagagatagagataataggtctgaaagcgacgcaaaagacgatatgcacaggtgttgagatgtttaagaagttgctggataagggaagtgcaggactcaatgtaggaatattgttaagaggaacaaaaagagaagaagtggagagagggcaagtattagcgaaaccggggacgataacaccgcatagaaagtttaaggcggaggtttatatattaaagaaagaggaaggaggaaggcatacaccattttttgcgaattaccagccacagttttatttaaggacaacggatgtaactgggagcataaaattgctagatgggaaggagatggtaatgccaggagataatgtgagtgtagaagtagaattgcaagtaccgatagcaatggataagggattgcgttttgcgataagagaaggcggtagaactgttggttctggtgttgtttctgaaattttggagtga

SEQ ID NO: 27106 - protein, 390 aa, Wolbachia endosymbiont of Drosophila melanogaster
MTAIVEAFGKPHVNVGTIGHVDHGKTTLTAAITKHYGNFVAYDQIDKAPEERKRGITIATAHVEYQTEKRHYAHVDCPGHADYVKNMIVGAAQMDAAILVVSGVDGPMPQTREHILLAKQVGVGYIVVYINKADVADADMIDLVEMEVRELLSKYGFPGDEVPVVVGSALKALEDDSSEYGKKSIDKLMEKLDEYVAVPPRPVDLPFLLPIEDVFSISGRGTVVTGRIEKGEIKTGEEIEIIGLKATQKTICTGVEMFKKLLDKGSAGLNVGILLRGTKREEVERGQVLAKPGTITPHRKFKAEVYILKKEEGGRHTPFFANYQPQFYLRTTDVTGSIKLLDGKEMVMPGDNVSVEVELQVPIAMDKGLRFAIREGGRTVGSGVVSEILE

SEQ ID NO: 27107 - DNA, 1191 bp, Bdellovibrio bacteriovorus HD100
  CDS (1)..(1191): transl_table=11
atgtctaaagagaaatttacacgtaataaaccgcacgtaaatatcggcactatcggtcacgtcgatcatggtaaaacaactttgactgctgctatcacgactactcttgcagcatctggtaaagctcaagcgatggcttacgatcaaatcgataagtctccagaagaaaaagctcgtggtatcacgatctccactactcacgttgagtacgaaactgacaaccgtcactacgctcacgttgactgcccgggtcacgctgactacgtaaaaaacatgatcactggtgctgctcaaatggacggagctatcttggtagtttcttctgctgacggtccaatgccacaaactcgtgagcacatccttcttgcacgtcaagtaggtgttcctgctctagttgtattcatgaacaaagttgacatggttgacgataaagaacttcttgagctagttgagcttgaagttcgtgaacttctgtctaaatacgaattccctggcgatgatatcccagttgttaaaggttctgcattgaaagctcttgaaggcgacacttccgaaatcggtcgtccagctatcatgaaattgatggaagcttgtgatacttacatcccagctccagttcgtgcagtagacaaaactttcttgatgccagtagaggacgtattctctatctctggtcgtggtacagttgttactggccgtgtagagcgtggtattgttaaagttggtgacgagatcgaaatcgttggtatccgtccaactcaaaaaactactgtaactggtatcgagatgttccgtaaacttcttgacgaaggtcaagcaggggacaactgcggtgttcttcttcgtggtactaaaaaagaagacgttgaacgtggccaagtacttgttaaaccaggtacagttaaaccacacaaaaaattcaaagctgaagcgtacatcctgactaaagaagaaggcggacgtcacactccattcttcaacggttaccgtcctcagttctacttccgtactacagacgttactggcgtttgtactttgaaagctggaactgaaatggttatgcctggtgataagatcgaagtttctgttgaacttatcgctcctatcgctatggaaaaagagcttcgcttcgcgatccgtgaaggcggtcgtacagttggagctggtgttgttactgagatccttgagtaa

SEQ ID NO: 27108 - protein, 396 aa, Bdellovibrio bacteriovorus HD100
MSKEKFTRNKPHVNIGTIGHVDHGKTTLTAAITTTLAASGKAQAMAYDQIDKSPEEKARGITISTTHVEYETDNRHYAHVDCPGHADYVKNMITGAAQMDGAILVVSSADGPMPQTREHILLARQVGVPALVVFMNKVDMVDDKELLELVELEVRELLSKYEFPGDDIPVVKGSALKALEGDTSEIGRPAIMKLMEACDTYIPAPVRAVDKTFLMPVEDVFSISGRGTVVTGRVERGIVKVGDEIEIVGIRPTQKTTVTGIEMFRKLLDEGQAGDNCGVLLRGTKKEDVERGQVLVKPGTVKPHKKFKAEAYILTKEEGGRHTPFFNGYRPQFYFRTTDVTGVCTLKAGTEMVMPGDKIEVSVELIAPIAMEKELRFAIREGGRTVGAGVVTEILE

SEQ ID NO: 27109 - DNA, 1188 bp, Mycoplasma mycoides subsp. mycoides SC str. PG1
  CDS (1)..(1188): transl_table=4
atggcaaaagaacaatttgaccgtagtttacctcacgttaatattggaacaattggacacgttgatcatggtaaaactacattaactgctgctattactaaagttttatctgaacaaggtaacgcagaattcaaagattatgcaaatattgataatgccccagaagaaagagaacgtggtattacaattaatactgcacacgttgaatataaaactgctaatagacactatgcacacgtagattgcccaggtcacgctgactatgttaaaaatatgattactggagcagcacaaatggatggagctattttagttgttgctgcaactgatggaccaatgccacaaactagagaacacattctattatcaagacaagttggagttccaaaaatcgttgttttcttaaacaaatgtgatatggttgaagatgatgaaatgatcgatctagttgaaatggaaattagagatctattaactgaatacgactttgacggagaaggagcaccagttattagaggttcagctttaggagcattaaatggtgattcaaaatgaactggagcaattaatgaattaatggcagcagttgatgaatacatcccaactccacaaagagatgctgataaaactttcttaatgccagttgaagacgtatttacaattactggacgtggaactgttgcaacaggacgtgttgaacgtggaactgtaaaagtaaacgaagaagttgaaattattggattaaaagaagaaccaactaaaactgttgttactggattagaaatgtttagaaaactacttgattttgctgtagctggagataatgttggagcattactacgtggtgttgatagacattcagtagaacgtggacaagttttagcaaaacctggaactattaaaccacatactgtattaaaagcttcagtttatgctttaactcaagaagaaggtggacgtcataaaccattctttaataaataccgtcctcaattctacttccgtacaactgatgttactggagaagttactttaccagaaggaactgatatggtaatgcctggtgataatgttgaaatggaaatccaattaatcaaaccagttgctgttgaagaaggaactaaattctcaatccgtgaaggtggaagaacaattggtgctggaacagttatctcaattgaaaaataa

SEQ ID NO: 27110 - protein, 395 aa, Mycoplasma mycoides subsp. mycoides SC str. PG1
MAKEQFDRSLPHVNIGTIGHVDHGKTTLTAAITKVLSEQGNAEFKDYANIDNAPEERERGITINTAHVEYKTANRHYAHVDCPGHADYVKNMITGAAQMDGAILVVAATDGPMPQTREHILLSRQVGVPKIVVFLNKCDMVEDDEMIDLVEMEIRDLLTEYDFDGEGAPVIRGSALGALNGDSKWTGAINELMAAVDEYIPTPQRDADKTFLMPVEDVFTITGRGTVATGRVERGTVKVNEEVEIIGLKEEPTKTVVTGLEMFRKLLDFAVAGDNVGALLRGVDRHSVERGQVLAKPGTIKPHTVLKASVYALTQEEGGRHKPFFNKYRPQFYFRTTDVTGEVTLPEGTDMVMPGDNVEMEIQLIKPVAVEEGTKFSIREGGRTIGAGTVISIEK

SEQ ID NO: 27111 - DNA, 2241 bp, Strongylocentrotus purpuratus
  CDS (70)..(1455)
tcttttctagcattactgcagttgccactttcatctgtctgaaagtcatctggcatataactatccatcatgcctaaggaaaaagcccatatcaacatcgtggtcgtcggtcacgtagattccggcaaatcaaccaccaccggtcatctcatctacaaatgcggtggaatcgacaagcgtgtcatcgagaaattcgagaaggaagcttccgaccttggaaagggatcgttcaagtatgcctgggttctcgacaagctgaaggcagagcgtgaacgtggcatcaccattgacatcgccctgtggaagtttgaaaccccaaagtactgtgtcactgtcatcgatgcacctggtcatcgtgatttcatcaagaacatgatcactggaacctcacaggccgactgtgccgtgttggttgttgccgctggtattggagagtttgaggctggtatctccaaggatgggcagacacgagagcatgccctgctgtgctacaccttgggtgtcaagcagctcattgttgctgtcaacaagatggacagcgcacaatacaatgaagcccgtttcaaagaaatcgtcagggaggtctctggctacatcaagaaggttggctacaacccaaaggctgtgcccttcatcccaatctcaggatgggttggtgacaacatgatggaggcagccacaacgactatgccatggttcaaggggtggtcaattgaacgcaaggataataatgccagtggagtgaccctgttgaatgcccttgatgctatcatgctccctaagaggccacatgacaagcctcttcgtctaccactccaggatgtctacaaaattggaggtattggaactgtgccagtgggccgtgttgaaagtggaacaatcaaggccggtatgatcgctaggtttgcccctgccaatttgaccactgaggtgaagtctgtggagatgcaccatgaaactttggaaaaggcattgccaggtgacaacgtcggcttcaatgtcaagaacgtctctatcaaggatatcaggcgtggtatggtttgcggagaatccaaggacaatcccccaatggctgccaagtccttccaggctcaggtcattgtcatgaaccaccccggtgagatccatgctggctacaccccggttttggattgtcacacagctcacattgcctgcaagttcgcagaactcaaggagaagctcgaccgtcgatcaggcaagagtcttgaggataaccccaagtttgtgaagagtggtgatgccgtcattgccaaactgattccctccaagcagatggtggttgagagttacacagattttgctcctcttggacgttttgctgtccgtgacatgaggcagaccgtagccgtcggtgtggtgaagtctgtcgaaaaggatgaagcatctacaggcaaggttaccaagtctgcccagaaggctggcaagaagaaatgatggcgatggcattctgcatcccaaggctacaacatgtacccactccccttcactaatgagttcaaaggaatcactgcaagccttcgtttacctatgcttcttgaaaaaatgaaaacccaaagaatatcacactaattcttcctccgcagatagcagaggaagatagtgttgctattatatcggcagcatgtttttatcaagtctattctaaacaagactgttacagcaaatgtgctgagagtaaaacaaaaataaaagaaacgcttaatattgctctaaatatgtaccacccatgaaagacgaatggggttataagaagtgacatttctttgaaattttaaaataagtatgtctgtatcaaggtataatcaaaaaagcttatcacacactgtgtgctgcaccaagttttatttaaccctgaaaggcaggggttgtttgacatacagcactgggagctcacccatgatctcgatttagttaacacaacaaaataaaaagagaagtcatcttttttgcaacacggtaaacatgcaggcaaaatgtggtcctcatgggttaatcattcatcagatatgtttttacatctatgttgcatgtaagcaaattgattttagaaatccttagttcaagtggcaattgcaactaaatgtgctcaagtgaactacttgtatggacagagctggtccttaattttggaaaatataatttcttggtgacttaacaatttatttgtatgtaaatggaaacaagtgtatgccttggaaataaatattaaaaaaaaaagaa

SEQ ID NO: 27112 - protein, 461 aa, Strongylocentrotus purpuratus
MPKEKAHINIVVVGHVDSGKSTTTGHLIYKCGGIDKRVIEKFEKEASDLGKGSFKYAWVLDKLKAERERGITIDIALWKFETPKYCVTVIDAPGHRDFIKNMITGTSQADCAVLVVAAGIGEFEAGISKDGQTREHALLCYTLGVKQLIVAVNKMDSAQYNEARFKEIVREVSGYIKKVGYNPKAVPFIPISGWVGDNMMEAATTTMPWFKGWSIERKDNNASGVTLLNALDAIMLPKRPHDKPLRLPLQDVYKIGGIGTVPVGRVESGTIKAGMIARFAPANLTTEVKSVEMHHETLEKALPGDNVGFNVKNVSIKDIRRGMVCGESKDNPPMAAKSFQAQVIVMNHPGEIHAGYTPVLDCHTAHIACKFAELKEKLDRRSGKSLEDNPKFVKSGDAVIAKLIPSKQMVVESYTDFAPLGRFAVRDMRQTVAVGVVKSVEKDEASTGKVTKSAQKAGKKK

SEQ ID NO: 27113 - DNA, 1359 bp, Strongylocentrotus purpuratus
  CDS (1)..(1359)
atggcagcgctgttcacactaaaaacgtgcggcaagaaaccaaatatgcgcagtttacttgctcaagccttcaagtcggcttcgttgaagcaatgtcatgctttgcagtgcaatgctcgcttgatgcggacatttgctcccctgctggctgctgaagccaagcggtcctttgaaagaggaaagcctcatgtgaacattggaactattggtcatgtcgatcatggcaagacaaccctcacagcagctatcacaaaagttcttgcggaggagggcaactctgaattctacaagtacgatgagattgataaagcaccagaggagaagaagagaggtatcacaatcaatgcagcacacatagaatacgagacaggtagcaggcattatgctcacacagattgcccaggtcacgcagattacatcaagaatatgatcactggagcagctcagatggagggtgctatattggttgtcgcggcaacagacggtcagatgcctcagacgagagaacatcttctcttggccaaacagattggtgtagataagatagtagtgtatatcaacaaggctgatgtggtggacgaggagatgctggagcttgttgagcttgagatgagggatgtcttgagtgagtttggatacgatggagaggaaacgcccatgatcatcggctcagctctcaatgtccttgaggacaagaacccagaaattggaaaagaatccattaagaagctgatggaagccgtggatagctggatacctctaccactcagagagctggagaaaccgttcatgatgccggtcgaagctgtctattcaattccagggcgtggtactgttgtatctggtcgtgtagagaggggcgtaatcaagaagagtgatgaagtagaatttgtcggacacagtgcaagaatcaaatcagttgtaacaggtctggagatgttccacaagacgctagaccagggcgaggccggagaccagatgggggcgctagtcaggaacgtcaaacgagacgagatcaggaggggtatggtcatgtgcaaaccaggagttctatcacctcataataacttcattgcgcaggtatacattctcagcaaagatgaaggaggtagacataagccattcacgagtaacttcacacctattatgtactcatacacatgggatgctgcagctaggataacactgcctgaaggcaaggagatggtcatgcctggtgaggatacttccctggagattgctctcaagaggccgatggtgtcggaggtcggtcagcgcttcacgttacgagacggacgcatcacactcggcacgggcatcatcactaaagtcctgaccaacatcgaatcagaagtctaa

SEQ ID NO: 27114 - protein, 452 aa, Strongylocentrotus purpuratus
MAALFTLKTCGKKPNMRSLLAQAFKSASLKQCHALQCNARLMRTFAPLLAAEAKRSFERGKPHVNIGTIGHVDHGKTTLTAAITKVLAEEGNSEFYKYDEIDKAPEEKKRGITINAAHIEYETGSRHYAHTDCPGHADYIKNMITGAAQMEGAILVVAATDGQMPQTREHLLLAKQIGVDKIVVYINKADVVDEEMLELVELEMRDVLSEFGYDGEETPMIIGSALNVLEDKNPEIGKESIKKLMEAVDSWIPLPLRELEKPFMMPVEAVYSIPGRGTVVSGRVERGVIKKSDEVEFVGHSARIKSVVTGLEMFHKTLDQGEAGDQMGALVRNVKRDEIRRGMVMCKPGVLSPHNNFIAQVYILSKDEGGRHKPFTSNFTPIMYSYTWDAAARITLPEGKEMVMPGEDTSLEIALKRPMVSEVGQRFTLRDGRITLGTGIITKVLTNIESEV

SEQ ID NO: 27115 - DNA, 1386 bp, Nasonia vitripennis
  CDS (1)..(1386)
atgggcaaggagaagatccacataaacatcgtggtgatcggtcacgtcgattccggcaagtcgacgacgaccggccacctgatctacaaatgcggcggcatcgacaagcgtaccatcgaaaaattcgagaaagaagcccaggagatgggcaaaggcagcttcaagtacgcctgggtactggacaagctgaaagccgagcgtgagcgcggcatcaccatcgacatcgccctctggaagttcgagacggccaagtactacgtgaccatcatcgacgcgcccggacatcgggacttcatcaagaacatgataaccggcacgagtcaggccgactgtgccgttctcatcgtcgctgctggaatcggtgagttcgaggccggcatctcgaagaacgggcagacgcgcgagcacgcgctgctggccttcaccttgggcgtcaagcagctgatcgtcggcgtcaacaagatggacatgaccgagcccccctactcggaggcgcgattcgaggagatcaagaaggaggtgtcgtcgtacatcaagaagatcggttacaataccgcctcggtggccttcgtaccgatctccggctggcacggggacaacatgctcgagccgtcgcccaagaccgcctggtacaagggctggaaggtcgagcgcaaggatggaaatgccgatggaaagacgctcatcgaggctctggacgctatcttgccgccgtcgcggccaactgataagccgctgcgtctgccgctgcaggacgtctacaagatcggcggaatcggcactgtaccggtgggtcgagtcgagaccggcatcctgaagccgggcatggtggtgaccttcgccccggcagccctgaccaccgaggtcaagtccgtggagatgcaccacgaggctctgaccgaagctcttcccggcgacaacgtcggcttcaacgtcaagaacatctcggtcaaggagttgcgccgtggctacgtagccggcgactcgaagaaccagccgcctcgcggtgcccaggacttcaccgctcaggtcatcgtcctcaatcatccgggacagatcagcaacgggtacacgcctgtgctcgactgtcacacagctcacatagcttgcaagttcgccgagatcaaggagaagtgcgaccgtcgtacaggtaaaacaacggaggagaatccgaagagcgtgaagacaggagacgcggccatagtgctgctgcagccgacgaagcccatgtgcgtcgaggctttccaggagtttccgccgctcggcagattcgccgtgcgcgacatgcggcagaccgtcgctgtgggggtcatcaagagcgtgaatttcaaagatctccagggcaaggtaacaaaggccgcggagaaggcccagaagaaaaagtaa

SEQ ID NO: 27116 - protein, 461 aa, Nasonia vitripennis
MGKEKIHINIVVIGHVDSGKSTTTGHLIYKCGGIDKRTIEKFEKEAQEMGKGSFKYAWVLDKLKAERERGITIDIALWKFETAKYYVTIIDAPGHRDFIKNMITGTSQADCAVLIVAAGIGEFEAGISKNGQTREHALLAFTLGVKQLIVGVNKMDMTEPPYSEARFEEIKKEVSSYIKKIGYNTASVAFVPISGWHGDNMLEPSPKTAWYKGWKVERKDGNADGKTLIEALDAILPPSRPTDKPLRLPLQDVYKIGGIGTVPVGRVETGILKPGMVVTFAPAALTTEVKSVEMHHEALTEALPGDNVGFNVKNISVKELRRGYVAGDSKNQPPRGAQDFTAQVIVLNHPGQISNGYTPVLDCHTAHIACKFAEIKEKCDRRTGKTTEENPKSVKTGDAAIVLLQPTKPMCVEAFQEFPPLGRFAVRDMRQTVAVGVIKSVNFKDLQGKVTKAAEKAQKKK

SEQ ID NO: 27117 - DNA, 1419 bp, Nasonia vitripennis
  CDS (1)..(1419)
atggcgttagtttctgctaggaccgttttataccccgccctgcggcagaccgtgaggcagttgaacttcacccggcagttggctaaataccaacgtcgcaaccaactatgcagtcgcctgtacttaccagaggtcaccgttcagagactctacgccgagaaggttgtatttgccagagacaagccccacgtgaacattggaaccattggccacgtcgatcatggaaagaccaccttgactgctgccatcacaaaggtgctgtcggagaaggagctggcaaaggccaagaactacaacgagatcgacaatgctccagaggagaaagctcgtggtatcacgatcaacgttgcacacatcgagtaccaaactgagaagaggcattacagtcacacggactgtcctggacacgccgattacataaagaacatgatcactggtacagctcaaatggacggtgctatacttgtggttgccgccactgatggtgctatgcctcagaccaaagagcacttgctactcgccaagcaaattggtatcgagcacatcgttgttttcatcaacaaggtggatgctgccgacgccgaaatggtcgagcttgttgaaatggaaatccgcgagctcatgactgagatgggctacgatggagacaaaatcccagttatcaaaggaagtgccctctctgctctggaaggtaagaaccccgagatcggaagcgaggccataatgaagctcctggaacagatcgatggatacgtacccgtgccagttcgcgatctggacaaacccttcctcttaccagtagaaggtacctactccattcccggtagaggaactgtcgtctcgggtcgcttggaacgtggaaaactgaagaagggccaggaagtcgaattcgtagggtacaacaaacaattaaagagcacggttactggtatagagatgttccacaaaattctggagacggccgaagctggtgatcagttgggagctttgatcaagggtgtgaagcgagaagacatcaggaggggaatgattatggctaagccgggatccgtaaaggcttacgatcatgtggaggctcaagcctatattctaaccagtgaggaaggtggacgtaagaaggcggttcaggatcacatccaacttcaaatgtacagcaagacctgggattgtcctgcccaagttaccattccaggaaagaacttggctatgcctggtgaagacgcaaaattggacctgaaacttctcaaaaatatggtatgtgagaagggacaacgtttcacgttgagagacggtaccgtgacagttggcactggtgtcatcactaatctccttgctcctctcactgagaacgaaaaactggttctggtggaaggtaagaagggtcttaggaaactggagaggaaacaacagaagagttaa

SEQ ID NO: 27118 - protein, 472 aa, Nasonia vitripennis
MALVSARTVLYPALRQTVRQLNFTRQLAKYQRRNQLCSRLYLPEVTVQRLYAEKVVFARDKPHVNIGTIGHVDHGKTTLTAAITKVLSEKELAKAKNYNEIDNAPEEKARGITINVAHIEYQTEKRHYSHTDCPGHADYIKNMITGTAQMDGAILVVAATDGAMPQTKEHLLLAKQIGIEHIVVFINKVDAADAEMVELVEMEIRELMTEMGYDGDKIPVIKGSALSALEGKNPEIGSEAIMKLLEQIDGYVPVPVRDLDKPFLLPVEGTYSIPGRGTVVSGRLERGKLKKGQEVEFVGYNKQLKSTVTGIEMFHKILETAEAGDQLGALIKGVKREDIRRGMIMAKPGSVKAYDHVEAQAYILTSEEGGRKKAVQDHIQLQMYSKTWDCPAQVTIPGKNLAMPGEDAKLDLKLLKNMVCEKGQRFTLRDGTVTVGTGVITNLLAPLTENEKLVLVEGKKGLRKLERKQQKS

SEQ ID NO: 27119 - DNA, 1386 bp, Nasonia vitripennis
  CDS (1)..(1386)
atgggtaaggagaaggttcacatcaacatcgtcgtcatcggacacgtagattccggaaagtcgaccaccactggtcacttgatctacaaatgcggtggtatcgacaagcgtaccatcgagaagttcgagaaggaagcccaggagatgggtaagggttccttcaagtatgcctgggtcttggacaaactgaaggccgagcgtgagcgtggtatcaccatcgatattgctctgtggaaattcgagacttccaagtactacgtcaccatcatcgacgctcccggacacagagatttcatcaagaacatgatcactggtacgtcgcaggccgattgcgccgtgttgatcgtcgctgccggtactggtgaattcgaagccggtatctccaagaacggtcagacccgtgagcacgctctgcttgccttcactcttggtgtcaagcagttgatcgttggtgtcaacaagatggactccaccgagccaccctactcggaggctcgtttcgaggaaatcaagaaggaagtatcttcctacatcaagaagatcggttacaacccagccgctgttgccttcgtccccatctctggatggcacggagacaacatgttggagccatccaccaaaatgccctggttcaagggatgggctgttgagcgcaaggaaggcaaggccgacggcaagtgcctcatcgaagctcttgacgccatcctgccacccagcaggcccaccgacaaagcccttcgtcttcccctccaggacgtctacaagattggtggtattggaacggtacccgtcggtcgtgtcgagactggtgtgctgaagcccggtatggtcgtcaccttcgccccagctggactcaccactgaggttaagtccgtcgaaatgcaccacgaagctctgactgaggccgtccccggagacaacgttggtttcaacgttaagaacgtttccgtcaaggacttgcgtcgtggatacgtcgctggtgactccaagaacaacccacccaagggagccgctgacttcaccgctcaggtcatcgtcctgaaccaccctggtcagatcagcaacggatacacgcccgtgctcgattgccacacggcccacattgcttgcaagttcgccgaaatcaaggagaagtgcgaccgtcgtaccggtaaaaccaccgaagagaaccccaaggccatcaagtctggtgatgccgccatcgtcaaccttgtgcccagcaagcccatgtgcgtagaggccttccaggagttcccacccctgggacgtttcgctgtccgtgacatgcgtcaaaccgtcgctgtcggtgtcatcaaggccgtcaacttcaaggacgttagcggcaaggtcaccaaggctgccgagaaggcccagaaaaagaagtag

SEQ ID NO: 27120 - protein, 461 aa, Nasonia vitripennis
MGKEKVHINIVVIGHVDSGKSTTTGHLIYKCGGIDKRTIEKFEKEAQEMGKGSFKYAWVLDKLKAERERGITIDIALWKFETSKYYVTIIDAPGHRDFIKNMITGTSQADCAVLIVAAGTGEFEAGISKNGQTREHALLAFTLGVKQLIVGVNKMDSTEPPYSEARFEEIKKEVSSYIKKIGYNPAAVAFVPISGWHGDNMLEPSTKMPWFKGWAVERKEGKADGKCLIEALDAILPPSRPTDKALRLPLQDVYKIGGIGTVPVGRVETGVLKPGMVVTFAPAGLTTEVKSVEMHHEALTEAVPGDNVGFNVKNVSVKDLRRGYVAGDSKNNPPKGAADFTAQVIVLNHPGQISNGYTPVLDCHTAHIACKFAEIKEKCDRRTGKTTEENPKAIKSGDAAIVNLVPSKPMCVEAFQEFPPLGRFAVRDMRQTVAVGVIKAVNFKDVSGKVTKAAEKAQKKK

SEQ ID NO: 27121 - DNA, 1389 bp, Unknown
  Unidentified
  CDS (1)..(1389)
atgttaatacaaagaatattgctgcgctcgttcaattgtgtgaggtcacagaggcttagcttaaatgtcaagcatgtttgccaaataaatcttgactactttcacaccaaagcaaactggagcaaacagcgtttctactctagcgatgcgaatgacaaggatttaatttgtagcgtagggactatcggacatgtagatcatggcaaaactactctcacagctgccatcactaaatatttatcagaaaaggacaaaaactgtaaatacgtttcctacgatgaaattgatcgtgctcctgaggagaaagctcggggtatcacaataaacattgctcacattggatatcggactaagaagaggagatatgctcatactgattgtcctggacatttggatttcatcaagaatatgatcagtggagcatcccagatggatggagcaattcttatagttgctgccacggatggtcccatgccccaaactatggaacaccttctgctggctaagcaagtcggagttaaggagatcatagtttacatcaacaaagctgatctggttgacgaagaagttctggaccttgtggatctagagatcagggagcttttggaaaattttggatttgactctgaaaatagtccagtaataaggggttcagctttattggctcttaaaggagacacttctaattatggaactccatcagtgcaaaatttattggatgctatggactcgtacttttcacctcccaaaagagactacacatctcctttcattttaccttgtgataaccttttcaatgtaccaggtagaggtactgttgttgttggaactgtcaaaagaggaatcatcaagaagggtgcagaagcagaacttattggatttgatgagcgtatcaaaaccgtccttagcgacgttcagattttccaaaaaagtgtaccagaagctccagctggcgaaaatgttggtgttctgctcagaggtgtaaaaattaatgctgtgagaagaggaatgtgggtcgttccaagaggttcacaaacgtttagcaatcactatgaagctcaactatatcttctaaacacttctgaaggaggcagacatagacctcttgggaaaaacggatactgttcgattatgtactgctcgacttggaacatctacacgagagtcgatcttatactaccagatggccaaaatatgctgatgcctggtgaacaggccacttgcagattgactctacttgactgtatgccaatactgatgggtcagactttcacgataagagaacagaagtgcactgtcgccaccggaatcataactgcagttcacgatcgcgtggaattcgacaaaaggaaaatgaatgagataaaaattcctggagtcaatgcgtaa

SEQ ID NO: 27122 - protein, 462 aa, Unknown
  Unidentified
MLIQRILLRSFNCVRSQRLSLNVKHVCQINLDYFHTKANWSKQRFYSSDANDKDLICSVGTIGHVDHGKTTLTAAITKYLSEKDKNCKYVSYDEIDRAPEEKARGITINIAHIGYRTKKRRYAHTDCPGHLDFIKNMISGASQMDGAILIVAATDGPMPQTMEHLLLAKQVGVKEIIVYINKADLVDEEVLDLVDLEIRELLENFGFDSENSPVIRGSALLALKGDTSNYGTPSVQNLLDAMDSYFSPPKRDYTSPFILPCDNLFNVPGRGTVVVGTVKRGIIKKGAEAELIGFDERIKTVLSDVQIFQKSVPEAPAGENVGVLLRGVKINAVRRGMWVVPRGSQTFSNHYEAQLYLLNTSEGGRHRPLGKNGYCSIMYCSTWNIYTRVDLILPDGQNMLMPGEQATCRLTLLDCMPILMGQTFTIREQKCTVATGIITAVHDRVEFDKRKMNEIKIPGVNA

SEQ ID NO: 27123 - DNA, 1422 bp, Magnaporthe grisea 70-15
  CDS (1)..(1422)
atgggtaacaaggagaagagccatcttaacgtcgtcgtcatcggacacgtcgactccggaaagtccacgactaccggccacttgatctacaagctgaagggtattgaccagcgtacgatcgagaagtacgagaaggaagccgctgagttgggcaagggttccttcaagtatgcctgggttcttgacaagctcaaggccgagcgtgagcgcggtatcaccatcgacattgctctttggaagttcgagaccgccaagtaccaggtcaccgtcattgacgcccccggtcaccgtgatttcatcaagaacatgattactggtacttcgcaggccgactgcgccattctggtcatcggtgccggtaccggtgagttcgaggctggtatctccaaggatggccagacccgtgagcacgctctgctcgctttcaccctgggtgttaggcagctcattgttgccgtcaacaagatggacactgccaagtgggcccagtcccgttacgacgagattgtcaaggagacctccaacttcttgaagaagattggtttcaaccctgactccgtccccttcgttcccatctccggtttcaacggtgaccacatgatctcggagtccgccgacatcaagggcaacatctcccctaacgctccttggtacaagggctggaccaagaccgtcaacaaggacggtaagaaggagaaggtcatcggtggtgcttcgctccaggacgccattgacgacgtcacccctcccactcgtcccaccgacaagcccctccgtcttcccctccaggatgtctacaagatcggtggtatcggcacagtccccgtcggccgtatcgagactggtatcctcaagcccggtatggtcgttaccttcgcccccgccaacgtcaccactgaagtcaagtccgtggagatgcaccaccagcagctccccgagggtgtccccggtgacaacgttggtttcaacgtcaagaacgtgtccgtcaaggacattcgccgtggtaacgtcgctggtgacagcaagaacgaccctcctatgggctgcgcttcgttcaacgctcaggtcatcatcctgaaccaccccggccaggtcggtgctggttacgcccccgttctggactgccacactgcccacatcgcctgcaagttctctgagatccttgagaagcttgaccgccgtaccggcaagtccatcgagtccaaccccaagttcatcaagtcgggtgacgctgccatcgtcaagatgattccgtccaagcccatgtgtgtcgagactttctccgagtaccctccccttggtcgtttcgccgtccgtgacatgcgtcagaccgtcgctgtcggtgtcatcaagagcgtcgacaagtcccagggtacccagggcaaggtcaccaagtccgctgccaaggccgccaagaaataa

SEQ ID NO: 27124 - protein, 473 aa, Magnaporthe grisea 70-15
MGNKEKSHLNVVVIGHVDSGKSTTTGHLIYKLKGIDQRTIEKYEKEAAELGKGSFKYAWVLDKLKAERERGITIDIALWKFETAKYQVTVIDAPGHRDFIKNMITGTSQADCAILVIGAGTGEFEAGISKDGQTREHALLAFTLGVRQLIVAVNKMDTAKWAQSRYDEIVKETSNFLKKIGFNPDSVPFVPISGFNGDHMISESADIKGNISPNAPWYKGWTKTVNKDGKKEKVIGGASLQDAIDDVTPPTRPTDKPLRLPLQDVYKIGGIGTVPVGRIETGILKPGMVVTFAPANVTTEVKSVEMHHQQLPEGVPGDNVGFNVKNVSVKDIRRGNVAGDSKNDPPMGCASFNAQVIILNHPGQVGAGYAPVLDCHTAHIACKFSEILEKLDRRTGKSIESNPKFIKSGDAAIVKMIPSKPMCVETFSEYPPLGRFAVRDMRQTVAVGVIKSVDKSQGTQGKVTKSAAKAAKK

SEQ ID NO: 27125 - DNA, 1332 bp, Magnaporthe grisea 70-15
  CDS (1)..(1332)
atgtctgctactttcagatccctcgcaccgttcgccagaacggcgcggttcgccttcaagaagacgggcaaccccttggtctcactccagcagcagtcaaggtctcctgtcctgaacttgaggagaggttacgctgtgtacgagaggacaaagcctcacgtcaacatcggcacaatcggtcacgtcgatcacggcaagaccaccctttccgctgccatcaccaagaggcaggccgagaagggcttcgcaaacttccttgactatgccgccatcgacaaggctcccgaggagaggaagcgtggtatcaccatctcgtcagcacacatcgagtactctacggaaaaccgtcactactcccacgttgactgcccgggtcacgccgattacatcaagaacatgattactggtgctgccaacatggacggtgccattattgtcgtcgctgcctcggatggtcagatgccccagacccgtgagcacttgcttctcgcccgccagattggtatccagaagatcgttgtcttcgtcaacaaggtcgacgctctcgatgaccctgaaatgttggagcttgtcgagatggagatgcgtgagctgctcaacagctatggcttcgctggtgatgacacccccgttatcatgggttcggccctttgcgctctgaacgacaagcgccccgaaatcggtcagcagaagatcgacgagctgcttgaggccgttgacacctggatccccacccccgagcgtgaccttgacaagcccttcctgatgtcggttgaggatgtcttcaccatcggcggtcgtggtacagtcgtctcgggccgtgtccagcgcggtatcctgaagcgtgatgctgagatcgagattgttggcaaatccgacgaggttgtcaagaccaaggtcaccgatattgagaccttcaagaagtcgtgcgaggagtctcgcgctggtgacaactctggtttgctgctccgtggtgtccgccgtgaggacatcaagcgcggtcaggtcatcgctgcccctggcagcatcaaggcccacaagcagttcctggtctctctctacgtcctgaccaaggaggagggtggaaggcacactggtttccaggagaactacatgccccagatgtacatcaggactgccagcgaggcctgctccctgcactggcccgagggcaccgaggatgcctccagcaagatggtcatgcccggtgacaatgttgagatgaccgctaccctgcacagccctatcgctgtcgagcctggtttgaggatcaatatccgtgagggtggcaagactgtcgccactggtctggttactcgcatcctcaaataa

SEQ ID NO: 27126 - protein, 443 aa, Magnaporthe grisea 70-15
MSATFRSLAPFARTARFAFKKTGNPLVSLQQQSRSPVLNLRRGYAVYERTKPHVNIGTIGHVDHGKTTLSAAITKRQAEKGFANFLDYAAIDKAPEERKRGITISSAHIEYSTENRHYSHVDCPGHADYIKNMITGAANMDGAIIVVAASDGQMPQTREHLLLARQIGIQKIVVFVNKVDALDDPEMLELVEMEMRELLNSYGFAGDDTPVIMGSALCALNDKRPEIGQQKIDELLEAVDTWIPTPERDLDKPFLMSVEDVFTIGGRGTVVSGRVQRGILKRDAEIEIVGKSDEVVKTKVTDIETFKKSCEESRAGDNSGLLLRGVRREDIKRGQVIAAPGSIKAHKQFLVSLYVLTKEEGGRHTGFQENYMPQMYIRTASEACSLHWPEGTEDASSKMVMPGDNVEMTATLHSPIAVEPGLRINIREGGKTVATGLVTRILK

SEQ ID NO: 27127 - DNA, 1338 bp, Gibberella zeae PH-1
  CDS (1)..(1338)
atgtcgaccgctttccgatctgttgcgcctttcctgcgcactgctcgacaagggctccgggctaaccccgtcaaccctctccagtccgccttcaccaagaagaacgcctctggagtcctcaacctctaccgcacatacgccgtctttgagcgatcaaagccccatgtgaacattggtaccattggtcacgtcgatcacggcaagaccactctctctgctgccatcaccaagcgccaggccgacaagggcctcgccaacttcctcgagtatggtgccattgacaaggctcccgaggagagaaagcgtggtatcaccatctctaccgcccacatcgagtacgccaccgagaaccgccactactcccacgtcgactgccctggtcacgccgattacatcaagaacatgattactggtgctgccaacatggacggtgctatcatcgtcgttgccgcctccgatggtcagatgccccagacccgtgagcacttgctgctcgcccgtcaggtcggtgtccagcgaattgtcgtcttcgtcaacaaggtcgatgccattgacgaccccgagatgcttgagctcgttgagatggagatgcgtgagcttctcaacacctacggcttcgagggtgacgacacccccgtcatcatgggttccgctctcatgtccctccagaatcagcgccccgagatcggtacccagaaggtcgatgagctcctcgccgctgtcgacgagtggatccctacccccgagcgtgaccttgacaagcctttcctcatgtccgtcgaggatgtcttctccattgccggccgtggtactgtcgtctctggccgtgtcgagcgtggtatcctcaagcgtgaccaggagatcgagcttgtcggcaagggtcaagaggtcatcaagaccaaggtcaccgatatcgagaccttcaagaagtcttgcgagcagtcccaggctggagacaactccggtcttctcatccgaggtgtccgccgtgaggatgtccgccgtggtatggtcgtctgcgctcccggcaccgtcaagtctcacactcagttcctcgcttctctctacgttctcaccaaggaggagggtggccgacacaccggtttccaggagcactaccgacctcagctctacctccgaactgctgatgagtccatcgacctgaccttccccgagggtactgaggatgccaccagcaagatgatcatgcccggtgacaacaccgagatggtcgtcaccatgggccatcccaacgctattgaggtcggtcagcgattcaacatccgtgagggtggccgaaccgttgctactggtctctgcactcgcatcatcaagtaa

SEQ ID NO: 27128 - protein, 445 aa, Gibberella zeae PH-1
MSTAFRSVAPFLRTARQGLRANPVNPLQSAFTKKNASGVLNLYRTYAVFERSKPHVNIGTIGHVDHGKTTLSAAITKRQADKGLANFLEYGAIDKAPEERKRGITISTAHIEYATENRHYSHVDCPGHADYIKNMITGAANMDGAIIVVAASDGQMPQTREHLLLARQVGVQRIVVFVNKVDAIDDPEMLELVEMEMRELLNTYGFEGDDTPVIMGSALMSLQNQRPEIGTQKVDELLAAVDEWIPTPERDLDKPFLMSVEDVFSIAGRGTVVSGRVERGILKRDQEIELVGKGQEVIKTKVTDIETFKKSCEQSQAGDNSGLLIRGVRREDVRRGMVVCAPGTVKSHTQFLASLYVLTKEEGGRHTGFQEHYRPQLYLRTADESIDLTFPEGTEDATSKMIMPGDNTEMVVTMGHPNAIEVGQRFNIREGGRTVATGLCTRIIK

SEQ ID NO: 27129 - DNA, 1383 bp, Gibberella zeae PH-1
  CDS (1)..(1383)
atgggtaaggaggagaagactcaccttaacgtcgtcgtcatcggccacgtcgactctggcaagtcgaccactaccggtcacttgatctaccagtgcggtggtatcgacaagcgaaccatcgagaagttcgagaaggaagccgccgagctcggtaagggttccttcaagtacgcctgggttcttgacaagctcaaagccgagcgtgagcgtggtatcaccattgatatcgccctctggaagttcgagactcctcgctactatgtcaccgtcattgacgctcccggtcaccgtgatttcatcaagaacatgatcactggtacttcccaggccgattgcgccattctcatcattgccgccggtactggtgagttcgaggctggtatctccaaggatggccagacccgtgagcacgctctccttgcctacacccttggtgtcaagaacctcattgttgccatcaacaagatggacaccaccaagtggtctgaggcccgttaccaggagatcatcaaggagacctcttctttcatcaagaaggtcggctacaaccccaaggctgtcgctttcgtccccatctccggtttcaacggtgacaacatgcttactgcctccaccaactgcccctggtacaagggttgggagcgtgagatcaagtctggcaagctctccggaaagaccctccttgaggccattgactccatcgagccccccaagcgtcccaacgacaagcccctccgacttcccctccaggatgtctacaagattggcggtattggaacggttcctgtcggccgtatcgagactggtatcatcaagcccggtatggtcgttaccttcgctccttccaacgtcaccactgaagtcaagtccgttgagatgcaccacgagcagctcactgagggacagcccggtgacaacgttggtttcaacgtgaagaacgtttccgtcaaggacatccgacgtggtaacgtcgctggtgactccaagaacgacccccccatgggtgccgcttctttcaccgcccaggtcatcgtcctcaaccaccccggtcaggtcggtgctggttacgctcccgtcctcgattgccacactgcccacattgcctgcaagttcgccgagatccaggagaagatcgaccgccgaaccggtaaggctactgaggccgcccccaagttcatcaagtctggtgactccgccatcgtcaagatggttccctccaagcccatgtgtgttgaggctttcaccgactaccctcctctgggtcgtttcgccgtccgtgacatgcgacagaccgtcgccgtcggtgtcatcaaggccgtcgagaagtccactggcgctgctggcaaggtcaccaagtccgctgccaaggctggtaagaaataa

SEQ ID NO: 27130 - protein, 460 aa, Gibberella zeae PH-1
MGKEEKTHLNVVVIGHVDSGKSTTTGHLIYQCGGIDKRTIEKFEKEAAELGKGSFKYAWVLDKLKAERERGITIDIALWKFETPRYYVTVIDAPGHRDFIKNMITGTSQADCAILIIAAGTGEFEAGISKDGQTREHALLAYTLGVKNLIVAINKMDTTKWSEARYQEIIKETSSFIKKVGYNPKAVAFVPISGFNGDNMLTASTNCPWYKGWEREIKSGKLSGKTLLEAIDSIEPPKRPNDKPLRLPLQDVYKIGGIGTVPVGRIETGIIKPGMVVTFAPSNVTTEVKSVEMHHEQLTEGQPGDNVGFNVKNVSVKDIRRGNVAGDSKNDPPMGAASFTAQVIVLNHPGQVGAGYAPVLDCHTAHIACKFAEIQEKIDRRTGKATEAAPKFIKSGDSAIVKMVPSKPMCVEAFTDYPPLGRFAVRDMRQTVAVGVIKAVEKSTGAAGKVTKSAAKAGKK

SEQ ID NO: 27131 - DNA, 1410 bp, Apis mellifera
  CDS (1)..(1410)
atggcgttgaggtgtacaaaaattatttgcgattctggttttcgatatacaataaagcaaccatttctagttgaatattttgttaaacagttttatggacaatcacgtgcagggacttatttgtcgggtgtgataacgcaaaaattttatagcacgaaaaaagtatttaacagaactaaaccgcactgtaatgtcggtactatcggacatgtggatcatggaaaaacgacacttacagcagctattactaaagttcttgccgagaaagagttggcagaagcgaaagactatgccgatatcgataatgcacctgaagaaaaagaacgtggtataactatcaatgtcgctcacgttgaatatcagacggagaaacgtcattacggtcataccgattgtcctggacacgcggattatattaaaaacatgattactggtacggcacaaatggatggggctattctcgttgttgccgctactgatggtactatgccgcaaacgagagaacatcttttgcttgccaagcagatcggtatccaacatattgtcacatttattaataaggttgatgtcgctgatgaagaaatggtggatttagtagagatggaattaagggagctattaagcgaaatgggttatgatggagataatataccctttattaaaggaagtgccctttgcgcgttaaataattctaatccaaaaataggacatgattctatattaaagttgttagaagctgtggatgactatattcctactcctatcagagatttggacaaaccctttttgttaccgatagaaaatgtttacacgatttcgggtagaggaacagtagtcacaggtagattggaacgtggaaaaataaaaaagggtatggattgtgaattgcttgggtttaataaaatgataaagagcacgataacgggaatagaaatgtttcatcaaacgttggaagaggctgaagcaggagatcaaatgggtgctttgcttagaggtttgaaaagagacgaggttagaagagggatggtattgtgtaaaccaggcactatgaaagctaatgatcatttggaatgtcaagtatatatgttgactagtgcggaaggaggtaaaagaaaacctatcaataatcttgtgcaaattcaaatgttttgcaaaacatgggattgtgcaagtcaattaaatttggtagataagactttggtcatgcctggtgaagattctaccattagattaaaattaataagaccaatggtgtgcgaaaaaggacaacgatttactttaagagatggaaaggtaactatagcaactggagtaattacgaatattttaccaaagctgaacgaacatgaacgactggaaattctcgaaggtaaaaagaaaggattgaaaaaagaaatggcaaaagcttaa

SEQ ID NO: 27132 - protein, 469 aa, Apis mellifera
MALRCTKIICDSGFRYTIKQPFLVEYFVKQFYGQSRAGTYLSGVITQKFYSTKKVFNRTKPHCNVGTIGHVDHGKTTLTAAITKVLAEKELAEAKDYADIDNAPEEKERGITINVAHVEYQTEKRHYGHTDCPGHADYIKNMITGTAQMDGAILVVAATDGTMPQTREHLLLAKQIGIQHIVTFINKVDVADEEMVDLVEMELRELLSEMGYDGDNIPFIKGSALCALNNSNPKIGHDSILKLLEAVDDYIPTPIRDLDKPFLLPIENVYTISGRGTVVTGRLERGKIKKGMDCELLGFNKMIKSTITGIEMFHQTLEEAEAGDQMGALLRGLKRDEVRRGMVLCKPGTMKANDHLECQVYMLTSAEGGKRKPINNLVQIQMFCKTWDCASQLNLVDKTLVMPGEDSTIRLKLIRPMVCEKGQRFTLRDGKVTIATGVITNILPKLNEHERLEILEGKKKGLKKEMAKA

SEQ ID NO: 27133 - DNA, 1299 bp, Candida glabrata CBS 138
  CDS (1)..(1299)
atgactgtattggtgccaaggttgttgccaactgctatgaagttgagaccgctatggtctcaagccagcagaacttttgctacttctatgcgtctgaatgctgctgctttcgacagatcaaagccccacgttaatatcggtactattggtcacgtcgatcacggtaagactacattgacagctgctatcaccaagacattggccaagaacggtggtgctgatttcttggactactcttccattgacaaagctccagaggagagagcccgtggtatcactatctctactgcccatgtcgagtacgagaccgccaagagacattactcccacgtcgactgtccaggtcacgccgactacatcaagaacatgattactggtgctgcccaaatggacggtgctatcatcgttgtcgccgccaccgatggtcaaatgccacaaactagagagcatttgctgttggccagacaagtcggtgttcaacgtatcgttgtctttgtcaacaaggtggacaccatcgatgaccctgaaatgttggaattagtggaaatggaaatgagagaattgttgaacgaatacggttttgacggtgacaatgcccctatcattatgggttccgctttgtgtgccctagaaggtcgtcaacctgaaattggtgagcaagctatcatgaaactattggacgctgttgatgaatacattccaaccccagaaagagacttgaacaagccattcttgatgcctgttgaagacatcttctccatctctggtagaggtaccgtcgtcactggacgtgtcgaaagaggtaacttgaagaagggtgaagaagttgaaattgttggtcacaacactaccccattgaagaccaccgttactggtatcgaaatgttcagaaaggaattggaccaagctatggctggtgacaacgccggtatcctattgagaggtatcagaagagaccaattgaagagaggtatggtcatggccaagccaggtaccgtcaaggctcacaccaagattttggcttctttgtacatcttgtctaaggaagaaggtggtagacattctggtttcggtgaaaactacagacctcagatgtttatcagaaccgcagatgtcactgttgtgatgaagttcccagaatctgtggaagaccactctatgcaagttatgccaggtgacaacgtcgaaatggtctgtgaactagtccacccaacaccaatggaagttggtcaacgtttcaacatcagagaaggtggtaagaccgttggtactggtttgattacccgtatcatcgagtaa

SEQ ID NO: 27134 - protein, 432 aa, Candida glabrata CBS 138
MTVLVPRLLPTAMKLRPLWSQASRTFATSMRLNAAAFDRSKPHVNIGTIGHVDHGKTTLTAAITKTLAKNGGADFLDYSSIDKAPEERARGITISTAHVEYETAKRHYSHVDCPGHADYIKNMITGAAQMDGAIIVVAATDGQMPQTREHLLLARQVGVQRIVVFVNKVDTIDDPEMLELVEMEMRELLNEYGFDGDNAPIIMGSALCALEGRQPEIGEQAIMKLLDAVDEYIPTPERDLNKPFLMPVEDIFSISGRGTVVTGRVERGNLKKGEEVEIVGHNTTPLKTTVTGIEMFRKELDQAMAGDNAGILLRGIRRDQLKRGMVMAKPGTVKAHTKILASLYILSKEEGGRHSGFGENYRPQMFIRTADVTVVMKFPESVEDHSMQVMPGDNVEMVCELVHPTPMEVGQRFNIREGGKTVGTGLITRIIE

SEQ ID NO: 27135 - DNA, 1377 bp, Candida glabrata CBS 138
  CDS (1)..(1377)
atgggtaaggacaagcaacacgttaacgtcgtcgtcattggtcacgtcgattccggtaagtctactaccaccggtcacttgatctacaagtgtggtggtattgacaagagaaccatcgaaaagttcgagaaggaagccgctgaattgggtaagggttctttcaagtacgcttgggttttggacaagttgaaggctgaaagagaaagaggtatcactatcgatatcgctttgtggaagttcgaaactccaaagtaccacgttaccgttatcgatgctccaggtcacagagatttcatcaagaacatgattactggtacttcccaagctgactgtgctatcttgattattgctggtggtgtcggtgaattcgaagctggtatctccaaggacggtcaaaccagagaacacgctctattggctttcaccctaggtgttagacaattgattgtcgctgtcaacaagatggactccgtcaagtgggacgaatccagattcgctgaaatcgtcaaggaaacctccaacttcatcaagaaggtcggttacaacccaaagactgttccattcgtcccaatctctggttggaacggtgacaacatgattgaagccaccaccaacgcttcctggtacaagggttgggaaaaggaaaccaaggctggtgtcgtcaagggtaagaccttgttggaagccattgatgctatcgaaccaccaaccagaccaactgacaagccattgagattgccattgcaagatgtctacaagatcggtggtatcggtacggtgccagtcggtagagtcgaaaccggtgtcatcaagccaggtatggttgttaccttcgccccagctggtgttaccactgaagtcaagtccgttgaaatgcaccacgaacaattgactgaaggtttgccaggtgacaacgttggtttcaacgttaagaacgtttccgttaaggaaatcagaagaggtaacgtctgtggtgactccaagaacgacccaccaaaggctgctgcttctttcaacgctaccgtcattgtcttgaaccacccaggtcaaatctctgctggttactctccagttttggactgtcacaccgcccacattgcttgtaagttcgaagaattgttggaaaagaacgacagaagatccggtaagaagttggaagactctccaaagttcttgaagtccggtgacgctgctttggttaagttcgttccatccaagccaatgtgtgtcgaagctttctccgactacccaccattgggtagattcgctgtcagagacatgagacaaactgtcgctgtcggtgttatcaagtccgttgacaagactgacaaggccggtaaggttaccaaggctgctcaaaaggctgccaagaaataa

SEQ ID NO: 27136 - protein, 458 aa, Candida glabrata CBS 138
MGKDKQHVNVVVIGHVDSGKSTTTGHLIYKCGGIDKRTIEKFEKEAAELGKGSFKYAWVLDKLKAERERGITIDIALWKFETPKYHVTVIDAPGHRDFIKNMITGTSQADCAILIIAGGVGEFEAGISKDGQTREHALLAFTLGVRQLIVAVNKMDSVKWDESRFAEIVKETSNFIKKVGYNPKTVPFVPISGWNGDNMIEATTNASWYKGWEKETKAGVVKGKTLLEAIDAIEPPTRPTDKPLRLPLQDVYKIGGIGTVPVGRVETGVIKPGMVVTFAPAGVTTEVKSVEMHHEQLTEGLPGDNVGFNVKNVSVKEIRRGNVCGDSKNDPPKAAASFNATVIVLNHPGQISAGYSPVLDCHTAHIACKFEELLEKNDRRSGKKLEDSPKFLKSGDAALVKFVPSKPMCVEAFSDYPPLGRFAVRDMRQTVAVGVIKSVDKTDKAGKVTKAAQKAAKK

SEQ ID NO: 27137 - DNA, 1293 bp, Kluyveromyces lactis NRRL Y-1140
  CDS (1)..(1293)
atgtctttcttggcccctagatttttgaccaccaaggttttcagacctatgtctattggtgcaagaaccttttcttcgtcaatccgtgtctctgctgctgcttttgaccgttctaaaccacatttgaacattggtaccatcggccacgtcgatcatggtaagactactttgactgctgccatcaccaagactttggctgaacgtggtggtgctgatttcttggactactcttccattgacaaggctccagaagaaagagcgagaggtatcactatttctactgcacatgttgaatatgaaactgacaagagacattactctcacgtcgactgtccaggtcatgctgattacatcaagaatatgattactggtgctgcccaaatggatggtgctatcattgttgttgctgctacagatggtcaaatgcctcaaaccagagaacatttgttgttggctagacaagttggtgttcaacacatcgttgttttcgttaacaaggttgacactatcgatgaccctgaaatgttagaattggttgaaatggaaatgagagaattattgacccaatacggtttcgatggtgacaacactccagtcatcatgggttctgctttgtgtgctttagaaggtaagcaaccagaaattggtgaacaagcaatcatgaagttattggacgctgttgacgaatacatcccaactccagctcgtgatttggaaaagcctttcttgatgcctgttgaagatatcttctccatctccggtagaggtaccgtcgtaactggtagagttgaacgtggtaacttgaagaagggtgaagaaatcgaaatcgttggtcacaacaccactccattcaagaccactgttactggtattgaaatgttcagaaaggaattggaccaagctatggctggtgataacgctggtgtcttgttgagaggtgtcagaagagaccaattaaagagaggtatggtcttggccaagccaggtactgtcaaggctcacaccaaattcttggcctctttgtatatcttgaccaaggaagaaggtggtagacattccggtttcggtgaaaattacagacctcaaatctacgttagaactgctgatgtcaccgttgttttgaagttcccagaagctgttgaagatcactctatgcaagtcatgccaggtgacaacgtcgaaatggaatgtgaattggttcacccaactcctttggaagctggtcaacgtttcaacatcagagaaggtggtaagactgtcggtactggtctagtcactagaatcttggagtaa

SEQ ID NO: 27138 - protein, 430 aa, Kluyveromyces lactis NRRL Y-1140
MSFLAPRFLTTKVFRPMSIGARTFSSSIRVSAAAFDRSKPHLNIGTIGHVDHGKTTLTAAITKTLAERGGADFLDYSSIDKAPEERARGITISTAHVEYETDKRHYSHVDCPGHADYIKNMITGAAQMDGAIIVVAATDGQMPQTREHLLLARQVGVQHIVVFVNKVDTIDDPEMLELVEMEMRELLTQYGFDGDNTPVIMGSALCALEGKQPEIGEQAIMKLLDAVDEYIPTPARDLEKPFLMPVEDIFSISGRGTVVTGRVERGNLKKGEEIEIVGHNTTPFKTTVTGIEMFRKELDQAMAGDNAGVLLRGVRRDQLKRGMVLAKPGTVKAHTKFLASLYILTKEEGGRHSGFGENYRPQIYVRTADVTVVLKFPEAVEDHSMQVMPGDNVEMECELVHPTPLEAGQRFNIREGGKTVGTGLVTRILE

SEQ ID NO: 27139 - DNA, 1377 bp, Kluyveromyces lactis NRRL Y-1140
  CDS (1)..(1377)
atgggtaaggaaaagtctcacgttaacgttgtcgttattggtcacgtcgattctggtaagtctaccactaccggtcatttgatctacaagtgtggtggtattgacaagagaaccattgaaaagttcgaaaaggaagccgctgaattgggtaagggttctttcaagtacgcttgggttttggacaagttaaaggctgaaagagaaagaggtatcaccatcgatatcgctttgtggaagttcgaaactccaaagtaccaagttaccgttatcgatgctccaggtcacagagatttcatcaagaacatgattactggtacttctcaagctgactgtgctatcttgattattgctggtggtgtcggtgaattcgaagccggtatctccaaggatggtcaaaccagagaacacgctttgttggctttcaccttgggtgttagacaattgattgttgctgttaacaagatggattccgttaagtgggatgaatctcgtttccaagaaattgtcaaggaaacctctaacttcatcaagaaggtcggttacaacccaaagactgttccattcgtcccaatctctggttggaacggtgacaacatgattgaagccaccaccaatgcttcatggtacaagggttgggaaaaggaaaccaagtccggtgtcgtcaagggtaagaccttgttggaagctattgacgctatcgaaccaccatccagaccaactgacaagccattgagattgccattgcaagatgtctacaagattggtggtatcggaactgtgccagtcggtagagtcgaaaccggtgttatcaagccaggtatgattgttaccttcgccccagccggtgttactactgaagttaagtccgtcgaaatgcaccacgaacaattggaagaaggtctaccaggtgacaacgtcggtttcaacgtcaagaacgtttccgttaaggaaatcagaagaggtaacgtctgtggtgactccaagaacgatccaccaaaggctgctgcttctttcaacgccactgttatcgtcttgaaccatccaggtcaaatctctgctggttactctccagttttggattgtcacactgctcacattgcttgtaagttcgacgaattgttggaaaagaacgacagaagatccggtaagaagttggaagactctccaaagttcttgaagtccggtgatgctgctttggttaagttcgttccatctaagccaatgtgtgttgaagccttctctgactacccacctctaggtagattcgctgtcagagacatgagacaaaccgtcgctgtcggtgttatcaagtccgttgacaagactgacaaggccggtaaggtcaccaaggccgctgtcaaggctggtaagaaataa

SEQ ID NO: 27140 - protein, 458 aa, Kluyveromyces lactis NRRL Y-1140
MGKEKSHVNVVVIGHVDSGKSTTTGHLIYKCGGIDKRTIEKFEKEAAELGKGSFKYAWVLDKLKAERERGITIDIALWKFETPKYQVTVIDAPGHRDFIKNMITGTSQADCAILIIAGGVGEFEAGISKDGQTREHALLAFTLGVRQLIVAVNKMDSVKWDESRFQEIVKETSNFIKKVGYNPKTVPFVPISGWNGDNMIEATTNASWYKGWEKETKSGVVKGKTLLEAIDAIEPPSRPTDKPLRLPLQDVYKIGGIGTVPVGRVETGVIKPGMIVTFAPAGVTTEVKSVEMHHEQLEEGLPGDNVGFNVKNVSVKEIRRGNVCGDSKNDPPKAAASFNATVIVLNHPGQISAGYSPVLDCHTAHIACKFDELLEKNDRRSGKKLEDSPKFLKSGDAALVKFVPSKPMCVEAFSDYPPLGRFAVRDMRQTVAVGVIKSVDKTDKAGKVTKAAVKAGKK

SEQ ID NO: 27141 - DNA, 1275 bp, Debaryomyces hansenii CBS767
  CDS (1)..(1275)
atgtttagaaacgttgttaatgctttccgttcaactggacgtacttcattcaaagttcgtccaacttcgattagaacttacgcggcattcgaccgttcgaagccacatgttaacattggtaccatcggacatgtcgatcacggtaagactaccttaacagctgctatcaccaaggttttggccgataagggtggtgcttctttcttagattatcagtctattgatagagctccagaagaaagatccagaggtattaccatttccaccactcatgttgaatacgaaactgagaagagacattatgcccatgttgattgtccaggtcacgctgattacattaagaatatgattactggtgctgctcaaatggatggtgctatcatcgttgttgcagcttctgacggacaaatgccacaaactagagaacatttgttattggccagacaagttggtgttcaacacttagttgttttcgtcaacaaggttgatactattgacgacccagaaatgttggaattagttgaaatggaaatgagagaattattgtcgcaatacggttttgatggtgacaacactccagttgttatgggatctgctttatgtgctttagaaaataagcaaccggaaattggtgtccaagccattgaaaagttgttagacaacgttgatgaatacattccaactccacaacgtgatttggaacaaccattcttgttacctgttgaagatgttttctctatctccggtagaggtactgtcgttaccggtagagttgaaagaggtactttaaagaagggtgaagaaatcgaaattgtcggtaacttcgacaagaccttcaaggccactgttactggtattgaaatgttcaagaaggaattggatgctgctatggctggtgacaatgccggtattttattgagaggtgttaagagagacgaaatcaaccgtggtatggttttagctaagccaggtactgtcacttcccacaagaaggtcttagcctccttgtatattttaagtaaggaagaaggtggtcgtcactcctcattcggtgaaaactacaagccacaattgttccttagaaccaccgatgtcactggtactttaagattcccagaaggtgctgaccactctcaaatggtcatgccaggtgacaacattgaaatggaaatcgaattagtcagaaagaccccaattgaagtcaaccaacgtttcaacatcagagaaggtggtaagaccgttggtactggtttagtcaccagaattcttgagtaa

SEQ ID NO: 27142 - protein, 424 aa, Debaryomyces hansenii CBS767
MFRNVVNAFRSTGRTSFKVRPTSIRTYAAFDRSKPHVNIGTIGHVDHGKTTLTAAITKVLADKGGASFLDYQSIDRAPEERSRGITISTTHVEYETEKRHYAHVDCPGHADYIKNMITGAAQMDGAIIVVAASDGQMPQTREHLLLARQVGVQHLVVFVNKVDTIDDPEMLELVEMEMRELLSQYGFDGDNTPVVMGSALCALENKQPEIGVQAIEKLLDNVDEYIPTPQRDLEQPFLLPVEDVFSISGRGTVVTGRVERGTLKKGEEIEIVGNFDKTFKATVTGIEMFKKELDAAMAGDNAGILLRGVKRDEINRGMVLAKPGTVTSHKKVLASLYILSKEEGGRHSSFGENYKPQLFLRTTDVTGTLRFPEGADHSQMVMPGDNIEMEIELVRKTPIEVNQRFNIREGGKTVGTGLVTRILE

SEQ ID NO: 27143 - DNA, 1377 bp, Debaryomyces hansenii CBS767
  CDS (1)..(1377)
atgggtaaagaaaagactcacgttaatctcgttgtcattggtcacgtcgattccggtaaatctactaccaccggtcacttaatttacaagtgtggtggtatcgataagagaactattgaaaagttcgaaaaggaagccgccgaattaggtaagggttctttcaagtacgcttgggttttagacaagttaaaggctgaaagagaaagaggtatcaccattgatatcgctttatggaagttcgaaactccaaagttccacgtcactattattgatgctccaggtcacagagatttcatcaagaatatgattactggtacttctcaagctgattgtgctattttgattattgctggtggtattggtgaattcgaagccggtatctctaaggatggtcaaaccagagaacacgctttattagcttacaccttaggtgttaagcaattgattgttgctatcaacaagatggactctgtcaaatgggacaagaacagatacgacgaaattgtcaaggaatgttccaacttcgtcaagaaggtcggtttcaacccaaagagtgttccattcgtcccaatctctggttggaacggtgacaacatgattgaagcatctccaaactgtccatggtacaagggttgggaaaaggaaaccaaggctggtaagtcctctggtaagactttgttagaagctattgatgccattgaaccaccaagcagaccaactgataagccattgagattaccattgcaagatgtctacaagattggtggtattggaactgtgccagtcggtagagttgaaaccggtatcatcaaggccggtatggttgtcacctttgccccagctggtgttaccactgaagttaagtccgttgaaatgcatcacgaacaattaaccgaaggtgttccaggtgacaatgttggtttcaacgtcaagaatgtttccgttaaggaaattagaagaggtaacgtctgtggtgactccaagaacgacactccaaagggttgtgattctttcgccgctcaagttattgtcttgaaccacccaggtcaaatctcctctggttactctccagtcttagattgtcacactgctcacattgcctgtaagttcgacaccttaatcgaaaagattgacagaagaactggtaagaagttagaagacaaccctaagttcatcaagtctggtgacgccgctattgtcaagatggttccatctaagccaatgtgtgttgaagctttcactgactacccaccattaggtagattcgctgtcagagatatgagacaaactgttgccgtcggtgttatcaagtctgttgaaaagtctgacaaggctggtaaggttaccaaggctgctcaaaaggctgctaagaaataa

SEQ ID NO: 27144 - protein, 458 aa, Debaryomyces hansenii CBS767
MGKEKTHVNLVVIGHVDSGKSTTTGHLIYKCGGIDKRTIEKFEKEAAELGKGSFKYAWVLDKLKAERERGITIDIALWKFETPKFHVTIIDAPGHRDFIKNMITGTSQADCAILIIAGGIGEFEAGISKDGQTREHALLAYTLGVKQLIVAINKMDSVKWDKNRYDEIVKECSNFVKKVGFNPKSVPFVPISGWNGDNMIEASPNCPWYKGWEKETKAGKSSGKTLLEAIDAIEPPSRPTDKPLRLPLQDVYKIGGIGTVPVGRVETGIIKAGMVVTFAPAGVTTEVKSVEMHHEQLTEGVPGDNVGFNVKNVSVKEIRRGNVCGDSKNDTPKGCDSFAAQVIVLNHPGQISSGYSPVLDCHTAHIACKFDTLIEKIDRRTGKKLEDNPKFIKSGDAAIVKMVPSKPMCVEAFTDYPPLGRFAVRDMRQTVAVGVIKSVEKSDKAGKVTKAAQKAAKK

SEQ ID NO: 27145 - DNA, 1287 bp, Yarrowia lipolytica CLIB122
  CDS (1)..(1287)
atgttcttcaaaacgcttgctagtgtgcgacccgccgcccagcgagtggccacctccgttgccagcaacaaggtcctctttgcccgaggttacgctgcctttgaccgatccaagccccacgtgaacattggaaccattggccacgttgaccacggaaagaccactctgaccgccgctatcaccaaggtgcttgccgagaagggcggcgccaagttcctggactacaattctatcgaccgagctcccgaggagcgagctcgaggtatcaccatttctacctcccacgttgagtacgagactgctaaccgacactacgcccacgttgactgtcccggtcacgccgattacatcaagaacatgatcaccggtgccgcccagatggacggtgctatcattgttgttgctgctggagacggttctaagccccagacccgagagcatctgctgcttgctcgacaggttggtgttcagaacctggttgttttcgttaacaaggttgatcagattgaggataaggagattctggagctcgttgacatggagatgcgagatctgctgacccagtacggatttgatggtgacaacacccccgtcatcatgggctctgctctgtgcgctcttgagggcaagcagaaggacattggtgaagacgccattgtttcccttatggaggccgttgatgagcacatccccacccctaaccgtgatcttgagaagcccttcctgatgcccgttgaggagatttactccatctctggccgaggaaccgtcgttactggtcgagtcgagcgaggaaacctgaagaagggtgaggaaatcgagcttgttggctacaacaagaagcccgtcaaggccgtcgttactggtattgagatgttcaagaaggatctcgactccgccatggctggtgacaatgccggtatcctgctccgaggtatcaagcgagacgagatcaagcgaggtatggtcatcagcaagcctggtaccgtcagcgcccacactaagttccttgcttctctttacgtcatccccaccgaggagggaggccgagccacctcttttggcagcaactaccgaccccagatgtacatccgaacctcttccgtcaccgccatcctgactttccccgagggtaccgacgagtcccagaccgtcaaccccggtgacaacactgagatggttttcgagcttgttcaccctacccctgtggaggtcaaccagcgattcaacatccgagagggtggaaagactgttggtaccggtcttgtgacccgagtcattcagtaa

SEQ ID NO: 27146 - protein, 428 aa, Yarrowia lipolytica CLIB122
MFFKTLASVRPAAQRVATSVASNKVLFARGYAAFDRSKPHVNIGTIGHVDHGKTTLTAAITKVLAEKGGAKFLDYNSIDRAPEERARGITISTSHVEYETANRHYAHVDCPGHADYIKNMITGAAQMDGAIIVVAAGDGSKPQTREHLLLARQVGVQNLVVFVNKVDQIEDKEILELVDMEMRDLLTQYGFDGDNTPVIMGSALCALEGKQKDIGEDAIVSLMEAVDEHIPTPNRDLEKPFLMPVEEIYSISGRGTVVTGRVERGNLKKGEEIELVGYNKKPVKAVVTGIEMFKKDLDSAMAGDNAGILLRGIKRDEIKRGMVISKPGTVSAHTKFLASLYVIPTEEGGRATSFGSNYRPQMYIRTSSVTAILTFPEGTDESQTVNPGDNTEMVFELVHPTPVEVNQRFNIREGGKTVGTGLVTRVIQ

SEQ ID NO: 27147 - DNA, 1389 bp, Anopheles gambiae str. PEST
  CDS (1)..(1389)
atgggaaaggagaagactcatattaacatcgtcgtcatcggtcacgtcgactccggcaagtcgaccaccaccggccatctgatctacaagtgcggcggtatcgacaagcgtacgatcgagaagttcgagaaggaggcgcaggaaatgggcaagggctcgttcaagtacgcctgggtgctggacaagctgaaggcggagcgtgagcgtggtatcaccatcgatatcgcgctgtggaagttcgaaacgtccaagtactacgtgacgatcatcgacgcccctggccatcgcgatttcatcaagaacatgatcaccggcacgtcccaggcggactgtgccgtgctgatcgttgccgccggtaccggcgagttcgaggccggcatctccaagaacggccagacccgcgagcacgccctgctggccttcacgctcggcgtcaagcagctgatcgtcggcgtgaacaagatggactcgaccgatccgccgtaccatgaggcgcgctacgaggaaatcaagaaggaggtgtcgtcgtacatcaagaagatcggctacaacccggcctcggttgcgttcgtgccgatctcgggctggcacggcgacaacatgctcgaaccgtcggacaagatgccgtggttcaagggatgggccgtggagcgcaaggagggcaaggctgagggcaagacgctcatcgaagccctggacaacattctgccgccgtcgcgcccgaccgacaaggcgctgcgtctgccgctgcaggacgtttacaaaatcggcggtatcggtacggtaccggtcggtcgtgttgaaaccggcgttctcaagccaggtatggtggttgtgttcgctccggtcaacatcaccactgaggtaaagtccgtggagatgcaccacgaggctctggccgaggctctgcccggtgacaacgttggcttcaacgtgaagaacgtgtcggtgaaggagctgcgccgtggctacgttgccggtgactccaaggctagcccaccgaagggtgcctccgatttcaccgctcaggtcattgtgctgaatcatccgggccagatctgcaacggctacacgccggtgctcgattgccacaccgctcacattgcgtgcaagtttgcggaaatcaaggagaagtgcgatcgccgttccggcaaggtgaccgaggagaacccgaagtcgatcaagtccggtgacgctgcgatcgtcaacctggtgccaagcaagccgctgtgcgtcgaaagcttccaggagttcccgccgctcggccgcttcgccgtgcgcgacatgcgtcagacggtggccgtcggcgtcatcaagtcggtcaactttaaggaggcttccggtggtaaagtaacgaaggccgccgaaaaggcccagaagaagaaataa

SEQ ID NO: 27148 - protein, 462 aa, Anopheles gambiae str. PEST
MGKEKTHINIVVIGHVDSGKSTTTGHLIYKCGGIDKRTIEKFEKEAQEMGKGSFKYAWVLDKLKAERERGITIDIALWKFETSKYYVTIIDAPGHRDFIKNMITGTSQADCAVLIVAAGTGEFEAGISKNGQTREHALLAFTLGVKQLIVGVNKMDSTDPPYHEARYEEIKKEVSSYIKKIGYNPASVAFVPISGWHGDNMLEPSDKMPWFKGWAVERKEGKAEGKTLIEALDNILPPSRPTDKALRLPLQDVYKIGGIGTVPVGRVETGVLKPGMVVVFAPVNITTEVKSVEMHHEALAEALPGDNVGFNVKNVSVKELRRGYVAGDSKASPPKGASDFTAQVIVLNHPGQICNGYTPVLDCHTAHIACKFAEIKEKCDRRSGKVTEENPKSIKSGDAAIVNLVPSKPLCVESFQEFPPLGRFAVRDMRQTVAVGVIKSVNFKEASGGKVTKAAEKAQKKK

SEQ ID NO: 27149 - DNA, 1386 bp, Aspergillus nidulans FGSC A4
  CDS (1)..(1386)
atgtcgggcctttctagaaccgccaaccttctttttcgcaccaccaagacgtctattctgcgtccccgtggtgtaaaccctgtgcaatatgcgctctccaaagataggcagactgtccgcgcgatggcaactaccttcgagcgcaccaagccccatgtgaacatcggcaccattggacacgtcgatcacggcaagaccacattgaccgctgccatcaccaagcaccaggcctccaaagggcttgcccaattccttgagtatggtgctattgacaaggctcctgaggagcgtaagcgtggtattaccatctctaccgcccacatcgagttctcgaccgacaacaggcactacgctcacgtcgactgtcccggtcacgccgattacattaaaaacatgattactggtgccgccaacatggacggtgctatcgttgttgttgccgcttccgatggacagatgccccagactcgtgagcacttgctgcttgcccgccaagtcggtgtccagaagattgttgttttcgtcaacaaggtcgatgccgtcgatgaccctgagatgttggagctcgttgagctggagatgcgtgagcttcttaacacttacggcttcgagggtgaagagacccctatcatcttcggctccgccttgtgcgctctcgaggaccgccgtcccgaaattggtactgagcaaattgacaaacttctggaggctgttgacacttggatccctactccccagcgtgacttggataagcccttcctgatgtccgtcgaggaagtcttctccattcctggacgtggtaccgtcgcctccggccgtgtcgagcgtggtcttctcaagaaggatagcgaaattgagatccacggtggcggtgaagtccagaagaccaaggtcaccgacatcgagactttcaagaagtcctgtgacgagtcccgtgccggtgacaactccggtctccttctccgtggtacacgccgtgaggatgtcaagcgcggtatggtcatcgctgctcctggctctatcaaggcccacaagaagttcttggtctccatgtatgtcctgaccgaggctgagggtggccgccgcagcggattcggttccaactaccgcccccaggcctacatccgcactgccggtaagtctttctcgaacaatttgaatgccatcttcgggcatcatcgtcgttctaaccaatgtttagacgaggcttgtgatctcaccttccccgatggcgacctaagccgtcgtgtcatgccgggtgacaacgtcgaaatgattttgaaccttaaccgccctgtcgccgccgaggctggtcagcgcttcaacatccgtgagggtggccgtaccgttgctaccggtctgatcacgcgcgtcattgaggagtaa

SEQ ID NO: 27150 - protein, 461 aa, Aspergillus nidulans FGSC A4
MSGLSRTANLLFRTTKTSILRPRGVNPVQYALSKDRQTVRAMATTFERTKPHVNIGTIGHVDHGKTTLTAAITKHQASKGLAQFLEYGAIDKAPEERKRGITISTAHIEFSTDNRHYAHVDCPGHADYIKNMITGAANMDGAIVVVAASDGQMPQTREHLLLARQVGVQKIVVFVNKVDAVDDPEMLELVELEMRELLNTYGFEGEETPIIFGSALCALEDRRPEIGTEQIDKLLEAVDTWIPTPQRDLDKPFLMSVEEVFSIPGRGTVASGRVERGLLKKDSEIEIHGGGEVQKTKVTDIETFKKSCDESRAGDNSGLLLRGTRREDVKRGMVIAAPGSIKAHKKFLVSMYVLTEAEGGRRSGFGSNYRPQAYIRTAGKSFSNNLNAIFGHHRRSNQCLDEACDLTFPDGDLSRRVMPGDNVEMILNLNRPVAAEAGQRFNIREGGRTVATGLITRVIEE

SEQ ID NO: 27151 - DNA, 1377 bp, Candida albicans SC5314
  CDS (1)..(1377): transl_table=12
atgggtaaagaaaaaactcacgttaacgttgttgttattggtcacgtcgattccggtaaatccactaccaccggtcacttaatttacaagtgtggtggtattgataaaagaaccattgaaaagttcgaaaaagaagctgctgaattgggtaaaggttctttcaaatacgcttgggtcttggacaaattgaaggctgaaagagaaagaggtatcaccattgatatcgctttgtggaaattcgaaactccaaaataccacgttaccgtcattgatgctccaggtcacagagatttcatcaagaatatgatcactggtacttctcaagctgattgtgctattttgattattgctggtggtactggtgaattcgaagccggtatttctaaggatggtcaaaccagagaacacgctttgttggcttacactttgggtgtcaaacaattgattgttgctgtcaacaagatggactctgtcaaatgggacaaaaacagatttgaagaaatcatcaaggaaacctccaacttcgtcaagaaggttggttacaacccaaagactgttccattcgttccaatctctggttggaatggtgacaacatgattgaagcatccaccaactgtccatggtacaagggttgggaaaaggaaaccaaatccggtaaagttactggtaagaccttgttagaagctattgacgctattgaaccaccaaccagaccaaccgacaaaccattgagattgccattgcaagatgtttacaagatcggtggtattggtactgtgccagtcggtagagttgaaactggtatcatcaaagccggtatggttgttactttcgccccagctggtgttaccactgaagtcaaatccgttgaaatgcatcacgaacaattggctgaaggtgttccaggtgacaatgttggtttcaacgttaagaacgtttccgttaaagaaattagaagaggtaacgtttgtggtgactccaagaacgatccaccaaagggttgtgactctttcaatgcccaagtcattgttttgaaccatccaggtcaaatctctgctggttactctccagtcttggattgtcacactgcccacattgcttgtaaattcgacactttggttgaaaagattgacagaagaactggtaagaaattggaagaaaatccaaaattcgtcaaatccggtgatgctgctatcgtcaagatggtcccaaccaaaccaatgtgtgttgaagctttcactgactacccaccattaggtagattcgctgtcagagatatgagacaaaccgttgctgttggtgtcatcaaatctgttgaaaaatccgacaaagctggtaaagttaccaaggctgctcaaaaagctgctaagaaataa

SEQ ID NO: 27152 - protein, 458 aa, Candida albicans SC5314
MGKEKTHVNVVVIGHVDSGKSTTTGHLIYKCGGIDKRTIEKFEKEAAELGKGSFKYAWVLDKLKAERERGITIDIALWKFETPKYHVTVIDAPGHRDFIKNMITGTSQADCAILIIAGGTGEFEAGISKDGQTREHALLAYTLGVKQLIVAVNKMDSVKWDKNRFEEIIKETSNFVKKVGYNPKTVPFVPISGWNGDNMIEASTNCPWYKGWEKETKSGKVTGKTLLEAIDAIEPPTRPTDKPLRLPLQDVYKIGGIGTVPVGRVETGIIKAGMVVTFAPAGVTTEVKSVEMHHEQLAEGVPGDNVGFNVKNVSVKEIRRGNVCGDSKNDPPKGCDSFNAQVIVLNHPGQISAGYSPVLDCHTAHIACKFDTLVEKIDRRTGKKLEENPKFVKSGDAAIVKMVPTKPMCVEAFTDYPPLGRFAVRDMRQTVAVGVIKSVEKSDKAGKVTKAAQKAAKK

SEQ ID NO: 27153 - DNA, 1281 bp, Candida albicans SC5314
  CDS (1)..(1281): transl_table=12
atgttaaaaacactaactcaaactttacgcttaactgggaaagctttcccaaaggtccgtccggccttgatcagaacctacgctgccttcgaccgttctaaacctcatgtcaacattggtactattggtcatgttgatcatggtaaaactacattgactgctgctatcaccaaagttttagccgaacaaggtggtgccaacttcttggattatggttctattgatagagctccagaagaaagagctagaggtatcactatttccactgcccacgttgaatacgaaaccaagaacagacactatgcccacgttgattgtccaggacacgctgattatatcaaaaatatgattactggtgccgctcaaatggatggtgctatcattgttgttgctgccactgatggtcaaatgcctcaaaccagagaacatttgttattggccagacaagttggtgttcaagacttggttgtgtttgtcaacaaagtcgatactattgatgaccctgaaatgttggaattagtcgaaatggaaatgagagaattgttatccacctacggttttgatggtgacaacactccagttattatgggatctgctttaatggctttggaagacaagaaaccagaaattggtaaggaagctatcttgaaattgttagatgctgtcgatgaacacattccaactccatcaagagacttggaacaaccatttttgttaccagttgaagacgtgttctccatctccggtagaggaactgttgtcactggtagagttgaaagaggtgttttgaagaagggtgaagaaatcgaaattgttggtggttttgacaaaccttacaagactactgttaccggtattgaaatgttcaaaaaagaattagactctgctatggctggtgacaactgtggtgttttgttaagaggtgttaaaagagatgaaatcaagagaggtatggttttggccaaaccaggtactgctacttctcacaagaagttcttggcttccttgtatattttgacttccgaagaaggtggtcgttccactccatttggtgaaggttacaagcctcaatgcttcttcagaactaacgatgtcactaccacattttcattcccagaaggagaaggtgttgatcattctcaaatgatcatgccaggtgacaacattgaaatggttggtgaattgatcaaatcttgtccattagaagtcaaccaacgtttcaacttgagagaaggtggtaaaactgttggtactggtttgattaccagaatcatcgaataa

SEQ ID NO: 27154 - protein, 426 aa, Candida albicans SC5314
MLKTLTQTLRLTGKAFPKVRPALIRTYAAFDRSKPHVNIGTIGHVDHGKTTLTAAITKVLAEQGGANFLDYGSIDRAPEERARGITISTAHVEYETKNRHYAHVDCPGHADYIKNMITGAAQMDGAIIVVAATDGQMPQTREHLLLARQVGVQDLVVFVNKVDTIDDPEMLELVEMEMRELLSTYGFDGDNTPVIMGSALMALEDKKPEIGKEAILKLLDAVDEHIPTPSRDLEQPFLLPVEDVFSISGRGTVVTGRVERGVLKKGEEIEIVGGFDKPYKTTVTGIEMFKKELDSAMAGDNCGVLLRGVKRDEIKRGMVLAKPGTATSHKKFLASLYILTSEEGGRSTPFGEGYKPQCFFRTNDVTTTFSFPEGEGVDHSQMIMPGDNIEMVGELIKSCPLEVNQRFNLREGGKTVGTGLITRIIE

SEQ ID NO: 27155 - DNA, 1413 bp, Ustilago maydis 521
  CDS (1)..(1413)
atgagcctcctccgaactcaggcttctcgcttcgtcgtcaggccgctggccaccaacaaggtggttgccgccgctcccgctgctgcccgcacctttgttactcgcccttccaccaaccctgcctccaccctcgcaggccgtgctcgagtatgcgctgctccccttccccgcatcgccatcgcctcgcaggtgcgaacttatgctgctgagtcgggcaagttcgaacgtaccaagccgcacatgaacatcggtaccattggccacgtcgatcacggaaagactactctcaccgccgccatcacaaagaccctccacgaggctcagggcaccggcaaattcatcgactatgcctccattgacaaggcgcctgaagagcgcgctcgtggtattaccatctccaccgcccacgtcgagtacgagacgggcaaccgccactacgcccacgtcgactgccccggtcacgccgattacattcgtaacatgattaccggtgccgctcagatggacggtgccatcatcgtcgtctcggcccccgatggccagatgcctcaaacgcgtgagcatcttttgctcgccaagcaagtcggtatcaagaagcttgtcgtcttcatcaacaaggtcgaccagatcgacgacccagagatgctcgagcttgtcgagatggagatgcgcgatcttctctccacctacggctttgacggcgaaaacactcccttcgtctctggctcagcccttgcggcccttgagagccgtgaccccgaagtcggccaacaggctatccttaagctcatggaagagaccgacaagtggctcgaccttccccctcgtgatctcgagaagcctttcctcatgcccgtcgaggacgtcttctctatccccggtcgtggcactgtcgtcaccggtcgtgttgagcgtggtaccatccagaagggtgccgaagttgagatcctcggtctcggcaacaccttcaagaccacccttactggtatcgaaatgttccacaagcagctcgaccagggtatggccggtgacaacatgggtgccttgctgcgtggtgtcaagcgagagcaggtcaagcgtggtcaggtcatggtcatcccaggctctatcaagcctgtcaagaagttccgtgctcaggtctacattctcaagaaggaggagggcggtcgatacacccccttcatgaacaactaccgacctcagctctttatccgaaccgccgatgtcactgtttcgctcactcaccctcccggaaccgaggacgccgacgagaagatggtcatgcccggtgacaatgtcgagctcgacggtgagctcgttcacgacattgcccttgaggagggttcgcgattcaccctccgtgaaggtggtaagaccgtcggtaccggtatcgtgaccaagattcacgcctaa

SEQ ID NO: 27156 - protein, 470 aa, Ustilago maydis 521
MSLLRTQASRFVVRPLATNKVVAAAPAAARTFVTRPSTNPASTLAGRARVCAAPLPRIAIASQVRTYAAESGKFERTKPHMNIGTIGHVDHGKTTLTAAITKTLHEAQGTGKFIDYASIDKAPEERARGITISTAHVEYETGNRHYAHVDCPGHADYIRNMITGAAQMDGAIIVVSAPDGQMPQTREHLLLAKQVGIKKLVVFINKVDQIDDPEMLELVEMEMRDLLSTYGFDGENTPFVSGSALAALESRDPEVGQQAILKLMEETDKWLDLPPRDLEKPFLMPVEDVFSIPGRGTVVTGRVERGTIQKGAEVEILGLGNTFKTTLTGIEMFHKQLDQGMAGDNMGALLRGVKREQVKRGQVMVIPGSIKPVKKFRAQVYILKKEEGGRYTPFMNNYRPQLFIRTADVTVSLTHPPGTEDADEKMVMPGDNVELDGELVHDIALEEGSRFTLREGGKTVGTGIVTKIHA

SEQ ID NO: 27157 - DNA, 1380 bp, Ustilago maydis 521
  CDS (1)..(1380)
atgggtaaagaaaaggctcacgttaacgtcgtcgtcatcggacacgtcgactccggtaagtcgaccaccaccggtcaccttatctacaagtgcggtggtatcgacaagcgtaccgtcgagaagttcgagaaggaggctgccgagctcggtaagggttccttcaagtacgcttgggttcttgacaagctcaaggccgagcgtgaacgtggtatcaccatcgacatcgccctctggaagttcgagacccccaagtacatggttactgtcattgacgcccctggtcaccgtgacttcatcaagaacatgatcactggtacctcgcaggccgactgcgccattctcatcattgccggtggtactggtgagttcgaggctggtatctccaaggacggccagacccgtgagcacgctctcctctcgttcaccctcggtgttcgtcagctcatcgttgccgtcaacaagatggacaccaccaagtactccgaggaccgattcaacgagatcgtcaaggagacctccaacttcatcaagaaggtcggctacaaccccaagaccgtcgccttcgtccccatctccggctggcacggtgacaacatgatcgagcccaccaaggagatgccctggtacaagggatgggagagggagaccaaggccggaaaggtctctggtaagaccctccttgacgccattgacgccatcgagcccccttcgcgccccaccgacaagccccttcgtcttcccctccaggatgtctacaagatcggcggtatcggcactgtgcccgtcggccgtgtcgagactggtatcatcaagggtggtatggttgtcaccttcgccccctcgaacgttaccactgaagtcaagtccgtcgagatgcaccacgagaccctcgccgagggtctgcccggtgacaacgtcggcttcaacgtcaagaacgtttccgtcaaggacattcgccgtggtaacgtctgctctgactccaagaacgaccccgctcaggagaccgagtccttcgtcgcccaggtcatcgtcatgaaccaccctggtcagatcggtaacggttacgcccccgttctcgactgccacaccgcccacattgcttgcaagttcgccgagatcactgagaagatcgaccgccgaactggtaagtcgattgagaacaaccccaagttcatcaagtccggtgacgctgctctcgtcaagatgatccccaccaagcccatgtgcgtcgagtccttctcgacctacccccctcttggccgttttgccgtccgtgacatgcgtcagaccgtcgctgtcggtgtcgtcaagtcgaccacccccgcccagaacaagggtggtaaggtcagcaagtcggccgccaagctcggtgccaagtaa

SEQ ID NO: 27158 - protein, 459 aa, Ustilago maydis 521
MGKEKAHVNVVVIGHVDSGKSTTTGHLIYKCGGIDKRTVEKFEKEAAELGKGSFKYAWVLDKLKAERERGITIDIALWKFETPKYMVTVIDAPGHRDFIKNMITGTSQADCAILIIAGGTGEFEAGISKDGQTREHALLSFTLGVRQLIVAVNKMDTTKYSEDRFNEIVKETSNFIKKVGYNPKTVAFVPISGWHGDNMIEPTKEMPWYKGWERETKAGKVSGKTLLDAIDAIEPPSRPTDKPLRLPLQDVYKIGGIGTVPVGRVETGIIKGGMVVTFAPSNVTTEVKSVEMHHETLAEGLPGDNVGFNVKNVSVKDIRRGNVCSDSKNDPAQETESFVAQVIVMNHPGQIGNGYAPVLDCHTAHIACKFAEITEKIDRRTGKSIENNPKFIKSGDAALVKMIPTKPMCVESFSTYPPLGRFAVRDMRQTVAVGVVKSTTPAQNKGGKVSKSAAKLGAK

SEQ ID NO: 27159 - DNA, 2268 bp, Ustilago maydis 521
  CDS (1)..(2268)
atgaatccaaacgctcctagctttggcggcttcaaccccaacgcctcgggcttcgttcccggcggccagcaacagcagggtcagcagcaacagggcggtactccttatggccagcagggcgcatactaccagcagggtttcggtcagcagcagcagcagcagcaaggcttcaacggcggttacaacagccagtaccagcaataccaacagtaccagcagcagccgtatggtggcggctatgctcagcagggttttaaccaaccgggtttttcgaaccaatacgctcagcagggtttcaacggtctgcctgctcgccccgcagcatcgggttccaaccagcctccagcgcgcccagctcagcccgcagccgctacctctgatgttgcttcccggaagcctgtcagcatctcgatcggcggcggcgccaaacctgccgctcctgcggcttccgatgcaccccgaaagccagtcagcatttccatcggtggaggtgccaagcccgctgctactaccgcagacaagagcgacgccccgcgcaagcctgtcagtatctccattggtggcgccaagaagccagaggctgccaaggaagctgtttccgctgctaccaaagccgagatttcagtacattcggcggccgtcagtgctgtcaaggacaccgaggcaccttcttctaccgctgttactgctccatcctctcgcagtgattcgccagcgccttctgctgctgctgcctcgtcctccgctgccactgcttccaaggccgagtccaaggtggcttcactctcctccaagcctgtcgcaaccgaacgtgctaccacaaatgccgatcagattctcgccgaggcctccaaggtcacggacgaagagacgctcaaggaccttttcggtgagaagagtgacgaactcaagtcgcacttgaacattgtcttcattggccacgtcgatgccggaaagtctaccatgggtggcaacttgctcttcctcaccggcatggtcgacaagcgaaccatggaaaagtacgagcgcgaggccaaggaagctggccgagagtcgtggtacctctcctgggcgctcgactcaacggcgcaagagcgtgagaagggtaagacggtcgaggtgggtcgtgcctacttcgagacgggcaagcgccgctacacgatcctcgatgctccaggacacaagtcgtttgtgcccagtatgatcagtggtgctgcgcaggccgatgtcgccgtcctcgtcatctcggcgcgaaagggcgagttcgagactggttttgaacgtggtggacagacgcgtgagcacgccgttcttgtcaagactgctggtgtccagcgtctcattgtcgtggtcaacaagatggacgagtcgacggtacaatgggaaaagtcgcgctacgaagaaatccaagccaagctcactcccttcctgcgttcggctggcttcaatcccaagaccgatatcacctacattcccgtctcggcgtacgccggccagaatctcaaggaacgtgtgcctaaaagcatctgcgactggtacaatggcccctctctgctcgagttcctcgacaacctcgagctcggcgaccgcaaaatctcggcaccgctcaagatgcccatctcggaaaagtacaatgacatgggtaccgtcgtggtcggcaagctcgaggccggtaagatcaagaagggcgacacgctcctgctcatgcccaacaaggtctcggttgaagcttctgctatcttcaacgagcaggaggaggaagttcctgctgccatctcgggcgacaatgtacgtgtcaagttgaaaggcatcgaccatgaagacgttactgtgggccacgtgttgaccgatcccgtcaacccggtgcatgtagccacacactttgaagctcagctcgccatcctcgagcaccgtaatatcatctgtgccggttacagtgccgtagttcactgccacaccgtgtcacaagaggccaacttggcagcgcttctgcactactacgacaaaaagacgggcaagaagagtcgacgtggtcctcagtttgctaagaagggtatgaagatcatcgcgctcgtcgagcttgctggtccgatctgtgtcgagaggttcaaggactacccgcagctgggccgtttcacgctgcgagacgaaggacgtacggtggctatcggcaaggtgaccaagctcatcacttcggccgacgagttgccggacgttgccaagctcagcgttactgatgctgcttccgctgctgccgccgccaactaa

SEQ ID NO: 27160 - protein, 755 aa, Ustilago maydis 521
MNPNAPSFGGFNPNASGFVPGGQQQQGQQQQGGTPYGQQGAYYQQGFGQQQQQQQGFNGGYNSQYQQYQQYQQQPYGGGYAQQGFNQPGFSNQYAQQGFNGLPARPAASGSNQPPARPAQPAAATSDVASRKPVSISIGGGAKPAAPAASDAPRKPVSISIGGGAKPAATTADKSDAPRKPVSISIGGAKKPEAAKEAVSAATKAEISVHSAAVSAVKDTEAPSSTAVTAPSSRSDSPAPSAAAASSSAATASKAESKVASLSSKPVATERATTNADQILAEASKVTDEETLKDLFGEKSDELKSHLNIVFIGHVDAGKSTMGGNLLFLTGMVDKRTMEKYEREAKEAGRESWYLSWALDSTAQEREKGKTVEVGRAYFETGKRRYTILDAPGHKSFVPSMISGAAQADVAVLVISARKGEFETGFERGGQTREHAVLVKTAGVQRLIVVVNKMDESTVQWEKSRYEEIQAKLTPFLRSAGFNPKTDITYIPVSAYAGQNLKERVPKSICDWYNGPSLLEFLDNLELGDRKISAPLKMPISEKYNDMGTVVVGKLEAGKIKKGDTLLLMPNKVSVEASAIFNEQEEEVPAAISGDNVRVKLKGIDHEDVTVGHVLTDPVNPVHVATHFEAQLAILEHRNIICAGYSAVVHCHTVSQEANLAALLHYYDKKTGKKSRRGPQFAKKGMKIIALVELAGPICVERFKDYPQLGRFTLRDEGRTVAIGKVTKLITSADELPDVAKLSVTDAASAAAAAN

SEQ ID NO: 27161 - DNA, 1395 bp, Cryptococcus neoformans var. neoformans B-3501A
  CDS (1)..(1395)
atgctcagaaacgcccttcagagtcgcctttcctccactctccgaaccgctgagcttagggctgccaggcccgtggctggtccctcggtcctcgctgccaggacattcgtctcaaagccccttccctctcctcgttttcgagctgctgttttgacgccaagacgtctacctactcgtagctacgctgccgaagctggtggtaaattcactagatccaaacctcatttcaacatcggtaccatcggccatgttgaccatggtaaaaccacccttaccgccgccatcactaagcatttggccgagcagggtggcggtaagtttatggactacagccagatcgacaaagctcctgaggagaaagctcgaggtatcaccattagcactgcccatgtcgaatacgagacccccaacaggcactatgcgcatatcgactgtcctggtcatgccgattacatcaaaaacatgattaccggtgccgctcaacttgacggtgctattattgtcgtctctgctactgatggtcaaatgcctcagacccgtgagcatcttcttcttgcccgtcaagttggcatcaagaagttggttgtctttatcaacaaggtcgaccaggtggatgaccccgaaatgctcgagttggttgagatggaaatgagagaattgctaggccagtacggtttcgatggagaggagactcctatcgtcatgggatccgctcttgctgctctcgaaggccgcgaccctgagcgaggcgcgcaaaagattcaggagctcatggagaaggctgatgaatggcttgacgtcccctctcgggacctcgacaagcctttcttgatgtatgttgaggacgtattctctatctctggccgaggcaccgttgttaccgggaaagttgagcgtggtacaatcaccaagggttccgaagtcgaaatcgttggcctcggtgcgcctgtcaaaactattctcactggcattgaaatgttccacaaggagcttgaacgtggtgaagctggtgacaacatgggtgcccttcttcgtggtatcaaacgagagcaggtccgacgaggtcaagttttggtacaacctggctctatcaagagtgttaagaagttcaaggcgcaaatttatatccttaccaaggaggaaggtggtcgttacacccctttcatggctaactaccgacctcagctcttcatccgtactaccgacgtaacttgtgccctcactttcccagagggtaccgagggcgctcatgagaagctcgtcatgcctggtgacaatgttgagatgattggtgaccttgtgcatgacatcgcccttgagcccggatcgcgttttacattgcgagaaggcggtaagactattggcactggtattgtttcagagatctatgaataa

SEQ ID NO: 27162 - protein, 464 aa, Cryptococcus neoformans var. neoformans B-3501A
MLRNALQSRLSSTLRTAELRAARPVAGPSVLAARTFVSKPLPSPRFRAAVLTPRRLPTRSYAAEAGGKFTRSKPHFNIGTIGHVDHGKTTLTAAITKHLAEQGGGKFMDYSQIDKAPEEKARGITISTAHVEYETPNRHYAHIDCPGHADYIKNMITGAAQLDGAIIVVSATDGQMPQTREHLLLARQVGIKKLVVFINKVDQVDDPEMLELVEMEMRELLGQYGFDGEETPIVMGSALAALEGRDPERGAQKIQELMEKADEWLDVPSRDLDKPFLMYVEDVFSISGRGTVVTGKVERGTITKGSEVEIVGLGAPVKTILTGIEMFHKELERGEAGDNMGALLRGIKREQVRRGQVLVQPGSIKSVKKFKAQIYILTKEEGGRYTPFMANYRPQLFIRTTDVTCALTFPEGTEGAHEKLVMPGDNVEMIGDLVHDIALEPGSRFTLREGGKTIGTGIVSEIYE

SEQ ID NO: 27163 - DNA, 2274 bp, Cryptococcus neoformans var. neoformans B-3501A
  CDS (1)..(2274)
atgtccggacagcagccccccagcttcaacccaggcgcattcgagttccgtccaggacaggcacctttcgcccccaggcagcagcagcccttcgacccgtacggccagcagcagggcggatatccccagtacggacagtatggccagcaacagggataccctcaatacggacagtatggcggttaccctcagcagcaaggctaccctgttcccggtgctcccggtgccggacctagggcttaccagcctccacaagccaggaatgtccaaggtttccagcctcccagcttctcttcatcgcctgcgccccctccggacaccaaagctcctgctggaaaacctgtctctttatccattggaggtggtggtgcacccaaagccgctcctagcttgtctatcggtggtggtggtgcgcccaaggctgctcccagcttgagtatcggtggtgcgcccaaggcggcccctagtttgagcattggcggtgctcccaaggccgctcctagcttgagtattggtggtgccaaggcggcccccagtttgagtatcggtggaaagaaagaggagaaaaaggaagagaaggaggcttcctcaaagtcttctcccaaacctgccgctcctacaccaaaacccgccgatgcccctgctgccaagtctgaggccgcctctgcccctgtctctgctgccgagaagaaggctgaaaaggctgttccccttaccagtgacgctcaaggcaaggttgttgctgctgagacttctgctgccagccccgccaagtctggcgctagtactcccgtcgccactgtcagcaccagcaccaccaacttctccaaggtctctgccaagaacgatgctgaagctatctaccgcgagcaaaaccttgctggtgacgctgctttgcgagacctgtacggtgagaacgtcaaggacaccaacatcaagtctcacctaaacatcattttcactggtcacgtcgatgcgggcaagtctactatgggtggtcagttactctacttgactggtgctgttgacaagcgaaccatggaaaagtatgagcaggaggccaaagctgccggtagggagacctggtacctgtcgtgggctttggacagtggtaaggaggagcgagcgaagggtaagaccgttgaggtcggcagggcgtattttgagagtgaaaaacgaaggtataccatcttggacgctcccggtcacaaaacctatgtgcccagtatgatctccggtgccgcccaggccgacgttgctttgcttgtgttgtccgcgcgaaagggcgagtttgagaccggtttcgaacgtgagggtcagaccagagagcacgctatgcttatcaagaacaacggtatcaacaagcttatcgtcgtcgtcaataagatggatgacactactgtgcaatgggacaagggacggtacgatgagattaccactaaaatcactcctttcctcaaggcggttggtttcaaccccaagaccgacatcacttttattcccgtttccgcccagattggtgagaacatgaaggaccgagttgacaaaaagattgctccttggtgggacggcccttcgcttttggagcatcttgacaacatggaaattatggaccgaaacattaatgctcccttcatgcttcccatctctgaaaaatacaacgagttgggtaccatggttatgggcaagattgaatccggccacgtcaagaagggcgacactttgcttatgatgcccaacaagcacactgttgaagtcactggtatcttctctgaacaatcagaggacatggacatggcattctgtggtgacaatatccgaatgcgaatctctggtgtttctgaccgagacattacccccggtttcgtccttacctctgttcaaaagcccgtcaaggctgtcactgccttcaaggcagacattagtttcattgacaccaagaacattatctgtcccggttacagctgtgtcttgcacgtccacacccttgctgaggaagtttccgttacttcattcctccattactacgagaaaaagactaggagaaagtccaagaagccccctcagttcgctaaggctggtatgctggtctctgccctcattgagacttctgcccctatctgtattgaacgattcgaggactataagatgcttggtcgattcactttgcgtgacgaaggtaaaactgttgctattggcaaggtaaccaaacttattgaaaggagcgaggatatgcccgatgttgctgcgctttccttgaaggcggcgtcgtaa

SEQ ID NO: 27164 - protein, 757 aa, Cryptococcus neoformans var. neoformans B-3501A
MSGQQPPSFNPGAFEFRPGQAPFAPRQQQPFDPYGQQQGGYPQYGQYGQQQGYPQYGQYGGYPQQQGYPVPGAPGAGPRAYQPPQARNVQGFQPPSFSSSPAPPPDTKAPAGKPVSLSIGGGGAPKAAPSLSIGGGGAPKAAPSLSIGGAPKAAPSLSIGGAPKAAPSLSIGGAKAAPSLSIGGKKEEKKEEKEASSKSSPKPAAPTPKPADAPAAKSEAASAPVSAAEKKAEKAVPLTSDAQGKVVAAETSAASPAKSGASTPVATVSTSTTNFSKVSAKNDAEAIYREQNLAGDAALRDLYGENVKDTNIKSHLNIIFTGHVDAGKSTMGGQLLYLTGAVDKRTMEKYEQEAKAAGRETWYLSWALDSGKEERAKGKTVEVGRAYFESEKRRYTILDAPGHKTYVPSMISGAAQADVALLVLSARKGEFETGFEREGQTREHAMLIKNNGINKLIVVVNKMDDTTVQWDKGRYDEITTKITPFLKAVGFNPKTDITFIPVSAQIGENMKDRVDKKIAPWWDGPSLLEHLDNMEIMDRNINAPFMLPISEKYNELGTMVMGKIESGHVKKGDTLLMMPNKHTVEVTGIFSEQSEDMDMAFCGDNIRMRISGVSDRDITPGFVLTSVQKPVKAVTAFKADISFIDTKNIICPGYSCVLHVHTLAEEVSVTSFLHYYEKKTRRKSKKPPQFAKAGMLVSALIETSAPICIERFEDYKMLGRFTLRDEGKTVAIGKVTKLIERSEDMPDVAALSLKAAS

SEQ ID NO: 27165 - DNA, 1389 bp, Tribolium castaneum
  CDS (1)..(1389)
atgggtaaagaaaagactcatatcaacatcgtcgttatcggccacgtagattctggtaaatctaccaccactggtcacttgatctacaaatgcggtggcatcgataagcgtacgatcgaaaagttcgagaaggaggcccaggagatgggcaagggttcgttcaaatacgcctgggttttggacaagctcaaagccgagcgtgaacgtggtatcaccatcgatatcgcgctgtggaaattcgaaacttccaaatactacgttactatcattgacgctcccggccacagagatttcatcaagaacatgatcacggggacgtctcaggccgattgcgccgttttgatcgtggccgcaggtaccggtgagttcgaagccggcatctccaagaacggacagacccgcgaacacgcccttctggccttcactctgggagtcaaacaactgatcgttggtgtgaacaagatggactccactgaaccaccatacagcgaagctagatacgaagaaatcaaaaaggaagtgtcttcctacatcaagaagatcggctacaacccagccgctgttgccttcgtacccatctccgggtggcacggggacaacatgttggaaccctccaccaaaatgccctggttcaaggggtggaacatcgaacgcaaggagggcaaagctgagggcaaatgcttgatcgaggcccttgatgccatcctcccgcccacgcgccccaccgacaagcccctccgtcttccgctccaggacgtgtacaagatcggcggtattggaacagtaccagtcggtcgtgtcgaaaccggagtcttgaaacccggaatggtggtcgtgttcgcgcccgctaacatcacgactgaagtcaagtccgtcgaaatgcaccacgaggcgctcccggaggccgtgcccggcgacaacgtcggcttcaacgtgaagaacgtgtccgtgaaggagttgcgtcgtgggtacgtggccggcgactcgaaggccagccccccgaaaggcgcggctgacttcttggcgcaagttatcgtgttgaaccaccctggacaaatttcgaacggttacacccccgttcttgactgtcacaccgctcacatcgcgtgcaagttcgccgaaatcaaagaaaaggtcgaccgtcgttcaggaaagaccactgaagagaatcccaaagctatcaagtctggagacgctgctattgtcactttggtaccgtcgaaaccaatgtgcgtcgaatcattccaggagttcccgccattgggacgtttcgccgtacgtgatatgaggcaaaccgttgccgtaggtgtcatcaagagtgtcaacttcaaggatgctggtgctgggaaagtcacaaaggccgcagaaaaagccgccaagaagaaatga

SEQ ID NO: 27166 - protein, 462 aa, Tribolium castaneum
MGKEKTHINIVVIGHVDSGKSTTTGHLIYKCGGIDKRTIEKFEKEAQEMGKGSFKYAWVLDKLKAERERGITIDIALWKFETSKYYVTIIDAPGHRDFIKNMITGTSQADCAVLIVAAGTGEFEAGISKNGQTREHALLAFTLGVKQLIVGVNKMDSTEPPYSEARYEEIKKEVSSYIKKIGYNPAAVAFVPISGWHGDNMLEPSTKMPWFKGWNIERKEGKAEGKCLIEALDAILPPTRPTDKPLRLPLQDVYKIGGIGTVPVGRVETGVLKPGMVVVFAPANITTEVKSVEMHHEALPEAVPGDNVGFNVKNVSVKELRRGYVAGDSKASPPKGAADFLAQVIVLNHPGQISNGYTPVLDCHTAHIACKFAEIKEKVDRRSGKTTEENPKAIKSGDAAIVTLVPSKPMCVESFQEFPPLGRFAVRDMRQTVAVGVIKSVNFKDAGAGKVTKAAEKAAKKK

SEQ ID NO: 27167 - DNA, 1386 bp, Tribolium castaneum
  CDS (1)..(1386)
atgggtaaggaaaagatccatattaacatcgtcgtgattggtcacgtcgattccggcaagtccacctcgactggtcatttgatttacaaatgcggcggtatcgacaaacgtaccatcgagaaattcgagaaggaggcccaagaaatgggcaagggctctttcaaatacgcctgggttttggacaagctcaaggccgagcgtgagcgtggtatcaccatcgacatcgcgctttggaaattcgaaacctcgaaatactacgttactatcattgacgcccccggccacagggatttcatcaagaacatgatcacgggaacgtcgcaggccgattgtgccgtcttaatcgtagccgcaggcactggcgaattcgaggcagggatttcgaagaacggccaaacgcgcgaacacgcccttttagcgttcactttgggcgtgaaacagctcattgttggagtgaataagatggattcgaccgaaccaccctattccgaggcgcgattcgaggaaatcaagaaggaagtctcgtcgtacatcaagaagatcgggtataatcccgcagctgtggcttttgtccccatttcggggtggcatggggataatatgctcgagccctctgataagatgccctggttcaaggggtggagcgtcgagaggaaggaagggaaggctgaaggaaagacgctgatcgaggcgctggatgcgatcttgccgccgtcaaggcccaccgagaaacctctacgtcttccccttcaggatgtgtacaagattggtggtattggcaccgtgcccgtgggccgagtggagacgggcgtgctgaagcccggcatggtggtgacgttcgcccccgtgggcctgaccactgaagtgaagtcggtggagatgcaccacgaggctctgcaggaggcggtgcccggcgacaacgtcggtttcaacgtgaagaacgtgtccgtaaaggagctgcgtcgcggttacgtggccggagactcgaagaacaatccacccaaaggagctgccgacttcaccgctcaagtcatcgtcctgaaccatcctggccagatcgccaacggatacactccggtattagattgccacactgctcatatcgcttgcaagtttgccgaaatcaaggagaagtgcgatcgccgtacgggcaagacgactgaggagaatccgaagtcgatcaagtctggtgacgccgccatcgtcaacttggtgccgtctaagccactctgcgtcgagtcgttccaagagtttccgcccttgggacgtttcgctgtccgcgatatgcggcaaactgtggccgtcggcgtcatcaagtctgtcaactttaaagatactactgggaaagtaacgaaggccgccgagaaggcacaaaagaagaaataa

SEQ ID NO: 27168 - protein, 461 aa, Tribolium castaneum
MGKEKIHINIVVIGHVDSGKSTSTGHLIYKCGGIDKRTIEKFEKEAQEMGKGSFKYAWVLDKLKAERERGITIDIALWKFETSKYYVTIIDAPGHRDFIKNMITGTSQADCAVLIVAAGTGEFEAGISKNGQTREHALLAFTLGVKQLIVGVNKMDSTEPPYSEARFEEIKKEVSSYIKKIGYNPAAVAFVPISGWHGDNMLEPSDKMPWFKGWSVERKEGKAEGKTLIEALDAILPPSRPTEKPLRLPLQDVYKIGGIGTVPVGRVETGVLKPGMVVTFAPVGLTTEVKSVEMHHEALQEAVPGDNVGFNVKNVSVKELRRGYVAGDSKNNPPKGAADFTAQVIVLNHPGQIANGYTPVLDCHTAHIACKFAEIKEKCDRRTGKTTEENPKSIKSGDAAIVNLVPSKPLCVESFQEFPPLGRFAVRDMRQTVAVGVIKSVNFKDTTGKVTKAAEKAQKKK

SEQ ID NO: 27169 - DNA, 1395 bp, Tribolium castaneum
  CDS (1)..(1395)
atgaccgcttttatcgtcgcacgctcgctcccagtgttaaatcgtgcgattaaacagtttctttcgaatgatttgacgcaccaagcgcgcgtgatccaatgcgttatcccgagcttgacccagagtcggttttacgccgctgagaaaaaagttttcgaccggtcgaagccccactgtaatgtgggcacgatagggcacgtggaccacggcaaaaccactctgactgcggctataactaaagtcctagccgaccaaaagctcgctgaagcgaaaaagtaccaggatattgacaatgcccccgaggagaaggcccgaggcattacgataaatgtggctcatattgagtatcagactgagaacaggcattacgggcatacggactgccccgggcatgccgattatattaaaaatatgatcacgggggctgcgcagatggacgggggcattctcgtggtggcggccaccgatggggtcatgccccaaactagggaacacttgctcctggccaagcaaataggggtggaccacttggtcgtgtttatcaataaagtggacgcggctgataaggagatggtcgagttggtggagatggagattcgggaattgatgacccagatgggctttgacggggataatgtgcccattgttgctgggtcggctctgtgtgcccttgaagggaaaaatcccgagattgggtccgaggcggttcttaaacttttgaaagaagttgataattacattcccactccgacacgggagttggataagccgtttttgctgcccgttgaacatgtctattctattcctggacgggggactgttgtgacggggcgtctggaacgaggggttgtgaaaaaagggaatgattgcgaatttgtggggtacaacaaggttttgaagagtacagtgacgggggtggagatgtttcaccagattttggaggaggcgcaagccggggatcaagtgggggctttggttaggggagtcaaaagggatgatattaagagaggtatggtaatggccaagcccggcactgtgaaaagttacgaccacattgagtctcaagtctatatcttgagcaaggacgagggtggcaggactaagcccttcacttcttacatccaattacagatgttttgtaggacttgggattgcgcaattcaggtcattgtgcccgataaagaaatggtgatgccaggagaggactccaagttgattttgaaattattaagaccgatggtactagaacaaggacaaaggtttactttgagggacggtagccagactcttggtactggggttgtaacaaaagtcttgcccgctctaaaagaaaatgaaagaatacagttgttggaagggaagaaagccagagagaagaggcaggcacagaaataa

SEQ ID NO: 27170 - protein, 464 aa, Tribolium castaneum
MTAFIVARSLPVLNRAIKQFLSNDLTHQARVIQCVIPSLTQSRFYAAEKKVFDRSKPHCNVGTIGHVDHGKTTLTAAITKVLADQKLAEAKKYQDIDNAPEEKARGITINVAHIEYQTENRHYGHTDCPGHADYIKNMITGAAQMDGGILVVAATDGVMPQTREHLLLAKQIGVDHLVVFINKVDAADKEMVELVEMEIRELMTQMGFDGDNVPIVAGSALCALEGKNPEIGSEAVLKLLKEVDNYIPTPTRELDKPFLLPVEHVYSIPGRGTVVTGRLERGVVKKGNDCEFVGYNKVLKSTVTGVEMFHQILEEAQAGDQVGALVRGVKRDDIKRGMVMAKPGTVKSYDHIESQVYILSKDEGGRTKPFTSYIQLQMFCRTWDCAIQVIVPDKEMVMPGEDSKLILKLLRPMVLEQGQRFTLRDGSQTLGTGVVTKVLPALKENERIQLLEGKKAREKRQAQK

SEQ ID NO: 27171 - DNA, 1392 bp, Tribolium castaneum
  CDS (1)..(1392)
atgtccaaattgaaacttctaaagctagtccaagtcttttcgcctcaaaaggcactattttcctcgtcaagtggcacatccttgcaaaacagtttcatattttcgtaccggttatgtcaccgagtgtcacctaacctcaatctgtcacgtccggcgctaaattttcgaaaatattcggatatcgccgacaaaaaacacattaatgtgggtacaattggacatgtcgatcacggaaaaaccaccctaaccgctgccatcactaaaatattgcaaaaagatggtcttgcctcctacgtctcgtacgacgagattgacaaagcccccgaagaaaaggcgcgcggaattacgataaacgcggcccatgtgggctacagcacgaaaaagcgccattacgctcacactgactgtcccgggcatgccgatttcatcaaaaatatgatctcgggggcctcccaaatggatggggctattttagtcgtggcggctaccgacggccaaatgccccaaaccagggaacacctgctgcttgcgaagcaagtcggggtgaagaacattgtggtttttgtgaataaagccgacttggtggataatgaggttttagagttggttgagctcgaaattagggagttgttggaagatttcgggtttgacagtgaaaatgcaccagtgatttgtgggtctgcgttgaaagctttagaaggggaacagtcagaatttggggagaaagcaattaggaaattgttggacactctggatgagtatattccagtgcctgaacgtgattttaagtcaccttttatggtccccattgacaacactttccttgtccccgggagagggacagtcgttgtaggaactattcatagaggaattgtcaagaaaaacgcaagttctgaactcgtgggttttgacacaaaattaaagacaacaatcggagatatacaagttttcaaaaaaagtgtccctgaagcaaaagctggcgaaaacgtcggtcttttgctacgaaacgtgaaactgaaagatatccaaagagggatgctattgtgccaagcaaatagtgttacgttatcgaataggtttgctggaagcatttacttcctagcgaaaaatgaaggcggtagatcgaaacctgtcacgggaaaatacatccaacagttgtttagcaaaacctggagtatatcgtgtagagttgatctagctaaaggtgttgaaatgataatgcccggtgaacatggacaagttgaacttacacttttatcaaaaatggtaatgctgcctgggcaaacctttacaattagggaaaataaagtaacagtagcgactggaattatcactgccactctccctgaagttgtaattacgaaaaatttaggcaaacttgaattgggatga

SEQ ID NO: 27172 - protein, 463 aa, Tribolium castaneum
MSKLKLLKLVQVFSPQKALFSSSSGTSLQNSFIFSYRLCHRVSPNLNLSRPALNFRKYSDIADKKHINVGTIGHVDHGKTTLTAAITKILQKDGLASYVSYDEIDKAPEEKARGITINAAHVGYSTKKRHYAHTDCPGHADFIKNMISGASQMDGAILVVAATDGQMPQTREHLLLAKQVGVKNIVVFVNKADLVDNEVLELVELEIRELLEDFGFDSENAPVICGSALKALEGEQSEFGEKAIRKLLDTLDEYIPVPERDFKSPFMVPIDNTFLVPGRGTVVVGTIHRGIVKKNASSELVGFDTKLKTTIGDIQVFKKSVPEAKAGENVGLLLRNVKLKDIQRGMLLCQANSVTLSNRFAGSIYFLAKNEGGRSKPVTGKYIQQLFSKTWSISCRVDLAKGVEMIMPGEHGQVELTLLSKMVMLPGQTFTIRENKVTVATGIITATLPEVVITKNLGKLELG

SEQ ID NO: 27173 - DNA, 1200 bp, Prochlorococcus marinus str. MIT 9515
  CDS (1)..(1200): transl_table=11
atggctcgcgagaagttcgaaaggaacaaaccacatgtcaacataggtactatcggccacgttgatcatggaaaaacaaccctgactgctgctattaccaatgttttagctaaaaaaggtcaagcacaagctcaagattatggagacattgatggtgctccagaagaaagagaacgtggcataacaattaatacagcccacgttgaatacgaaactgaaggcagacattatgcccacgttgattgtccaggacatgctgattatgtcaaaaacatgatcactggagcggctcaaatggatggtgcaattttagtttgtgctgccacagatggtcctatggcacaaacaaaagaacatatccttttagcaaaacaagttggtgttcctgctttagttgtcgctttaaataaatgtgacatggtagatgacgaagaaatcattgaacttgtggaaatggaaatcagagagctacttgatagttatgatttccccggggatgatatacctatcgtccaggtttcaggcctgaaagctttggaaggagattctaattgggaatctaaaattgaagaattaatgaaagctgttgatgctagtattcctgaaccagaaagagagattgacaagccatttttgatggcaatagaagatgttttctctattacaggtagaggaacagttgctacaggaagaatagaaagaggtaaagtcaaagttggagaagaagtcgaaatagttgggataagagatacaagattgaccactgttactggtgttgagatgttccgtaaacttcttgatgaaggtatggctggagacaatgttggactactcctacgtggtgttcaaaaagaagatattgagagaggaatggtacttgttaagaaaggttcaattactcctcatactaaatttgaaggagaagtttatgttcttaagaaagaagagggagggagacatactcctttctttgctggttatagaccacaattttatataagaaccacagatgtgactggacaaatcaccgcattcacctctgatgatggagctaatgtagaaatggtaatgccaggagacagaataaaaatgactggtgaattaatttgtccagttgctattgaacaaggtatgcgctttgctattcgcgaaggtggtcgtaccattggagctggtgttgtttctaaaattattgaataa

SEQ ID NO: 27174 - protein, 399 aa, Prochlorococcus marinus str. MIT 9515
MAREKFERNKPHVNIGTIGHVDHGKTTLTAAITNVLAKKGQAQAQDYGDIDGAPEERERGITINTAHVEYETEGRHYAHVDCPGHADYVKNMITGAAQMDGAILVCAATDGPMAQTKEHILLAKQVGVPALVVALNKCDMVDDEEIIELVEMEIRELLDSYDFPGDDIPIVQVSGLKALEGDSNWESKIEELMKAVDASIPEPEREIDKPFLMAIEDVFSITGRGTVATGRIERGKVKVGEEVEIVGIRDTRLTTVTGVEMFRKLLDEGMAGDNVGLLLRGVQKEDIERGMVLVKKGSITPHTKFEGEVYVLKKEEGGRHTPFFAGYRPQFYIRTTDVTGQITAFTSDDGANVEMVMPGDRIKMTGELICPVAIEQGMRFAIREGGRTIGAGVVSKIIE

SEQ ID NO: 27175 - DNA, 1233 bp, Chlorokybus atmophyticus
  CDS (1)..(1233): transl_table=11
atggcacgtgaaaaatttgaacgtaaaaaaccgcatgttaatattggtacaattggacatgtcgatcatgggaagactactttaacagcagctattaccatggctttagctgcaagtactggtgcaaaaggtaaaagatatgatgaaattgatgcggcacctgaagaaagagctcgaggtattactataaatactgctcatgtagaatatgagaccgaaaagcgacattatgctcatgtggattgtccgggacatgccgattacgtaaaaaatatgattacaggcgcagcccaaatggatggtgcaatactcgtagtctctggtgctgacggtccaatgcctcaaactaaagaacacattcttttagcaaaacaagttggtgtaccaaatgttgttgtctttttaaataaagaagatcaagtagatgacgccgaattgttagaacttgttgaattagaagtacgtgaaactcttagcgattatgattttccaggggatgaagtcccggtagttgcaggatccgcactactagctttagaatctttaactcagaatccaaaaattgttaaaggtgagaacaaatgggttgataagatttacagtctaatggatcaagttgacgcatatattcctactcctgaacgagatacagataaaccattcttaatggcagtcgaagacgttttttctattactggtaggggtactgtagcaactggtagagttgagcgaggaactgtaaaagtcggcgaagctattgagattgtaggtttaagagaagctccagtaactagtattgttactggtcttgaaatgtttcaaaaaacccttgaagagagtgtggctggagataatgttggaatattactacgtggtatacaaaagaaagatatcgagcgtggtatggttttagctaaaccaggtacaattaaacctcataaatcttttgaagctcaagtttatattcttaataaagaagaaggtggacgtcatactcctttctttcaagggtaccgtcctcaattctatgtacgaactacggatgttacaggcaaaatagagtccttccaagctgatgacggaagtgaaacacaaatggttatgcctggtgaccgcatcaaaatggttgtgcagctaatccaaccaattgcgattgagaaaggaatgcgttttgcgattcgtgaaggtggtcgtactgttggagctggggttgtttttaacatacttgaatag

SEQ ID NO: 27176 - protein, 410 aa, Chlorokybus atmophyticus
MAREKFERKKPHVNIGTIGHVDHGKTTLTAAITMALAASTGAKGKRYDEIDAAPEERARGITINTAHVEYETEKRHYAHVDCPGHADYVKNMITGAAQMDGAILVVSGADGPMPQTKEHILLAKQVGVPNVVVFLNKEDQVDDAELLELVELEVRETLSDYDFPGDEVPVVAGSALLALESLTQNPKIVKGENKWVDKIYSLMDQVDAYIPTPERDTDKPFLMAVEDVFSITGRGTVATGRVERGTVKVGEAIEIVGLREAPVTSIVTGLEMFQKTLEESVAGDNVGILLRGIQKKDIERGMVLAKPGTIKPHKSFEAQVYILNKEEGGRHTPFFQGYRPQFYVRTTDVTGKIESFQADDGSETQMVMPGDRIKMVVQLIQPIAIEKGMRFAIREGGRTVGAGVVFNILE

SEQ ID NO: 27177 - DNA, 1191 bp, Herminiimonas arsenicoxydans
  CDS (1)..(1191): transl_table=11
atggcaaaaggtaaattcgagcggaccaagccgcacgttaacgtcggtacaattggtcacgtcgatcacggcaaaaccacactgacggcagcgattgcgaccgtattgtctaagaaatttggtggcgaagccaagggctacgaccaaatcgataacgcgcctgaagaaaaagcgcgcggcatcaccatcaacacctcgcacgttgaatacgaaaccaccacccgtcactatgcccacgttgactgcccaggccacgccgactatgttaaaaacatgatcaccggcgccgcacagatggacggcgcgatcctggtttgttccgcagctgacggcccaatgccgcaaacacgtgagcacatcctgctggcacgtcaggttggcgttccatacatcatcgtgttcctgaacaagtgcgacatggttgacgatgcagaattgctcgaactggtcgaaatggaagtgcgcgagctcctctccaaatacgaattcccaggcgacgacctgcctatcatcaaaggttcggccaagttggcactcgaaggcgaccaaggtccattgggcgaagccgccattctggccctggctgatgcactcgacagctacattccaacaccagaacgcgcagttgacggcgccttcctgttgccagtggaagacgtgttctcgatctccggtcgcggcaccgttgtaacgggtcgtatcgaacgcggtatcgtcaaagtcggcgaatcgctggaaatcgttggtattcgcgacacccaagtcaccacctgtaccggtgttgaaatgttccgcaaactgcttgaccaaggtcaggcaggcgacaacgtcggcgtattgctgcgtggcaccaagcgtgaagacgtggaacgtggtcaagttctggcgaagccaggttcgatcaagccgcacaaacatttcacgggtgaaatctacgtattgtcgaaagacgaaggcggccgtcacaccccattcttcaacaactaccgtccgcagttctacttccgtactacggacgtgactggttcgatcgagttgccgaaggataaagaaatggtgatgccgggcgacaacgtctcgatcacggtgatgttgatcaacccgattgcgatggaagaaggtctgcgcttcgcgattcgcgaaggcggtcgtaccgtcggtgccggtgttgttgccaagattattgagtaa

SEQ ID NO: 27178 - protein, 396 aa, Herminiimonas arsenicoxydans
MAKGKFERTKPHVNVGTIGHVDHGKTTLTAAIATVLSKKFGGEAKGYDQIDNAPEEKARGITINTSHVEYETTTRHYAHVDCPGHADYVKNMITGAAQMDGAILVCSAADGPMPQTREHILLARQVGVPYIIVFLNKCDMVDDAELLELVEMEVRELLSKYEFPGDDLPIIKGSAKLALEGDQGPLGEAAILALADALDSYIPTPERAVDGAFLLPVEDVFSISGRGTVVTGRIERGIVKVGESLEIVGIRDTQVTTCTGVEMFRKLLDQGQAGDNVGVLLRGTKREDVERGQVLAKPGSIKPHKHFTGEIYVLSKDEGGRHTPFFNNYRPQFYFRTTDVTGSIELPKDKEMVMPGDNVSITVMLINPIAMEEGLRFAIREGGRTVGAGVVAKIIE

SEQ ID NO: 27179 - DNA, 1191 bp, Burkholderia vietnamiensis G4
  CDS (1)..(1191): transl_table=11
atggccaaggaaaagtttgagcggaccaagccgcacgtcaacgttggtacgatcggtcacgttgaccacggcaagacgacgctgacggcagcgatcacgacggtgctgacgaagaagttcggcggcgaagcgaaggcctacgaccagatcgacgcggcaccggaagagaaggcgcgcggcatcacgatcaacacggcacacgtcgagtacgaaacggcgaaccgccactacgcacacgtcgactgcccgggccacgccgactacgtgaagaacatgatcacgggcgcagcgcagatggacggcgcgatcctggtttgctcggcagcagacggcccgatgccgcaaacgcgcgagcacatcctgctggcacgtcaggttggcgttccgtacatcatcgtgttcctgaacaagtgcgacatggtggacgacgctgaactgctcgagctggtcgagatggaagttcgcgaactcctgtcgaagtacgacttcccgggcgacgacacgccgatcgtgaagggttcggccaagctggcgctggaaggcgacacgggcgagctgggcgaagtggcgatcatgaacctggcagacgcactggacacgtacatcccgacgccggagcgtgcggttgacggcgcgttcctgatgccggtggaagacgtgttctcgatctcgggtcgcggcacggtggtgacgggtcgcgtcgagcgcggcatcgtgaaggtcggcgaggaaatcgaaatcgtcggtatcaagccgacggtgaagacgacctgcacgggcgttgaaatgttccgcaagctgctggaccagggtcaggcaggcgacaacgtcggtatcctgctgcgcggcacgaagcgtgaagacgtggagcgcggccaggttctggcgaagccgggttcgatcacgccgcacacgcacttcacggctgaagtgtacgtgctgagcaaggacgaaggcggccgtcacacgccgttcttcaacaactaccgtccgcagttctacttccgtacgacggacgtgacgggctcgatcgagctgccgaaggacaaggaaatggtgatgccgggcgacaacgtgtcgatcacggtgaagctgattgcgccgatcgcgatggaagaaggtctgcgcttcgcaatccgcgaaggcggccgtaccgtcggcgctggcgtcgtcgccaagatcatcgagtaa

SEQ ID NO: 27180 - protein, 396 aa, Burkholderia vietnamiensis G4
MAKEKFERTKPHVNVGTIGHVDHGKTTLTAAITTVLTKKFGGEAKAYDQIDAAPEEKARGITINTAHVEYETANRHYAHVDCPGHADYVKNMITGAAQMDGAILVCSAADGPMPQTREHILLARQVGVPYIIVFLNKCDMVDDAELLELVEMEVRELLSKYDFPGDDTPIVKGSAKLALEGDTGELGEVAIMNLADALDTYIPTPERAVDGAFLMPVEDVFSISGRGTVVTGRVERGIVKVGEEIEIVGIKPTVKTTCTGVEMFRKLLDQGQAGDNVGILLRGTKREDVERGQVLAKPGSITPHTHFTAEVYVLSKDEGGRHTPFFNNYRPQFYFRTTDVTGSIELPKDKEMVMPGDNVSITVKLIAPIAMEEGLRFAIREGGRTVGAGVVAKIIE

SEQ ID NO: 27181 - DNA, 1191 bp, Dichelobacter nodosus VCS1703A
  CDS (1)..(1191): transl_table=11
atgtcaaaagagaaatttgagcgtgcgaaaccccacgtaaacgtaggtaccataggacacgtagaccatggtaaaaccacattaacagcggcgttaacaaaagtaagtgcggcacgatttggaagtgcggcacaagattatgatcaaatcgacggtgcgccggaagaacgtgcgcgcgggattacgatttcaacatcacacgtagaatatgaatccccgcttcgccactatgcacacgtagactgcccaggacacgcggactatgttaaaaacatgattacgggtgcggcacaaatggacggcgcgattttggtttgttcagcagcagacggtccgatgccgcaaacacgtgaacacattctgctttctcgtcaagtaggtgttccttatatcatcgtattcttaaataaagcggatatggttgatgatgcggaattgttagaactggttgaaatggaagttcgtgaattattaaacgaatacgatttcccaggagacgatacaccgattgtcgtgggttctgcattgaaagcgttggaaggcgatacctcagaaattggtattccagcgattgaaaaattggttgacgctttagacgccagcattccggaaccgaaacgcgatattgataaacccttcttgatgccgattgaagacgtattttctatttcaggacgcggtactgtagtaaccggacgggtagaacgcggcgttgttaaagtaggcgatgaattggaaatcgtgggcttgcgtgatactgcaaaaaccacttgtaccggtgtagaaatgttccgtaaattattggatcaaggtcaagctggtgataacgttggtgttttattacgtggaaccaaacgtgaagaagttgaacgcggtcaagttttggcaaaaccgggcaccattactccacatactaaattcgaatcagaagtgtatgttttatctaaggaagaaggcggacgtcatactccattcttcaaaggttaccgtccacaattttatttccgtacaacagacgtcactggtgaatgcgtattgccggaaggcgtggaaatggtaatgccgggagataatgtgaagatgattgtgcaactgattcacccgattgcgatggacgaaggattgcgttttgcgattcgtgaaggcggtcgcaccgtcggagctggggttgttgctaaaattattgagtaa

SEQ ID NO: 27182 - protein, 396 aa, Dichelobacter nodosus VCS1703A
MSKEKFERAKPHVNVGTIGHVDHGKTTLTAALTKVSAARFGSAAQDYDQIDGAPEERARGITISTSHVEYESPLRHYAHVDCPGHADYVKNMITGAAQMDGAILVCSAADGPMPQTREHILLSRQVGVPYIIVFLNKADMVDDAELLELVEMEVRELLNEYDFPGDDTPIVVGSALKALEGDTSEIGIPAIEKLVDALDASIPEPKRDIDKPFLMPIEDVFSISGRGTVVTGRVERGVVKVGDELEIVGLRDTAKTTCTGVEMFRKLLDQGQAGDNVGVLLRGTKREEVERGQVLAKPGTITPHTKFESEVYVLSKEEGGRHTPFFKGYRPQFYFRTTDVTGECVLPEGVEMVMPGDNVKMIVQLIHPIAMDEGLRFAIREGGRTVGAGVVAKIIE

SEQ ID NO: 27183 - DNA, 1221 bp, Thermus thermophilus HB27
  CDS (1)..(1221): transl_table=11
atggcgaagggcgagtttattcggacgaagcctcacgtgaacgtggggacgattgggcacgtggaccacgggaagacgacgctgacggcggcgttgacgtatgtggcggcggcggagaacccgaatgtagaggttaaggactacggggagattgacaaggcgccggaggagcgtgcgcgggggattacgatcaacacggcgcacgtggagtacgagacggcgaagcggcactattcccacgtggattgccctgggcacgcggactacatcaagaacatgatcacgggtgccgcgcagatggacggggcgatccttgtggtgtcggcggcggacgggccgatgccgcagacgcgggagcacattttgctggcgcggcaggtgggggtgccgtacattgtggtgttcatgaacaaggtggacatggtggacgaccccgagttgctggacctggtggagatggaggtgcgggaccttttgaaccagtacgagtttcctggggacgaggttccggtgattcgggggagtgctcttttggcgcttgagcagatgcacaggaacccgaagacgaggcgtggggagaacgagtgggtggacaagatttgggagttgttggacgcgattgacgagtacattcccacgccggtgcgggacgtggacaagccgttcttgatgccggtggaggacgtgtttacgatcacgggtcgtgggacggtggccacgggtcggattgagcggggcaaggtgaaggttggggacgaggtggagattgtgggccttgctccggagacgcggaagacggtggtgacgggtgtggagatgcaccggaagaccctgcaggaggggattgctggggacaatgtgggggtgctcctgcggggtgtgagccgggaggaggtggagcgggggcaggtgctggcgaagcctgggagcattacgccgcacacgaagtttgaggcctcggtgtacgtgttgaagaaggaggagggtggacggcacacggggtttttttcggggtaccgtccgcagttttactttcggacgacggacgtgacgggggtggtgcagttgcctccgggcgtggagatggtgatgcctggggacaacgtgacgtttacggtggagctgatcaagccggtggcgctggaggagggtttgcggtttgccatccgtgagggtgggcggaccgtgggcgccggcgtcgtcaccaagatcctggagtga

SEQ ID NO: 27184 - protein, 406 aa, Thermus thermophilus HB27
MAKGEFIRTKPHVNVGTIGHVDHGKTTLTAALTYVAAAENPNVEVKDYGEIDKAPEERARGITINTAHVEYETAKRHYSHVDCPGHADYIKNMITGAAQMDGAILVVSAADGPMPQTREHILLARQVGVPYIVVFMNKVDMVDDPELLDLVEMEVRDLLNQYEFPGDEVPVIRGSALLALEQMHRNPKTRRGENEWVDKIWELLDAIDEYIPTPVRDVDKPFLMPVEDVFTITGRGTVATGRIERGKVKVGDEVEIVGLAPETRKTVVTGVEMHRKTLQEGIAGDNVGVLLRGVSREEVERGQVLAKPGSITPHTKFEASVYVLKKEEGGRHTGFFSGYRPQFYFRTTDVTGVVQLPPGVEMVMPGDNVTFTVELIKPVALEEGLRFAIREGGRTVGAGVVTKILE

SEQ ID NO: 27185 - DNA, 1176 bp, Bartonella henselae str. Houston-1
  CDS (1)..(1176): transl_table=11
atggcgaagagcaaatttgaacgcacgaaaccgcatgttaatattggtacgattggtcacgttgaccatgggaagacctcgttgacggcagcgattacgaaatattttggtgaatttaaggcctatgaccaaattgatgcagcgcctgaggagcgtgcacgtggaattactatttctacagcgcatgttgaatatgaaacagagaagcggcattatgcacatgttgattgtccaggtcacgcggattatgtgaagaacatgatcacgggcgcggcgcaaatggatggtgcgattttggttgtttcagctgctgatggtccgatgcctcaaacacgtgagcatattcttcttgcccgtcaggttggtgttccagcgattgttgtttttcttaataaggttgatcaggttgatgatgctgagcttttggagcttgttgagcttgaagttcgggagttattgtcgaaatatgattttccaggagacgatattccgatcgttaaaggttctgctttggcagcgcttgaagataaagataaaagcattggtgaagatgcggttcgtcttttgatgagtgaagttgataattatataccgacgcctgaacgtcctgttgatcagccgtttttgatgccaattgaagatgttttttcgatttcgggtcgtggaactgttgtgacgggtcgtgttgagcgtggtgttattaaggttggtgaagaagttgagattatcggcattcgtccaacttctaagacaacagttacaggggttgaaatgttccgcaagcttttagatcaggggcaagcgggtgataatattggagcgctgcttcgtggtattgatcgtgaagggattgagcgtggacaagttttggcgaagcctgcttcggttacacctcatacgagatttaaagcagaggcttacattttgacgaaagatgaaggtggtcgtcatactccatttttcacgaattatcgtcctcagttttatttccgtactacggatgtaacgggaattgttacgcttccagaaggtacagagatggttatgcctggtgataatgttgctatggatgtctctctgattgttccaattgccatggaagaaaaacttcgttttgctatccgtgaaggtggtcgtactgttggtgcaggtatcgtttctaagatcattgagtaa

SEQ ID NO: 27186 - protein, 391 aa, Bartonella henselae str. Houston-1
MAKSKFERTKPHVNIGTIGHVDHGKTSLTAAITKYFGEFKAYDQIDAAPEERARGITISTAHVEYETEKRHYAHVDCPGHADYVKNMITGAAQMDGAILVVSAADGPMPQTREHILLARQVGVPAIVVFLNKVDQVDDAELLELVELEVRELLSKYDFPGDDIPIVKGSALAALEDKDKSIGEDAVRLLMSEVDNYIPTPERPVDQPFLMPIEDVFSISGRGTVVTGRVERGVIKVGEEVEIIGIRPTSKTTVTGVEMFRKLLDQGQAGDNIGALLRGIDREGIERGQVLAKPASVTPHTRFKAEAYILTKDEGGRHTPFFTNYRPQFYFRTTDVTGIVTLPEGTEMVMPGDNVAMDVSLIVPIAMEEKLRFAIREGGRTVGAGIVSKIIE

SEQ ID NO: 27187 - DNA, 1230 bp, Acinetobacter sp. ADP1
  CDS (1)..(1230): transl_table=11
atgagcgatcctcatgagcagtttataaaggaaaaactcatggctaaggctaagtttgaacgtaataaaccacacgtaaacgtgggcacaattggtcacgttgaccatggtaaaacaactcttactgctgcgatcgcaacaatctgtgcgaaaacttacggcggtgaagcgaaagattactcacaaatcgactcagctccagaagaaaaagcacgtggtattaccattaatacttcacacgtagaatacgactctccaattcgtcactacgcgcacgttgactgcccgggccacgccgactacgttaaaaacatgattactggtgctgctcagatggacggcgcgatccttgtttgtgctgcgactgacggtcctatgccacaaactcgtgagcacatccttctttctcgtcaggtaggtgtaccttacatcgttgtattcttgaacaaatgcgaccttgtagacgacgaagagcttcttgagcttgtagaaatggaagttcgtgaacttctttctacttatgacttcccaggcgacgacactccagtgattcgtggttctgcgcttaaagcgttagaaggtgatgctggtcaatatggcgagtcttcagttcttgcgcttgtagaagcacttgacacttacatcccagaaccagagcgcgcaatcgacaaagcattcttgatgccaatcgaagatgtattctcgatttctggtcgtggtacagttgttactggccgtgtagaagctggtatcgtgaaagtgggcgaatcagttgaaatcgtaggtatccgtgatactcaaactacgacagtaactggcgttgaaatgttccgtaaacttcttgacgaaggccgtgcgggcgagaactgtggtgttcttcttcgtggtactaagcgtgaagacgtacaacgtggtcaagtacttgctaaaccaggtacaatcaagccgcacactaaattcgacgcagaagtatacgtactttctaaagaagaaggtggtcgtcatactccattccttaacggttaccgtccacagttctatttccgtaccactgacgtaactggtgcaatccagttgaaagaaggcgttgaaatggtaatgccaggtgacaacgttgaaatgtcagtagaattgatccacccaatcgcaatggacccaggtctacgttttgcgatccgtgaaggtggtcgtactgtaggtgctggtgttgttgcgaaagtaactgcataa

SEQ ID NO: 27188 - protein, 409 aa, Acinetobacter sp. ADP1
MSDPHEQFIKEKLMAKAKFERNKPHVNVGTIGHVDHGKTTLTAAIATICAKTYGGEAKDYSQIDSAPEEKARGITINTSHVEYDSPIRHYAHVDCPGHADYVKNMITGAAQMDGAILVCAATDGPMPQTREHILLSRQVGVPYIVVFLNKCDLVDDEELLELVEMEVRELLSTYDFPGDDTPVIRGSALKALEGDAGQYGESSVLALVEALDTYIPEPERAIDKAFLMPIEDVFSISGRGTVVTGRVEAGIVKVGESVEIVGIRDTQTTTVTGVEMFRKLLDEGRAGENCGVLLRGTKREDVQRGQVLAKPGTIKPHTKFDAEVYVLSKEEGGRHTPFLNGYRPQFYFRTTDVTGAIQLKEGVEMVMPGDNVEMSVELIHPIAMDPGLRFAIREGGRTVGAGVVAKVTA

SEQ ID NO: 27189 - DNA, 1185 bp, Erwinia carotovora subsp. atroseptica SCRI1043
  CDS (1)..(1185): transl_table=11
atgtctaaagaaaaatttgaacgtacaaaaccgcacgttaacgtcggtactatcggccacgttgaccatggtaaaacaacgcttaccgctgcaataactaccgttctggctaaaacctacggtggcagcgcgcgtgcattcgaccagatcgataacgcaccggaagaaaaagcacgtggtatcaccatcaacacctctcacgttgaatacgataccccggctcgccactatgcgcacgttgactgcccaggacacgccgactatgtgaaaaacatgatcaccggtgctgctcagatggatggcgcgatcctggttgttgctgcgactgatggcccaatgcctcagacccgtgagcacatcctgctgggtcgccaggttggcgttcctttcatgatcgtattcatgaacaaatgcgacatggttgatgacgaagagctgctggaactggttgagatggaagtgcgtgagctgctgtctcagtacgatttcccaggcgacgacatcccggttattcgtggttctgcactgaaagcgctggaaggcgaagctgagtgggaagcaaaaatcatcgaactggccggttacctggattcttatattccagaaccagagcgtgcgattgataagccgttcctgctgccaatcgaagatgtattctccatctccggtcgtggtaccgttgttaccggtcgtgtagagcgcggtattgttaaagttggtgaagaagttgaaatcgttggtatcaaagataccgtgaaatcaacctgtaccggcgttgaaatgttccgtaagctgctggacgaaggtcgtgcaggcgagaacgttggtgtcctgctgcgtggtatcaagcgtgaagaaatcgagcgtggtcaggtactggccaaaccgggttcaatcaagccgcacacccagttcgaatcagaagtgtacatcctgagcaaagatgaaggcggccgtcatactccgttcttcaaaggctaccgccctcagttctatttccgtaccactgacgtaacgggtactatcgaactgccagaaggcgtagagatggtaatgccgggcgacaacatcaaaatggttgtaaccctgatccacccaatcgcgatggacgacggtttgcgtttcgcaatccgtgaaggcggccgtactgtaggcgcgggcgttgttgctaaagttatcgcttaa

SEQ ID NO: 27190 - protein, 394 aa, Erwinia carotovora subsp. atroseptica SCRI1043
MSKEKFERTKPHVNVGTIGHVDHGKTTLTAAITTVLAKTYGGSARAFDQIDNAPEEKARGITINTSHVEYDTPARHYAHVDCPGHADYVKNMITGAAQMDGAILVVAATDGPMPQTREHILLGRQVGVPFMIVFMNKCDMVDDEELLELVEMEVRELLSQYDFPGDDIPVIRGSALKALEGEAEWEAKIIELAGYLDSYIPEPERAIDKPFLLPIEDVFSISGRGTVVTGRVERGIVKVGEEVEIVGIKDTVKSTCTGVEMFRKLLDEGRAGENVGVLLRGIKREEIERGQVLAKPGSIKPHTQFESEVYILSKDEGGRHTPFFKGYRPQFYFRTTDVTGTIELPEGVEMVMPGDNIKMVVTLIHPIAMDDGLRFAIREGGRTVGAGVVAKVIA

SEQ ID NO: 27191 - DNA, 1185 bp, Mesoplasma florum L1
  CDS (1)..(1185): transl_table=4
atggcaaaagaagcttttgaccgtagtttacctcacgttaacattggtactattggacacgttgaccacggtaaaactacattaactgctgctattactaaagttttagcagataaaggtggagcagaatttaaagattacgcaaatatcgataacgctccagaagaaagagaacgtggaattacaattaatacttcacacgttgaatataaaacagaaaacagacactacgcacacgtagactgtccaggacacgccgattatgttaaaaacatgattacaggtgctgctcaaatggatggtgggatcttagttgttgctgcaactgatggacctatgcctcaaactcgtgaacacatcttattatcaagacaagttggagttccaaaaattgttgttttcttaaacaaatgtgacatggttgatgatgaagaaatgatcgacttagttgaaatggaagttagagacttattatcagcttacgacttcgatggagacggagcaccagttatccgtggatcagctttaggagctttaaacggagaagctaaatgagttgctgctattgaagaattaatggctgcagttgatgaatacatcccaactccaactcgtgattcagataaaacattcttaatgcctgttgaagacgttttcacaattacaggacgtggaactgttgctacaggacgtgttgaacgtggaacaattaaagttaacgaagaagttgaaatcgttggattagttgaagaagctaaaaaaactgttgttactggattagaaatgttcagaaaattattagattttgctgaagctggagacaacgttggagcattactacgtggtgttgatagagaaagtattgaacgtggacaagttttagctaaacctggaactattaaacctcatactaaattacaagcatcagtttatgctttaactactgaagaaggtggacgtcaaaaaccattctttaacaaataccgtcctcaattctacttccgtacaactgatgttactggtgaagtaatcttacctgcaggaacagacatggttatgcctggagataacgttgaaatgacagttgaattaattaaaccaattgccgttgaagatggaacaaaattctcaatccgtgaaggtggaagaactattggtgctggaacagttatttcagttcaataa

SEQ ID NO: 27192 - protein, 394 aa, Mesoplasma florum L1
MAKEAFDRSLPHVNIGTIGHVDHGKTTLTAAITKVLADKGGAEFKDYANIDNAPEERERGITINTSHVEYKTENRHYAHVDCPGHADYVKNMITGAAQMDGGILVVAATDGPMPQTREHILLSRQVGVPKIVVFLNKCDMVDDEEMIDLVEMEVRDLLSAYDFDGDGAPVIRGSALGALNGEAKWVAAIEELMAAVDEYIPTPTRDSDKTFLMPVEDVFTITGRGTVATGRVERGTIKVNEEVEIVGLVEEAKKTVVTGLEMFRKLLDFAEAGDNVGALLRGVDRESIERGQVLAKPGTIKPHTKLQASVYALTTEEGGRQKPFFNKYRPQFYFRTTDVTGEVILPAGTDMVMPGDNVEMTVELIKPIAVEDGTKFSIREGGRTIGAGTVISVQ

SEQ ID NO: 27193 - DNA, 1185 bp, Mannheimia succiniciproducens MBEL55E
  CDS (1)..(1185): transl_table=11
gtgtctaaagaaaaatttgaacgtacaaaaccgcacgtaaacgtgggtacaatcggccacgttgaccatggtaaaacaactttaacagcggcaatcactaccgtgttatcaaaacactacggtggtgcggctcgcgcattcgaccaaatcgataacgcgccggaagaaaaagcgcgcggtatcaccatcaacacttcacatgttgaatacgatacgccgacccgtcactacgcacacgtagactgcccgggacacgcggactatgttaaaaacatgatcaccggtgcggcacaaatggacggcgcaatcttagtagtagcggcgacagacggcccaatgccgcaaactcgtgagcacatcttattaggtcgccaagtaggcgtaccatacatcatcgtattcttaaacaaatgcgatatggtagatgacgaagagttattagaattagtagaaatggaagttcgcgaacttctttctcaatacgatttcccgggtgacgatacaccaatcatccgtggttcagcgttaaaagcgttagaaggcgaagcgcaatgggaagaaaaaatccttgagttagcaaacgcattggatacatacattccggaaccagaacgtgcgattgaccaaccgttcttattaccgattgaagacgtattctcaatctcaggtcgtggtacggtagtaacgggtcgtgtagagcgcggtatcatccgtacgggtgatgaagttgaaatcgttggtatcaaagaaacggcgaaaacaacggtaacaggtgttgaaatgttccgtaaattactcgacgaaggtcgtgcgggtgaaaacatcggtgcattattacgcggtactaaacgtgaagaaatcgaacgtggtcaagtattagcgaaaccgggttcaatcacaccacacacagacttcgaatcagaagtttacgtattatcaaaagaagaaggcggtcgtcatactccgttcttcaaaggctaccgtccacaattctacttccgtacaacggacgtaacaggtacaatcgaattacctgaaggcgtggaaatggtaatgcctggcgataacatcaaaatgacagtaagcttaatccacccgattgcgatggaccaaggtttacgtttcgcaatccgtgaaggcggccgtacagtaggtgcgggtgttgttgcgaaaatcatcaaataa

SEQ ID NO: 27194 - protein, 394 aa, Mannheimia succiniciproducens MBEL55E
MSKEKFERTKPHVNVGTIGHVDHGKTTLTAAITTVLSKHYGGAARAFDQIDNAPEEKARGITINTSHVEYDTPTRHYAHVDCPGHADYVKNMITGAAQMDGAILVVAATDGPMPQTREHILLGRQVGVPYIIVFLNKCDMVDDEELLELVEMEVRELLSQYDFPGDDTPIIRGSALKALEGEAQWEEKILELANALDTYIPEPERAIDQPFLLPIEDVFSISGRGTVVTGRVERGIIRTGDEVEIVGIKETAKTTVTGVEMFRKLLDEGRAGENIGALLRGTKREEIERGQVLAKPGSITPHTDFESEVYVLSKEEGGRHTPFFKGYRPQFYFRTTDVTGTIELPEGVEMVMPGDNIKMTVSLIHPIAMDQGLRFAIREGGRTVGAGVVAKIIK

SEQ ID NO: 27195 - DNA, 1191 bp, Bacillus licheniformis ATCC 14580
  CDS (1)..(1191): transl_table=11
atggctaaagaaaaattcgaccgttccaaatcacatgccaacattggtacaattggacacgttgaccatggtaaaactacattaacagctgctatcactactgtgcttcataagaaatctggtaaaggtactgctatggcatacgaccaaatcgacggtgctccagaagagcgcgagcgcggtatcacaatttctactgcacacgttgagtacgaaactgacaaccgtcactatgcacacgttgactgcccaggacacgctgactatgttaaaaacatgatcactggtgctgcgcaaatggacggtgcgatccttgttgtttctgctgctgacggcccaatgccacaaactcgtgagcacatccttctttctcgtaacgtaggtgtgccttacatcgtagtattcttgaacaaatgcgacatggtagacgacgaagagcttcttgagctagttgaaatggaagttcgcgatcttctttctgagtatgagttccctggtgacgatgtaccagttatcaaaggttctgctcttaaagctcttgaaggagatgctcagtacgaagaaaaaatctttgaactgatggctgctgttgacgagtacatcccaactccagagcgtgaaactgacaagccattcatgatgcctgttgaggacgtattctcaatcacaggtcgtggaacagttgctactggacgcgtagagcgcggacaagttaaagtcggtgacgaagttgaaatcatcggtcttcaagaagaaaacaagaaaacaactgttacaggtgttgaaatgttccgcaagcttcttgactatgcagaagctggagacaacatcggtgcacttcttcgcggtgtatctcgtgaagaaatccaacgcggtcaagtacttgctcaaccaggtacaatcactccgcacaaaaaattcaaagctgaagtttacgttctttctaaagaagagggtggacgtcacactccattcttctctaactaccgccctcagttctacttccgtacaactgacgtaactggtatcattcagcttccagaaggcgtagaaatggttatgcctggagacaacatcgaaatgactgttgaattgatttcaacaatcgcgatcgaagacggaactcgcttctctatccgtgaaggcggacgtacagttggttctggcgttgtttcttcaatcatcgaataa

SEQ ID NO: 27196 - protein, 396 aa, Bacillus licheniformis ATCC 14580
MAKEKFDRSKSHANIGTIGHVDHGKTTLTAAITTVLHKKSGKGTAMAYDQIDGAPEERERGITISTAHVEYETDNRHYAHVDCPGHADYVKNMITGAAQMDGAILVVSAADGPMPQTREHILLSRNVGVPYIVVFLNKCDMVDDEELLELVEMEVRDLLSEYEFPGDDVPVIKGSALKALEGDAQYEEKIFELMAAVDEYIPTPERETDKPFMMPVEDVFSITGRGTVATGRVERGQVKVGDEVEIIGLQEENKKTTVTGVEMFRKLLDYAEAGDNIGALLRGVSREEIQRGQVLAQPGTITPHKKFKAEVYVLSKEEGGRHTPFFSNYRPQFYFRTTDVTGIIQLPEGVEMVMPGDNIEMTVELISTIAIEDGTRFSIREGGRTVGSGVVSSIIE

SEQ ID NO: 27197 - DNA, 1191 bp, Legionella pneumophila subsp. pneumophila str. Philadelphia 1
  CDS (1)..(1191): transl_table=11
atggcgaaggaaaaatttgaacgtaagaagccgcacgtaaacgtgggcacgattggtcacgtagaccatggtaagacgacattgacagcagctattacaacgattatggcgaagaaatatggtggtacagcgaaggcgtacgatcaaattgatgctgcgccagaagaaagagagcgtgggattactatttctacagcacatgttgaatacgaatcagcgagcagacattatgcacacgtagactgcccgggacatgctgactatgttaagaacatgattactggtgctgcgcaaatggacggagcgatactggttgtatcagcagctgatggtcctatgccacaaacgagggaacacattctattgtctcgccaggtaggtgttccatatattgttgtgttcatgaacaaagcggatatggttgatgaccctgagttattagagttagtggaaatggaagtgcgagatttattaagcagttacgatttcccaggggatgacatacctattgttgttggttcagctttgaaagcattggaaggtgaagacagtgatataggtgttaaggctattgagaaattggttgaaacaatggattcatacattcctgagccagttagaaacatagacaagccatttttgttgccgattgaagacgtattttcaatttctggacgcggaacagtggtaactggtcgtgtagagagtggaattgttaaagttggtgaggaagttgaaattgttggaataagagacacccaaaagacgacttgtacgggtgttgagatgttccgtaaattacttgatgaaggtcgagctggtgataacgttggtgtgttattacgaggtacgaagcgagatgaagtggagcgtggacaggtattggcgaagccaggaaccatcaagccacacaccaagtttgaagcagaagtgtatgtattatccaaggaagaaggcggacgtcacactccattctttaatggataccgtccacaattctatttcagaaccactgacgtgacaggtacttgtgacttgccatcaggagttgaaatggtaatgcctggagataatgtgcaattagttgttagcttgcatgctccgattgcgatggatgaaggtttaagattcgcaattagagagggtggccgaactgttggcgccggtgtagtcgctaaaataatcgagtaa

SEQ ID NO: 27198 - protein, 396 aa, Legionella pneumophila subsp. pneumophila str. Philadelphia 1
MAKEKFERKKPHVNVGTIGHVDHGKTTLTAAITTIMAKKYGGTAKAYDQIDAAPEERERGITISTAHVEYESASRHYAHVDCPGHADYVKNMITGAAQMDGAILVVSAADGPMPQTREHILLSRQVGVPYIVVFMNKADMVDDPELLELVEMEVRDLLSSYDFPGDDIPIVVGSALKALEGEDSDIGVKAIEKLVETMDSYIPEPVRNIDKPFLLPIEDVFSISGRGTVVTGRVESGIVKVGEEVEIVGIRDTQKTTCTGVEMFRKLLDEGRAGDNVGVLLRGTKRDEVERGQVLAKPGTIKPHTKFEAEVYVLSKEEGGRHTPFFNGYRPQFYFRTTDVTGTCDLPSGVEMVMPGDNVQLVVSLHAPIAMDEGLRFAIREGGRTVGAGVVAKIIE

SEQ ID NO: 27199 - DNA, 1191 bp, Methylococcus capsulatus str. Bath
  CDS (1)..(1191): transl_table=11
gtgtccaaagagaaatttacgcgcacgaaaccgcatgtgaatgtgggaacgataggtcacgtggatcatgggaagacgacgctgacggcggccctgaccaagtgcatggcggcgaagtttgggggtgaattcaaggcctacgaccagatcgacgcggcgccggaagagcgtgcgcgcggcatcaccatcgccacggctcacgtggaatacgaatcggcggcgcgtcactacgctcacgtcgactgccctgggcatgccgactacgtcaagaacatgatcaccggagcggcccagatggacggtgccatcctggtcgtgtccgcagccgacggcccgatgccgcagacccgggaacacatcctgctggcgcggcaggtgggtgtgccctacatcgtcgtgttcctgaacaaggccgacatggtggacgatcccgagctgctcgaactggtggagatggaggtgcgtgaactgctctccaagtacgatttcccgggggacgacatcccgatcatcaagggctcggcgctgaaggcgctggaaggcgatggcagcgaaatcggcgtgccggcggtggaagcgctggtgcaggcgctggacgactacattcccgagcccgagcgggcgatcgaccggccgttcctcatgccgatcgaagacgtgttctcgatatccgggcgcggcaccgtggtcaccgggcgggtcgagcgcgggatcatcaaggtgggagaggaaatcgagatcgtcggcatccgtccgacggccaagaccacctgcaccggcgtggaaatgttccggaagctgctggatcagggacaggccggcgacaacatcggcgtgctgttgcgcggcaccaagcgggaagacgtcgagcgcgggcaggtgctggccaagcccggcagcatcaccccgcacacgcacttcgaagccgagatctacgttctgtccaaggaagaaggagggcgtcacacgccgttcttcaacggctaccggccgcagttctactttcggaccactgatgtcaccggcgcggtgacgctgccggaaggggtcgagatggtcatgccgggtgacaacgtcaagatcgaagtgaagctgatcgcgccgattgcaatggacgaaggcttgcggtttgccgtgcgcgagggcggtcgtaccgtcggcgcaggcgttgtctccaagatcatcgagtga

SEQ ID NO: 27200 - protein, 396 aa, Methylococcus capsulatus str. Bath
MSKEKFTRTKPHVNVGTIGHVDHGKTTLTAALTKCMAAKFGGEFKAYDQIDAAPEERARGITIATAHVEYESAARHYAHVDCPGHADYVKNMITGAAQMDGAILVVSAADGPMPQTREHILLARQVGVPYIVVFLNKADMVDDPELLELVEMEVRELLSKYDFPGDDIPIIKGSALKALEGDGSEIGVPAVEALVQALDDYIPEPERAIDRPFLMPIEDVFSISGRGTVVTGRVERGIIKVGEEIEIVGIRPTAKTTCTGVEMFRKLLDQGQAGDNIGVLLRGTKREDVERGQVLAKPGSITPHTHFEAEIYVLSKEEGGRHTPFFNGYRPQFYFRTTDVTGAVTLPEGVEMVMPGDNVKIEVKLIAPIAMDEGLRFAVREGGRTVGAGVVSKIIE

SEQ ID NO: 27201 - DNA, 1191 bp, Azoarcus sp. EbN1
  CDS (1)..(1191): transl_table=11
atggcgaaaggcaagtttgagcggacgaaaccgcacgtaaacgtcgggacgatcggtcacgtcgaccacggcaagaccaccctgacggcggcgatcacgacgatcctgtcgaagaagttcggcggcgaggcgaaagcctacgaccagatcgacgcggcgcccgaagagaaagcgcgcggcatcacgatcaacaccgctcacgtcgagtacgagacggccaaccgtcactacgcgcacgtcgactgcccgggtcacgccgactacgtgaagaacatgatcaccggtgccgcgcagatggacggcgcgatcctggtgtgctcggctgccgacggcccgatgccgcagacgcgcgagcacatcctgctcgcgcgccaggtcggcgtgccgtacatcatcgtgttcctgaacaagtgcgacatggtcgacgacgaagagctcttggagctcgtcgagatggaagtgcgcgagctgctgtcgaagtacgacttcccgggcgacgatgtgccgatcatcaagggctcggcgctcaaggcgctcgaaggcgaccagagcgacatcggcgagccggcgatcttccgcctggccgaagcgctcgacagctacatcccgactccggagcgcgcgatcgaccgcccgttcctgctgccgatcgaagacgtgttctcgatctcgggccgcggcacggtggtgaccggccgcgtcgagcgcggcatcgtcaaggtcggcgaggaagtcgagatcgtcggcatcaaggcgacggtcaagaccacctgcaccggcgtcgagatgttccgcaagctgctcgaccagggccaggcgggcgacaacgtcggcgtgctgctgcgcggcaccaagcgcgaggacgtcgagcgcggccaggtgctgtgcaagcccggttcgatcaagccgcacacgcatttcaccggtgaagtgtacgtgctgtcgaaggaagaaggcgggcgccacacgccgttcttcaacaactatcgtccgcagttctacttccgcacgaccgacgtgaccggttcgatcgagctgcccgaaggcaccgagatggtcatgccgggcgacaacgtgtcgatcaccgtcaagctgatggcgccgatcgcgatggaagaaggcctgcggttcgcgatccgcgaaggcggtcgtaccgtcggcgccggggtcgtcgccaagatcatcgagtaa

SEQ ID NO: 27202 - protein, 396 aa, Azoarcus sp. EbN1
MAKGKFERTKPHVNVGTIGHVDHGKTTLTAAITTILSKKFGGEAKAYDQIDAAPEEKARGITINTAHVEYETANRHYAHVDCPGHADYVKNMITGAAQMDGAILVCSAADGPMPQTREHILLARQVGVPYIIVFLNKCDMVDDEELLELVEMEVRELLSKYDFPGDDVPIIKGSALKALEGDQSDIGEPAIFRLAEALDSYIPTPERAIDRPFLLPIEDVFSISGRGTVVTGRVERGIVKVGEEVEIVGIKATVKTTCTGVEMFRKLLDQGQAGDNVGVLLRGTKREDVERGQVLCKPGSIKPHTHFTGEVYVLSKEEGGRHTPFFNNYRPQFYFRTTDVTGSIELPEGTEMVMPGDNVSITVKLMAPIAMEEGLRFAIREGGRTVGAGVVAKIIE

SEQ ID NO: 27203 - DNA, 1194 bp, Pseudomonas syringae pv. syringae B728a
  CDS (1)..(1194): transl_table=11
gtggctaaagaaaaatttgatcgttccctcccgcacgtcaacgttggcaccattggtcacgttgaccatggtaaaaccacgctgaccgctgctctgactcgcgtctgctccgaagttttcggttcggctgctgttgaattcgacaagatcgacagcgcaccggaagaaaaggctcgtggtattaccatcaacaccgcgcacgtcgaatacaaatcgttgatccgtcactatgctcacgttgactgcccaggtcacgctgactacgtgaagaacatgatcactggtgctgcccagatggacggcgcgattctggtttgttcggccgctgatggtccgatgccacaaacccgtgagcacatcctgctgtcccgtcaggttggcgttccgtacatcgtggtcttcctgaacaaggctgacctggtagacgacgctgagctgctggaactggtcgagatggaagtgcgcgatctgctgagcacttacgacttcccaggcgacgacactccgatcatcatcggttctgctcgtatggctctggaaggtaaagacgacaacgaaatgggcaccactgccgttcgtaaactggttgaaacactggactcctacatcccagaaccagttcgtgttaccgacaagccgttcctgatgccgatcgaagacgtattctcgatctccggtcgcggtactgttgtgactggtcgtattgagcgcggtatcgtcaaggttcaggatccactggaaatcgttggtctgcgtgacactaccgtcaccacctgcaccggtgttgaaatgttccgcaaactgctcgacgaaggtcgtgctggcgagaactgcggcgttctgctgcgcggtaccaagcgtgacgacgttgagcgtggccaggttctggtcaagccaggcagcgtcaagccgcacactcagttcgaagctgaaatctacgttctgagcaaagaagaaggcggtcgtcacactccgttcttcaaaggctaccgtccacagttctacttccgtactaccgacgtaactggtagctgcgaactgccggaaggcgtagaaatggttatgccaggtgataacgttaaagtttccgttaccctgatcaagccaatcgcaatggaagatggtctgcgtttcgcaatccgtgaaggcggtcgtaccgtcggcgctggcgtcgtagccaaaatcatcgcttaa

SEQ ID NO: 27204 - protein, 397 aa, Pseudomonas syringae pv. syringae B728a
MAKEKFDRSLPHVNVGTIGHVDHGKTTLTAALTRVCSEVFGSAAVEFDKIDSAPEEKARGITINTAHVEYKSLIRHYAHVDCPGHADYVKNMITGAAQMDGAILVCSAADGPMPQTREHILLSRQVGVPYIVVFLNKADLVDDAELLELVEMEVRDLLSTYDFPGDDTPIIIGSARMALEGKDDNEMGTTAVRKLVETLDSYIPEPVRVTDKPFLMPIEDVFSISGRGTVVTGRIERGIVKVQDPLEIVGLRDTTVTTCTGVEMFRKLLDEGRAGENCGVLLRGTKRDDVERGQVLVKPGSVKPHTQFEAEIYVLSKEEGGRHTPFFKGYRPQFYFRTTDVTGSCELPEGVEMVMPGDNVKVSVTLIKPIAMEDGLRFAIREGGRTVGAGVVAKIIA

SEQ ID NO: 27205 - DNA, 1194 bp, Pseudomonas fluorescens Pf-5
  CDS (1)..(1194): transl_table=11
atggctaaggaaaagttcgaacgtaataagccgcacgttaacgtgggtactatcggtcacgttgaccacggtaaaaccactctgactgctgctctgactcgcgtttgctccgaagttttcggttcggctcgtgttgacttcgacaagatcgacagcgccccagaagaaaaagctcgtggtatcaccatcaacactgcgcacgtagagtacgactcgaacattcgtcactacgcgcacgttgactgcccaggtcacgccgactacgtcaaaaacatgatcactggtgctgcccagatggacggcgcgatcctggtttgctcggctgccgatggtccgatgccacaaactcgtgagcacatcctgctgtcccgtcaggtaggcgttccgtacatcgttgtcttcctgaacaaggctgacatggttgacgacgctgagctgctggaactggttgagatggaagtgcgcgatctgctgagcacttacgacttcccaggtgacgacactccgatcatcatcggttcggctctgatggctctgaacggccaagacgacaacgaaatgggtaccaccgctgttaagcgtctggtagaaactctggatacctacatcccagagccagagcgtgcaatcgacaagccgttcctgatgccaatcgaagacgtattctcgatctccggccgtggcaccgtggtaactggtcgtgttgagcgtggtatcgttcgcatccaggaagaagttgagatcgttggtctgcgcgacactcagaaaactacctgcaccggcgttgaaatgttccgcaagctgctcgacgaaggtcgtgcaggcgagaactgcggcgttctgctgcgtggtaccaagcgtgacgacgttgagcgtggccaggttctggttaagccaggcaccgttaagccgcacaccaagttcaccgctgaagtttacgttctgagcaaggaagaaggcggccgtcatactccgttcttcaaaggctaccgtccacagttctacttccgtactactgacgtgactggtaactgcgaactgccagaaggcgttgaaatggtaatgccaggtgacaacatccagatgactgtcactctgatcaaaaccatcgcgatggaagatggtctgcgtttcgctatccgtgaaggcggtcgtaccgtcggcgctggcgtcgtagccaaggtcatcgaataa

SEQ ID NO: 27206 - protein, 397 aa, Pseudomonas fluorescens Pf-5
MAKEKFERNKPHVNVGTIGHVDHGKTTLTAALTRVCSEVFGSARVDFDKIDSAPEEKARGITINTAHVEYDSNIRHYAHVDCPGHADYVKNMITGAAQMDGAILVCSAADGPMPQTREHILLSRQVGVPYIVVFLNKADMVDDAELLELVEMEVRDLLSTYDFPGDDTPIIIGSALMALNGQDDNEMGTTAVKRLVETLDTYIPEPERAIDKPFLMPIEDVFSISGRGTVVTGRVERGIVRIQEEVEIVGLRDTQKTTCTGVEMFRKLLDEGRAGENCGVLLRGTKRDDVERGQVLVKPGTVKPHTKFTAEVYVLSKEEGGRHTPFFKGYRPQFYFRTTDVTGNCELPEGVEMVMPGDNIQMTVTLIKTIAMEDGLRFAIREGGRTVGAGVVAKVIE

SEQ ID NO: 27207 - DNA, 1191 bp, Psychrobacter arcticus 273-4
  CDS (1)..(1191): transl_table=11
atggcaaaggccaagtttgaacgtctaaaaccacatgttaacgtcggtaccatcggacacgttgaccacggtaaaacaacccttaccgctgctatcgcaacggtagctgctatcacctctggtggcgaagccaaagactacgcgtctattgactcagcaccagaagaaaaagcacgtggcatcaccatcaacacctcacacgtagaatatgacacaccatcacgtcactatgctcacgttgactgcccaggtcacgccgattatgttaaaaacatgattaccggtgcggcacagatggacggcgcaatcctagtcgtatctgcaactgacggccctatgccacaaactcgtgagcacatcctgctttcacgtcaggttggcgtaccgtacatcgttgtattcatgaacaaatgtgatgttgttgatgacgaagaattgttagagctagtagaaatggaagttcgtgaattattgagcgactatgacttcccaggtgatgacactccaatcatccatggttcagcgactgaagccctaaaaggctcacaagaaaaatatggccaaccagctgttgtagaactattaaacgttcttgacacctacatcccagagccagagcgtgacatcgacaaagcattcctaatgccaatcgaagacgtattctcaatctcaggtcgtggtactgtcgtaactggccgtgttgaatcaggtatcgtacgcgttggcgaagaaatcgaaatcgtcggtatccgtgacactcaaaaaaccacctgtactggtgtagagatgttccgtaaactgcttgacgaaggtcgtgcaggcgaaaactgtggcgtactactacgtggtactaagcgtgaagacgtacaacgtggccaagtacttgctaagccaggttctatcactcctcataccaagtttgacgctgaagtatatgtattgtcaaaagaagagggtggtcgtcacacaccattcctaaacggctatcgtccacagttctacttccgtactactgacgtaactggcgcaatccaattacaagacggtactgaaatggtgatgcctggtgataacgttgagatgggcgtagagcttatccacccaatcgctatggacaaaggtcttcgctttgcaattcgtgaaggcggccgtactgtaggcgctggtgttgttgctaacgttcacgtttaa

SEQ ID NO: 27208 - protein, 396 aa, Psychrobacter arcticus 273-4
MAKAKFERLKPHVNVGTIGHVDHGKTTLTAAIATVAAITSGGEAKDYASIDSAPEEKARGITINTSHVEYDTPSRHYAHVDCPGHADYVKNMITGAAQMDGAILVVSATDGPMPQTREHILLSRQVGVPYIVVFMNKCDVVDDEELLELVEMEVRELLSDYDFPGDDTPIIHGSATEALKGSQEKYGQPAVVELLNVLDTYIPEPERDIDKAFLMPIEDVFSISGRGTVVTGRVESGIVRVGEEIEIVGIRDTQKTTCTGVEMFRKLLDEGRAGENCGVLLRGTKREDVQRGQVLAKPGSITPHTKFDAEVYVLSKEEGGRHTPFLNGYRPQFYFRTTDVTGAIQLQDGTEMVMPGDNVEMGVELIHPIAMDKGLRFAIREGGRTVGAGVVANVHV

SEQ ID NO: 27209 - DNA, 1185 bp, Colwellia psychrerythraea 34H
  CDS (1)..(1185): transl_table=11
atggctaaagaaaaatttgaacgtaataaaccgcatgttaacgttggtactatcggtcacgtagatcacggtaaaacaactttaacagctgctatctctgctgtattaactaaagttcacggtggtgaagttaaagatttcgcacaaatcgataacgctcctgaagaacgtgaacgtggtattacaattaatacttctcacatcgaatacgatactgaagcacgtcactatgcacacgtagattgtcctggtcacgccgattatatcaaaaatatgatcactggtgctgcacaaatggatggcgctatcttagtagttgctgctacagatggtcctatgccacaaacacgtgagcacatcttattgtctcgccaagttggtgttcctttcatcatcgttttcatgaacaaatgtgacgttgtagatgatgaagaattattagaattagtagaaatggaagttcgtgaacttctttctgaatatgacttccctggtgatgatttaccagtaattcaaggttcagctttaggcgctcttcaaggcgatgaagcatgggaagcgaaaattatcgaacttgctgatgcacttgatacttacattccagagccagagcgtgcaattgacggtgcattcatcatgcctatcgaagatgtattctcaatctcaggtcgtggtacagttgtaacaggtcgtgttgaacgtggtatcatcaaaattggtgaagaagtagaagttgttggtatccgtgatacacaaaaatcaacttgtacaggtgttgaaatgttccgtaagcttcttgacgaaggtcgtgctggcgagaactgtggtgttcttctacgtggtcttaagcgtgaagatgttgaacgtggtcaagtactttgtgctccaggttcaatcttacctcacactaaattcgaatcagaagtttatgttctttctaaagatgaaggtggtcgtcatactccattctttaaaggataccgtccacagttttacttccgtacaacagatatcacaggtgctgtagagcttcctgaaggtgttgaaatggtaatgcctggtgacaaccttaagtttgttgttgagctaatcaacccagtagcgatggacgaaggtttacgcttcgcaatccgtgaaggtggtcgtactgttggtgctggtgttgtttctaagattatggcttaa

SEQ ID NO: 27210 - protein, 394 aa, Colwellia psychrerythraea 34H
MAKEKFERNKPHVNVGTIGHVDHGKTTLTAAISAVLTKVHGGEVKDFAQIDNAPEERERGITINTSHIEYDTEARHYAHVDCPGHADYIKNMITGAAQMDGAILVVAATDGPMPQTREHILLSRQVGVPFIIVFMNKCDVVDDEELLELVEMEVRELLSEYDFPGDDLPVIQGSALGALQGDEAWEAKIIELADALDTYIPEPERAIDGAFIMPIEDVFSISGRGTVVTGRVERGIIKIGEEVEVVGIRDTQKSTCTGVEMFRKLLDEGRAGENCGVLLRGLKREDVERGQVLCAPGSILPHTKFESEVYVLSKDEGGRHTPFFKGYRPQFYFRTTDITGAVELPEGVEMVMPGDNLKFVVELINPVAMDEGLRFAIREGGRTVGAGVVSKIMA

SEQ ID NO: 27211 - DNA, 1194 bp, Pseudomonas syringae pv. phaseolicola 1448A
  CDS (1)..(1194): transl_table=11
gtggctaaagaaaaatttgatcgttccctcccgcacgtcaacgttggcaccattggtcacgttgaccacggtaaaaccacgctgaccgctgctctgactcgcgtctgctccgaagttttcggttcggctcgtgttgacttcgacaagatcgacagcgcaccggaagaaaaagctcgtggtatcaccatcaacactgcgcacgttgaatacaactcgctgacccgtcactacgctcacgttgactgcccaggtcacgctgactacgtgaagaacatgatcaccggtgctgcccagatggacggcgctatcctggtttgttcggctgctgatggtccgatgccacaaactcgtgagcacatcctgctgtcccgtcaggtaggcgttccgtacatcgtggtcttcctgaacaaggctgacctggtagacgacgctgagctgctggaactggttgagatggaagtgcgcgatctgctgagcacttacgatttcccgggcgacgacactccgatcatcatcggttctgctcgtatggctctggaaggcaaagacgacaacgaaatgggcaccactgccgttcgtaaactggttgaaacactggacagctacattccagagccagttcgtctgaccgacaagccattcctgatgccaatcgaagacgtgttctcgatctccggtcgcggtactgttgtgactggtcgtgttgagcgcggtatcgtcaaggttcaggatccactggaaatcgttggtctgcgtgacactaccgtcaccacctgcaccggtgttgaaatgttccgcaaactgctcgacgaaggtcgtgctggcgagaactgcggcgttctgctgcgtggtaccaagcgtgacgacgttgagcgtggccaggttctggtcaagccaggcaccgtcaagccgcacactcagttcgaagctgaaatctacgttctgagcaaagaagaaggcggtcgtcacactccgttcttcaaaggctaccgtccgcagttctacttccgtactaccgacgtaactggtagctgcgaactgccggaaggcgtagaaatggttatgccaggtgataacgttaaagtttccgttaccctgatcaagccaatcgcaatggaagacggtctgcgtttcgcaatccgtgaaggcggtcgtaccgtcggcgctggcgtcgtggccaaaatcatcgcgtaa

SEQ ID NO: 27212 - protein, 397 aa, Pseudomonas syringae pv. phaseolicola 1448A
MAKEKFDRSLPHVNVGTIGHVDHGKTTLTAALTRVCSEVFGSARVDFDKIDSAPEEKARGITINTAHVEYNSLTRHYAHVDCPGHADYVKNMITGAAQMDGAILVCSAADGPMPQTREHILLSRQVGVPYIVVFLNKADLVDDAELLELVEMEVRDLLSTYDFPGDDTPIIIGSARMALEGKDDNEMGTTAVRKLVETLDSYIPEPVRLTDKPFLMPIEDVFSISGRGTVVTGRVERGIVKVQDPLEIVGLRDTTVTTCTGVEMFRKLLDEGRAGENCGVLLRGTKRDDVERGQVLVKPGTVKPHTQFEAEIYVLSKEEGGRHTPFFKGYRPQFYFRTTDVTGSCELPEGVEMVMPGDNVKVSVTLIKPIAMEDGLRFAIREGGRTVGAGVVAKIIA

SEQ ID NO: 27213 - DNA, 1191 bp, Dechloromonas aromatica RCB
  CDS (1)..(1191): transl_table=11
atggctaaggaaaaattcgcgcgtacgaaaccgcacgtaaacgttggcacgattggtcacgttgaccacggcaagaccacgctgacggctgcgatcacgacggtgctgtccgccaagttcggtggcgctgccaagaaatatgatgaaattgacgctgcgccggaagaaaaggctcgcggtatcacgattaacaccgcccacgtcgaatacgaaaccgccaaccgtcactacgcccacgttgactgcccgggccacgctgactacgtcaagaacatgattaccggtgctgcccagatggacggcgcgatcctggtctgttccgccgctgacggcccgatgccgcaaacccgcgaacacatcctgctggctcgccaggttggtgtgccgtacgttctggtgttcatgaacaagtgcgacatggttgacgacgccgagctgctcgagctggtcgaaatggaactgcgcgagctgctctccaagtacgacttcccgggcgacgacaccccgatcattcacggctccgccctgaaggccctcgaaggcgaccagtccgaaatcggcgaaccgtcgatcttccgtctggccgacgccctggactcctacatccctgatccggagcgtgctatcgatcagccgttcctgatgccggttgaagacgtcttctccatctctggtcgcggtaccgtggtgaccggtcgtgttgagcgcggcatcgtcaaggttggcgaagaaatcgaaatcgttggtatccgcccgaccgtcaagaccatctgtaccggtgttgaaatgttccgcaagctgctcgaccaaggtcaggctggcgacaacattggcgccctgctgcgtggtaccaagcgtgaagacgtcgagcgtggccaggtgctgtgcaagccgggttcggtcaagccgcacacccacttcacctccgaagtgtacatcctgtccaaggatgaaggcggtcgtcacaccccgttcttcaacggctaccgtccgcagttctacttccgcacgacggacgtgactggctccatcgagctgccggaaggcaccgaaatggttatgccgggcgacaacatcgccatgacgatcaagctgattgcgccgatcgccatggaagaaggtctgcgcttcgccatccgtgaaggcggtcgtaccgtcggcgccggcgtcgtcgccaagatcatcgagtaa

SEQ ID NO: 27214 - protein, 396 aa, Dechloromonas aromatica RCB
MAKEKFARTKPHVNVGTIGHVDHGKTTLTAAITTVLSAKFGGAAKKYDEIDAAPEEKARGITINTAHVEYETANRHYAHVDCPGHADYVKNMITGAAQMDGAILVCSAADGPMPQTREHILLARQVGVPYVLVFMNKCDMVDDAELLELVEMELRELLSKYDFPGDDTPIIHGSALKALEGDQSEIGEPSIFRLADALDSYIPDPERAIDQPFLMPVEDVFSISGRGTVVTGRVERGIVKVGEEIEIVGIRPTVKTICTGVEMFRKLLDQGQAGDNIGALLRGTKREDVERGQVLCKPGSVKPHTHFTSEVYILSKDEGGRHTPFFNGYRPQFYFRTTDVTGSIELPEGTEMVMPGDNIAMTIKLIAPIAMEEGLRFAIREGGRTVGAGVVAKIIE

SEQ ID NO: 27215 - DNA, 1194 bp, Thermobifida fusca YX
  CDS (1)..(1194): transl_table=11
gtggcgaaggccaagttcgagcggaccaagccgcacgtaaacatcggcaccatcggtcacatcgaccacggtaaaaccacgctgaccgcggcgattaccaaggttctgcacgacaagtacccggacctcaacccgttcacgcctttcgaggacatcgacaaggccccggaggagcgcgagcgcggtatcaccatctccatctcgcacgtggagtaccagaccgagagccgccactacgcgcacgtggactgccccggtcacgcggactacgtgaagaacatgatcaccggtgccgcccagatggacggcgcgatcctggtggtcgccgctactgacggtccgatgccgcagaccaaggagcacgtgctcctggctcgccaggtcggcgtcccctacattgtcgtggctctcaacaagtccgacatggtggacgacgaggagatcttcgacctcgttgagctcgaggtccgcgagctgctcaacgagtacgagttcccgggcgacgaggtgcccgtgatccgcgtctccgcgctgaaggccctcgagggtgaccccgagtggggcaagaagatcctcgagctgatggaggccgtggaccagaacatccccgagccgcagcgggacatcgacaagccgttcctcatgccgatcgaggacgtgttctcgatcaccggtcgcggtaccgtcgtcaccggccgtatcgagcgcggtgtcatcaacgtcaacgacaccgtcgagatcgtcggcctcaaggacgacaagatcaccaccaccgtcaccggtgtggagatgttccgcaagctgctcgaccagggccaggccggtgacaacgtcggtctgctgctgcgtggtgtcaagcgcgaggaggtggagcgcggtcaggtcgtcatcaagcctggcaccaccaccccgcacaccgagttcgaggcccaggtcgtcatcctctccaaggacgagggtggccgccacacgcccttcttcaacaactaccgcccgcagttctacttccggaccacggacgtcaccggtgtcgttaccctccccgagggcaccgagatggtcatgcccggtgacaacacctcgatgaccgtcaagctgatccagccggtcgcgatggaagagggtctgaagttcgccatccgtgagggtggacggaccgtaggcgcgggtcgcgtcaccaagatcatcaagtag

SEQ ID NO: 27216 - protein, 397 aa, Thermobifida fusca YX
MAKAKFERTKPHVNIGTIGHIDHGKTTLTAAITKVLHDKYPDLNPFTPFEDIDKAPEERERGITISISHVEYQTESRHYAHVDCPGHADYVKNMITGAAQMDGAILVVAATDGPMPQTKEHVLLARQVGVPYIVVALNKSDMVDDEEIFDLVELEVRELLNEYEFPGDEVPVIRVSALKALEGDPEWGKKILELMEAVDQNIPEPQRDIDKPFLMPIEDVFSITGRGTVVTGRIERGVINVNDTVEIVGLKDDKITTTVTGVEMFRKLLDQGQAGDNVGLLLRGVKREEVERGQVVIKPGTTTPHTEFEAQVVILSKDEGGRHTPFFNNYRPQFYFRTTDVTGVVTLPEGTEMVMPGDNTSMTVKLIQPVAMEEGLKFAIREGGRTVGAGRVTKIIK

SEQ ID NO: 27217 - DNA, 1188 bp, Ehrlichia canis str. Jake
  CDS (1)..(1188): transl_table=11
atggtagaagaaaggaagccgcatataaatgtagggacaatagggcatgttgatcatggtaagacaacattgacagcagcattaacaacagtgttggcaaaaaggttgagtggagaagggaataaaagtgtaaaatatgatgaaatagataaagcaccagaagaaaaagcaagaggaataaccatttcaacagcacatgtagaatatgaaacagaaaatagacattatgcccatgttgattgtccaggacatgctgattatataaaaaatatgataacaggtgctgcacaaatggatgcagcaatattagtagtgtctgcaactgatggagcaatgccacaaacaagagaacatatattattagcaaagcaagtaggtgtaaaagatatagtagtgtggatgaataagtgtgatgttgtagatgatgaagaaatgttgtcattagttgaaatggaaataagggaattgttatcaaaatatgggtatcctggggatgatatagatgtagttagaggatctgcagttaaagcattagaagaagaaacaggctcaggtgtgtggagtgaaaaaataatggaattgatgaatgctttagaaaaaataagtttaccagtaagagaaaaagataagccatttttaatgtcaatagaagatgtgttttcaatacctggaagaggtacagtagtaacaggaagaatagaaagaggagtaattagagtaggggataaaatagagatagtaggattgcgtgagatacaaagtacagtatgtacaggtgttgaaatgtttcataaagcattagatgcaggagaagcaggggataatgctggaatattgttaagagggataaaaaaagaagatgtagaaagagggcaagtattgagtgcacctggacagatacattcatataagagatttaaggcagaggtatatatattgaaaaaagaagaaggaggaagacatactccatttttctcaaattaccagccgcaattttatgttagaacaacagatgtaacagggaatataaagttaccagaaggagtagaaatggtaatgccaggggataatataaatatcgaagtgagtttggataagcctgttgctattgatcaaggattgagatttgcaattcgtgaaggtggtagaactgtaggctcaggtattattactgaaattttggagtag

SEQ ID NO: 27218 - protein, 395 aa, Ehrlichia canis str. Jake
MVEERKPHINVGTIGHVDHGKTTLTAALTTVLAKRLSGEGNKSVKYDEIDKAPEEKARGITISTAHVEYETENRHYAHVDCPGHADYIKNMITGAAQMDAAILVVSATDGAMPQTREHILLAKQVGVKDIVVWMNKCDVVDDEEMLSLVEMEIRELLSKYGYPGDDIDVVRGSAVKALEEETGSGVWSEKIMELMNALEKISLPVREKDKPFLMSIEDVFSIPGRGTVVTGRIERGVIRVGDKIEIVGLREIQSTVCTGVEMFHKALDAGEAGDNAGILLRGIKKEDVERGQVLSAPGQIHSYKRFKAEVYILKKEEGGRHTPFFSNYQPQFYVRTTDVTGNIKLPEGVEMVMPGDNINIEVSLDKPVAIDQGLRFAIREGGRTVGSGIITEILE

SEQ ID NO: 27219 - DNA, 1191 bp, Thiobacillus denitrificans ATCC 25259
  CDS (1)..(1191): transl_table=11
atggctaaggaaaaattcgagcggaccaaaccgcacgtaaacgtaggcacgattggtcacgttgaccacggcaagaccaccttgaccgcggcgatcacgaccattctgtcgaagaaattcggtggtgcggcgaagaagtacgacgagatcgattcctcgcctgaagagaaggcgcgcggcatcaccatcaacaccgcccacgtcgagtacgagaccgccagccgtcactacgcccacgtcgactgcccgggccacgccgactacgtcaagaacatgatcaccggcgctgcccagatggacggcgccattcttgtcgtctcctctgccgacggtcccatgccccagacccgcgagcacatcctgcttgcccgtcaggtcggcgtgccctacatcatcgtctacatgaacaaggccgacatggtcgacgacgccgagctcctcgagctcgtcgaaatggaagtgcgcgaactgctgtccaagtacgacttccctggcgacgacacccccatcatcgtcggtagcgccctgaaggccctcgaaggcgaccagagcgacatcggcgaacccagcatcatcaagctcgccgaagcgctcgacacctacatccccgagcccgagcgcgccatcgacaagcccttcctcatgcccgtcgaagacgtcttctccatctccggtcgcggcaccgtcgtcaccggtcgtgtcgagcgcggcgtcatcaaggtcggcgaagaaatcgagatcgtcggcatcaccccgaccgtcaagaccacctgcaccggcgtcgagatgttcaggaagctcctcgaccagggacaggctggcgacaacgtcggcgtgctgctgcgcggcaccaagcgtgaagaagtccagcgcggccaggttctggccaagcccggctcgatcaagccgcacaccaagttctccgccgagatctatgtgttgagcaaggacgaaggcggtcgtcatacccccttcttcaacggctaccgtccgcagttctatttccgcaccaccgacgtcaccggctcgatcgaactgccggccggcaccgagatggtcatgcctggcgacaacgtcagcatcaaggtctcgctgatccagccgatcgcgatggacgaaggcctgcgtttcgccatccgcgaaggcggccgcaccgtcggtgccggcgtcgttgccaagatcgaagagtaa

SEQ ID NO: 27220 - protein, 396 aa, Thiobacillus denitrificans ATCC 25259
MAKEKFERTKPHVNVGTIGHVDHGKTTLTAAITTILSKKFGGAAKKYDEIDSSPEEKARGITINTAHVEYETASRHYAHVDCPGHADYVKNMITGAAQMDGAILVVSSADGPMPQTREHILLARQVGVPYIIVYMNKADMVDDAELLELVEMEVRELLSKYDFPGDDTPIIVGSALKALEGDQSDIGEPSIIKLAEALDTYIPEPERAIDKPFLMPVEDVFSISGRGTVVTGRVERGVIKVGEEIEIVGITPTVKTTCTGVEMFRKLLDQGQAGDNVGVLLRGTKREEVQRGQVLAKPGSIKPHTKFSAEIYVLSKDEGGRHTPFFNGYRPQFYFRTTDVTGSIELPAGTEMVMPGDNVSIKVSLIQPIAMDEGLRFAIREGGRTVGAGVVAKIEE

SEQ ID NO: 27221 - DNA, 1230 bp, Anabaena variabilis ATCC 29413
  CDS (1)..(1230): transl_table=11
atggcacgcgcaaagtttgaaagaacgaaaccccacgtaaatattggtacgattggccacgttgaccacggtaaaacaaccttaacggcagcaatcaccatgaccttggcagcccttggtcaagcggtcgctaaaggctacgatcaaatcgacaacgcaccagaagaaaaggcgcggggtatcaccattaacacagcccacgttgaatatgagaccgctaatcgtcactatgctcacgtagactgtcctggtcacgctgactatgtgaagaatatgatcacaggtgcggctcagatggatggagcaattctcgtagttgctgctaccgacggccctatgcctcaaacccgtgaacacatcctactagcaaaacaggtaggcgttcctaagctagtagtcttcttaaataaagaagatatgatggaagacgctgaactactagaactagtagaactggaattaagagaactgttgaccgaatacgaattcgatggtgatgatattcccatcgttagaggttcaggtttgcaagctctcgacgttatgaccaagaatcctaagacccaacgtggagaaaatccttgggtagataaaatctacgaattgatggatgctgtagattcttatattcctgatccagagcgggatatagataaaccattcctgatggcggtagaagacgtgttctctattaccggtcgtggtacagttgctaccggtcggattgagcgtggtaaggtgaaagttggtgatgttgtagaactagtaggtattagagatacacgcaacacaactgttaccgggatcgagatgttcaagaagagtctcgatgaaggtatggctggagacaacgccggtgtactgttacgtggtattcaaaaaactgatattgaacggggtatggttttagccaagcctggttccatcactcctcacacccaatttgaaggcgaagtttacgttctcaccgaaaaagaaggtggtcgtaaaactcctttcttcgctggctaccgtcctcaattctatgtgcggacaactgatgtaactggtacaattaaagcctttacttccgatgaaggtgaagcagtagaaatggtgatgccaggagatcgcatcaaagtcactgttgaattaatcaacccgattgcgattgagcaagggatgcgcttcgctattcgtgaaggtggccgcaccatcggtgctggtgtcgtctccaaaatcgtcaagtag

SEQ ID NO: 27222 - protein, 409 aa, Anabaena variabilis ATCC 29413
MARAKFERTKPHVNIGTIGHVDHGKTTLTAAITMTLAALGQAVAKGYDQIDNAPEEKARGITINTAHVEYETANRHYAHVDCPGHADYVKNMITGAAQMDGAILVVAATDGPMPQTREHILLAKQVGVPKLVVFLNKEDMMEDAELLELVELELRELLTEYEFDGDDIPIVRGSGLQALDVMTKNPKTQRGENPWVDKIYELMDAVDSYIPDPERDIDKPFLMAVEDVFSITGRGTVATGRIERGKVKVGDVVELVGIRDTRNTTVTGIEMFKKSLDEGMAGDNAGVLLRGIQKTDIERGMVLAKPGSITPHTQFEGEVYVLTEKEGGRKTPFFAGYRPQFYVRTTDVTGTIKAFTSDEGEAVEMVMPGDRIKVTVELINPIAIEQGMRFAIREGGRTIGAGVVSKIVK

SEQ ID NO: 27223 - DNA, 1176 bp, Rhodobacter sphaeroides 2.4.1
  CDS (1)..(1176): transl_table=11
atggcaaaggcaaagtttgaacgtaacaaaccgcacgtcaacatcggcacgatcggccacgttgaccacggcaagacgactctgacggccgcgatcacgaagtatttcggcgagttccgcgcctacgaccagatcgacggcgcgccggaagagcgggcccgcgggatcacgatctcgaccgcgcacgtggaatacgagtcggacacgcgccactatgcgcacgtcgactgccccggccacgccgactatgtgaagaacatgatcaccggcgccgcgcagatggacggcgcgatcctcgtggtgaacgcggccgacggcccgatgccgcagacgcgcgagcacatcctgctcggccgtcaggtgggcatcccctacatggtcgtctacatgaacaaggtcgaccaggtggacgatccggaactcatcgagctggtcgagatggagatccgcgagcttctgtcgtcctacgactaccccggcgacgacattccgatcatcaagggctcggctctggccgcgatgaacggcaccgacaaggaaatcggcgaggattcgatccgcgcgctgatcgccgccgtggatgaatacatcccgaccccggcgcgtgccgtggaccagcccttcctgatgccggtcgaggacgtgttctcgatctcgggccgcggcaccgtggccacgggccggatcgagcgcggtgtggtgaaggtgggtgaggaactcgagatcgtcggcatccgcccgtcgaagaagacggtctgcaccggcgtcgagatgttccgcaagctcctcgaccagggcgaagcgggcgacaacgtgggcctgctgctccgcggcgtggaccgcgacggcatcgagcgcgggcaggttctctgcaagccgggctcggtgaagccgcacacgaagttcgaggccgaggcctacatcctcacgaaagaggaaggcggccgccacaccccgttcttcgccaactaccgtccgcagttctacttccggaccaccgacgtgaccgggaccgtgcaactgccggaaggcaccgagatggtgatgccgggcgacaacctgaagttcaacgtcgagctgatcgcgccgatcgccatggaagagaagctccgcttcgccatccgtgaaggcggccgcaccgtcggcgccggcgtcgtctcgaaaatcatcgcgtaa

SEQ ID NO: 27224 - protein, 391 aa, Rhodobacter sphaeroides 2.4.1
MAKAKFERNKPHVNIGTIGHVDHGKTTLTAAITKYFGEFRAYDQIDGAPEERARGITISTAHVEYESDTRHYAHVDCPGHADYVKNMITGAAQMDGAILVVNAADGPMPQTREHILLGRQVGIPYMVVYMNKVDQVDDPELIELVEMEIRELLSSYDYPGDDIPIIKGSALAAMNGTDKEIGEDSIRALIAAVDEYIPTPARAVDQPFLMPVEDVFSISGRGTVATGRIERGVVKVGEELEIVGIRPSKKTVCTGVEMFRKLLDQGEAGDNVGLLLRGVDRDGIERGQVLCKPGSVKPHTKFEAEAYILTKEEGGRHTPFFANYRPQFYFRTTDVTGTVQLPEGTEMVMPGDNLKFNVELIAPIAMEEKLRFAIREGGRTVGAGVVSKIIA

SEQ ID NO: 27225 - DNA, 1203 bp, Carboxydothermus hydrogenoformans Z-2901
  CDS (1)..(1203): transl_table=11
atggcgaaggcgaaatttgagcgggtaaaaccgcacgtaaacattgggacgataggtcacgtagaccacgggaagaccaccttgaccgcagcaattactacggtgctggcgaagaagggattagcccagcaaaagaggtacgatgagattgacaatgctccggaagaaagggaaagaggaattaccattaatacagcgcatgtggagtatgagaccgagaagcggcactatgcccacgtagactgtccgggacacgctgactacgtaaagaacatgataactggagcggcgcagatggacggagctatcctggttgtgtctgcagccgatggtccgatgccgcagacgcgggagcacattttgttagcccgtcaggtaggagttccctatattgtagtatttttaaacaaagcggacatggtagatgatccggagttaatggagcttgtagagatggaagtgcgggatcttttaagcacgtacgagtttccgggggatgaagtaccggtagtagcggggtcggcattgaaggcattggagtgcggttgcgggaaagaagattgtccgtggtgtgggaagatattggagttaatggacaaggtagacgaatacattccgacaccgcagcgggatgtagataagccgttcttaatgccggtagaggacgtatttaccattaccggacgtgggacggttgcgaccggccgggtagagcggggacggataaccataggagaagaagtggagatagtaggattgatggatgctccgcggaagacggtagtaacgggactggagatgttccggaaggtattagacgaagcggtagcaggggacaacataggagcgttattacggggagtagaccggaaggaaatcgagcgggggcaggtattggcgaagcctggtacgataaagccgcaccggaagttttttgcggaggtatacgtattgacgaaggaagaagggggacggcacacaccgttctttaatggataccggccgcagttttacttccggacgacggacgtaacgggagtaatccatttaccagaaggtgtagagatggtaatgcccggggataacgtaaagattcatattgagcttatcacaccgattgctattgaagaaggattgagatttgctattcgggaaggtggcagaactgtaggcgcgggcgttgttaccgcgatcgaagagtaa

SEQ ID NO: 27226 - protein, 400 aa, Carboxydothermus hydrogenoformans Z-2901
MAKAKFERVKPHVNIGTIGHVDHGKTTLTAAITTVLAKKGLAQQKRYDEIDNAPEERERGITINTAHVEYETEKRHYAHVDCPGHADYVKNMITGAAQMDGAILVVSAADGPMPQTREHILLARQVGVPYIVVFLNKADMVDDPELMELVEMEVRDLLSTYEFPGDEVPVVAGSALKALECGCGKEDCPWCGKILELMDKVDEYIPTPQRDVDKPFLMPVEDVFTITGRGTVATGRVERGRITIGEEVEIVGLMDAPRKTVVTGLEMFRKVLDEAVAGDNIGALLRGVDRKEIERGQVLAKPGTIKPHRKFFAEVYVLTKEEGGRHTPFFNGYRPQFYFRTTDVTGVIHLPEGVEMVMPGDNVKIHIELITPIAIEEGLRFAIREGGRTVGAGVVTAIEE

SEQ ID NO: 27227 - DNA, 1191 bp, Geobacter metallireducens GS-15
  CDS (1)..(1191): transl_table=11
atggcaaaggcaaaattcgagagaacaaaaccgcacgtcaacatagggacgattggtcacgttgatcatggcaagaccacgctgaccgccgccatcacgcgggttctggccgagcgcggccaggccgaattcaagggctttgatcagatcgacaacgcccctgaggagcgtgagcgtggtatcaccatcgccacctcgcacgttgagtatgaaaccgaaaagcgtcactatgctcacgttgactgtcccggccacgctgactacgtcaagaacatgatcaccggtgcggctcagatggacggcgcgattctcgttgtctccgccgccgacggccccatgccccagacccgcgagcacattctgcttgctcgtcaggtaggggttccctacatcgttgtgttccttaacaaggctgacatggtcgatgacgaagagcttcttgagctcgtcgagctggagattcgcgaactgctctcctcctatgatttcccgggcgacgacattcccatcattaagggttccgccctcaaggccctcaatggcgacaaggacgagctcggctctgaagccatcgtcaagctcatggacgccgtcgacgcctatattcccgagcctgagcgcgccatcgacaagccgttcctgatgcccgtcgaagacgtcttttccatctccggtcgcggtaccgttgccactggtcgggttgagcgtggcgttgtcaaggtgggcgaggaagtcgagatcgttggaatcaagacgaccaccaagaccactgttaccggtgtagaaatgttccgcaagctcctcgatgaagggcgtgccggcgacaacatcggcgccctgctccgtggtgtaaagcgtgaagacatcgagcgtggccaggtgctggcgaggccggggagcatcaccccgcacaccaagttcaaggccgaggcctacattctgaccaaggaagaaggcgggcgccacaccccgttcttcaacggctatcgtccgcagttctactttcggaccaccgacgtgaccggcatagtagaccttcccgcagggaccgaaatggtcatgcccggcgacaacgtagccgtaacggttaacctgatcaccccaatcgccatggacgaaggcctgcggttcgctatccgtgagggtggccgtactgtcggcgccggtgttgtcagctctatcatcgaataa

SEQ ID NO: 27228 - protein, 396 aa, Geobacter metallireducens GS-15
MAKAKFERTKPHVNIGTIGHVDHGKTTLTAAITRVLAERGQAEFKGFDQIDNAPEERERGITIATSHVEYETEKRHYAHVDCPGHADYVKNMITGAAQMDGAILVVSAADGPMPQTREHILLARQVGVPYIVVFLNKADMVDDEELLELVELEIRELLSSYDFPGDDIPIIKGSALKALNGDKDELGSEAIVKLMDAVDAYIPEPERAIDKPFLMPVEDVFSISGRGTVATGRVERGVVKVGEEVEIVGIKTTTKTTVTGVEMFRKLLDEGRAGDNIGALLRGVKREDIERGQVLARPGSITPHTKFKAEAYILTKEEGGRHTPFFNGYRPQFYFRTTDVTGIVDLPAGTEMVMPGDNVAVTVNLITPIAMDEGLRFAIREGGRTVGAGVVSSIIE

SEQ ID NO: 27229 - DNA, 1191 bp, Rhodospirillum rubrum ATCC 11170
  CDS (1)..(1191): transl_table=11
atgtcgaaagaaaagtttgcgcggacgaagccccattgcaacgtcggaacgattggtcacgttgaccatggcaagacgtcgctgacggctgcgatcacgaaggttctggccgaagcgggcggggcgacgttccaggcctacgaccagatcgacaaggcgccggaagagcgtgcgcgcggcatcacgatttcgacggcgcacgttgagtacgagacggaagcgcgtcactacgcccacgtcgactgcccgggccacgccgactatgtgaagaacatgatcaccggcgcggcgcagatggacggggcgatcctggtggtttcggccgccgacggcccgatgccgcagacccgcgagcacattcttctggcccgtcaggtcggcgttccggccctggtggtgttcctgaacaagtgcgacatggtcgacgacgaggagctgcttgagctggtcgagcttgaggtccgcgagttgctgacgagctacgacttccccggcgatgacattcccatcatcaagggctcggctctggccgctctggaagacagcgaccagaagcttggtcacgatgccatcctcgagctgatgaaggcggtggacgattacattccgcagcccgagcgcccgaaggacaagccgttcctgatgccgatcgaagacgtgttctcgatctcgggtcgtggtacggtggtgaccggtcgcgtcgagcgcggcatcgtcaaggttggcgaggaaatcgagatcatcggtatccgcgacacccagaagacgacctgcaccggcgtcgagatgttccgcaagctgcttgatcagggcgaggccggcgacaacatcggcgcgctgctgcgcggcaccaagcgtgatgacgtcgagcgcggtcaggttctggccaagccgggttcgatcaccccgcacaccaagttcaagtgcgaggcctatatcctgacgaaggaagagggtggccgtcacacgccgttcttctccaactatcgtccgcagttctatttccgcacgaccgacgtgaccgggacgatcgagctgccggaaggcaccgagatggttatgcccggtgacaacatcggcatgacggtacagctgatcgcgccgattgccatggacgagggtctgcggttcgctatccgcgagggtggccgtaccgtcggtgccggcgtcgtcgccagcatcgttcagtaa

SEQ ID NO: 27230 - protein, 396 aa, Rhodospirillum rubrum ATCC 11170
MSKEKFARTKPHCNVGTIGHVDHGKTSLTAAITKVLAEAGGATFQAYDQIDKAPEERARGITISTAHVEYETEARHYAHVDCPGHADYVKNMITGAAQMDGAILVVSAADGPMPQTREHILLARQVGVPALVVFLNKCDMVDDEELLELVELEVRELLTSYDFPGDDIPIIKGSALAALEDSDQKLGHDAILELMKAVDDYIPQPERPKDKPFLMPIEDVFSISGRGTVVTGRVERGIVKVGEEIEIIGIRDTQKTTCTGVEMFRKLLDQGEAGDNIGALLRGTKRDDVERGQVLAKPGSITPHTKFKCEAYILTKEEGGRHTPFFSNYRPQFYFRTTDVTGTIELPEGTEMVMPGDNIGMTVQLIAPIAMDEGLRFAIREGGRTVGAGVVASIVQ

SEQ ID NO: 27231 - DNA, 1203 bp, Moorella thermoacetica ATCC 39073
  CDS (1)..(1203): transl_table=11
atggccaaacaaaaatatgaacgcacgaaaccccatgtcaacgttggtaccatcgggcacgttgaccatggcaagacgaccctgacggcagccattaccttctgcctggccaaggccggcggcgctgtacctacggcctacgatcagattgataaggcgccggaagagagagaacgtggaattaccatcgccacggcccacgtagagtacgaaaccgagaaaaggcactatgcccatgttgactgcccgggtcacgccgactacgtcaagaacatgattaccggtgcggcacagatggacggtgccatcctggtagtatcagcggccgacggtcccatgccccagacccgtgaacacatccttctggcccgccaggtaggcgttccttacatcgttgttttcctgaataaagttgaccaggtagacgatcccgaactcctggaactcgtggagatggaagtccgggagcttttaactgaatatgaattcccgggcgatgagattcctattgtcaccggcagcgccctgaaagccatggaatgcggttgcggcaaacgggaatgcgaatggtgcggcaaggtgtgggagctgatggatgccgtagacagctatattcctacacccgagcgtgacaccgacaaacctttcctgatgcccattgaagacgtcttcaccattaccggccgcggtaccgtgaccaccggcagggtggagaggggcaaggtcaaagtcggggatgaagtcgagattatcggcctgcgcgacgagatccgcaagacggtagtcaccggtgtggagatgttccgcaagatcctcgacgaagccgttgctggtgacaatatcggcaccctcctccgtggtgtcgaccgcaaagaggtcgagcgcggtatggtcctggccaaaccgggcagcattaaaccccataccaaattcaatgccgaggtttacgtcctgaccaaagaggaaggtggccggcatactcccttctttaacggctaccggccccagttctatttccggactaccgacgttaccggcgtggtaaacctccccgaaggtgtagagatggtcatgccgggcgataacatccgtatgaccattgagctcattacccccattgctattgaagaaggcctgcgtttcgctatccgcgaaggtggtcgtactgtcggcgccggcgttgttaccgggattatcgaataa

SEQ ID NO: 27232 - protein, 400 aa, Moorella thermoacetica ATCC 39073
MAKQKYERTKPHVNVGTIGHVDHGKTTLTAAITFCLAKAGGAVPTAYDQIDKAPEERERGITIATAHVEYETEKRHYAHVDCPGHADYVKNMITGAAQMDGAILVVSAADGPMPQTREHILLARQVGVPYIVVFLNKVDQVDDPELLELVEMEVRELLTEYEFPGDEIPIVTGSALKAMECGCGKRECEWCGKVWELMDAVDSYIPTPERDTDKPFLMPIEDVFTITGRGTVTTGRVERGKVKVGDEVEIIGLRDEIRKTVVTGVEMFRKILDEAVAGDNIGTLLRGVDRKEVERGMVLAKPGSIKPHTKFNAEVYVLTKEEGGRHTPFFNGYRPQFYFRTTDVTGVVNLPEGVEMVMPGDNIRMTIELITPIAIEEGLRFAIREGGRTVGAGVVTGIIE

SEQ ID NO: 27233 - DNA, 1194 bp, Syntrophus aciditrophicus SB
  CDS (1)..(1194): transl_table=11
atggctaagaagaaatttgaaaggacaaagccgcatttaaatattggcaccattggacatgtcgatcatggcaagacaactttgactgctgcgataacaaagtggcttgcaaagaaaggcttagccgaatttcgagcctttgattcgattgacaatgcaccggaagaaaaagaaagaggcgtcaccatcaacatttcccatgtggaatatcagacggacaagcgtcattatgcccatgtggactgtccggggcacgcggactatattaaaaatatgatctccggtgcagcgcacatggatggcacgatactggtcgtggcagcttccgatggtccgatgccgcagacgcgagagcatatcctccttgcacgtcaggtgcaggttccctctatcgtcgtttttctgaacaaagtagaccttgtcgacgatccggaacttcttgatctcgttgaactggagttgagagaactgctgaatgaatacgagtttcccggggacgatattcccatcatcagaggctccgctttaaaggcccttgaaagcgaaaatccggatgatcccgatgtaaaacagatatatgccctgatggatgccgtggatgcttatatccctgagcctgagcgtgatcttgacaagccgtttctgatgcccgtgggcgacgtttttacgatttcaggtcgcggtacagttgtgactggtcgaattgaccggggaattataaagaccggtgatgaagtcgaaatagtcggcgttcgcccgacacaaaagacagtttgcacaggtgtggaaatgtttcgcaagaccctggatgaagggcgtgccggtgacgatgtcggcttgctgcttcggggaatcaagagggaagacgttgaaagaggccaggttgttgcaaaaccgggttctatcacgccgcataccaaatttatggcccaagtctacgttttgactaaggaggaaggtggaaggcatactcctttcttcaccggctatcgcccgcagttttatttcagaacaaccgatgttaccggagttgccaagttggcggaaggtgtggaaatggttatgccgggggacaatgtagaaatggaagtgacgttgatcacgccgatagccatggaagaacagctgcggttcgctattcgcgaaggcggaagaacggtcggcgccggtgttgtcagtaaagtgattgaatag

SEQ ID NO: 27234 - protein, 397 aa, Syntrophus aciditrophicus SB
MAKKKFERTKPHLNIGTIGHVDHGKTTLTAAITKWLAKKGLAEFRAFDSIDNAPEEKERGVTINISHVEYQTDKRHYAHVDCPGHADYIKNMISGAAHMDGTILVVAASDGPMPQTREHILLARQVQVPSIVVFLNKVDLVDDPELLDLVELELRELLNEYEFPGDDIPIIRGSALKALESENPDDPDVKQIYALMDAVDAYIPEPERDLDKPFLMPVGDVFTISGRGTVVTGRIDRGIIKTGDEVEIVGVRPTQKTVCTGVEMFRKTLDEGRAGDDVGLLLRGIKREDVERGQVVAKPGSITPHTKFMAQVYVLTKEEGGRHTPFFTGYRPQFYFRTTDVTGVAKLAEGVEMVMPGDNVEMEVTLITPIAMEEQLRFAIREGGRTVGAGVVSKVIE

SEQ ID NO: 27235 - DNA, 1194 bp, Frankia sp. CcI3
  CDS (1)..(1194): transl_table=11
gtggcgaagcagaagttcgagcggacgaagccgcacgtcaatatcggcaccattggtcacatcgaccacggcaagacgaccctgaccgcggcgatcaccaaggtcctgcacgacgcctacccagacctcaaccccttcacgccgttcgaccagatcgacaaggcgccggaggagaaggcccgcggcatcacgatctcgatcgcccacgtcgagtaccagaccgacacccggcactatgcgcacgtcgactgcccgggacacgctgactacatcaagaacatgatcaccggtgccgctcagatggacggcgcgatcctggtcgtgtccgccaccgacggcccgatgccgcagacgaaggagcacgtgctcctcgcccgccaggtcggcgtgccctacattgtcgtcgccctgaacaaggccgacatggtcgacgacgaggagatcctcgagctcgtcgagctggaggtccgggagctgctgagctcgtacgagttcccgggcgacgacgttccggtcgtccgggtctccgcgctcaaggcgctggagggcgacaaggagtggggcgccaagctcctcgagctcatggcggcggtcgacgagtcgatccccgagccgcagcgtgacatcgaccggccgttcctcatgccgatcgaggacgtcttcacgatcaccggtcgtggcaccgtggtcaccggtcgcgtcgagcgcggaatcgtcaaggtcaacgagaccgtggagatcgtcggtatcaagccggagaccacctccaccaccgtgaccggtgtcgagatgttccgcaagctgctcgacgaggggcgtgccggcgacaacgtcggtctgctcctgcgcggtatcaagcgggaggacgtcgagcgcggccaggtcatcgtcaagccgaagtcgatcaccccgcacacggtgttcgaggctcgcgtctacatcctcaacaaggatgagggcggacggcacacgccgttcttcaagaactaccgcccgcagttttacttccgcaccaccgacgtgaccggcgtcgtgaccctccccgagggcacggagatggtcatgccgggggacaacaccgagatgacggtcgagctgatccagccgatcgccatggaggagggtctgcgcttcgccatccgcgagggtggccggaccgtcggcgcgggccaggttacgaaggttctcaagtag

SEQ ID NO: 27236 - protein, 397 aa, Frankia sp. CcI3
MAKQKFERTKPHVNIGTIGHIDHGKTTLTAAITKVLHDAYPDLNPFTPFDQIDKAPEEKARGITISIAHVEYQTDTRHYAHVDCPGHADYIKNMITGAAQMDGAILVVSATDGPMPQTKEHVLLARQVGVPYIVVALNKADMVDDEEILELVELEVRELLSSYEFPGDDVPVVRVSALKALEGDKEWGAKLLELMAAVDESIPEPQRDIDRPFLMPIEDVFTITGRGTVVTGRVERGIVKVNETVEIVGIKPETTSTTVTGVEMFRKLLDEGRAGDNVGLLLRGIKREDVERGQVIVKPKSITPHTVFEARVYILNKDEGGRHTPFFKNYRPQFYFRTTDVTGVVTLPEGTEMVMPGDNTEMTVELIQPIAMEEGLRFAIREGGRTVGAGQVTKVLK

SEQ ID NO: 27237 - DNA, 1191 bp, Novosphingobium aromaticivorans DSM 12444
  CDS (1)..(1191): transl_table=11
atggccaaggctaagtttgagcggaacaagccgcactgcaacatcggcaccatcggtcacgtcgaccacggcaagaccacgctgaccgccgcgatcaccaaggtgctcgccgagcagggtggcgctgaattcaccgactacgcgaacatcgacaaggctccggaagagcgcgagcgcggcatcaccatctcgaccgcacacgtcgagtacgagaccgccaaccgccactacgcgcacgtcgactgcccgggtcacgccgactacgtgaagaacatgatcaccggtgccgcccagatggacggcgcgatcctggtcgtgaacgctgctgacggcccgatgccgcagacccgcgagcacatcctgcttgcccgccaggtcggcgtgcccgcgctcgtcgtgtacatgaacaaggtcgaccaggtcgacgacgaggaaatcctcgagctcgtcgaactcgaagttcgcgaactgctgtcgtcgtacgacttcccgggcgacgatattccgatcgtcaagggttcggctctggccgctctcgaaggccgcgacgacaacatcggcaaggactcgatcaacgcgctcatggctgccgttgacgcgtacatcccgcagccgccgcgtccgaccgacaagcccttcctgatgcccgtcgaagacgtgttctcgatctcgggtcgcggcaccgtggtgaccggccgtatcgaaaccggcatcatcaaggtcggcgaagaagtcgagatcatcggtctgaaggacacccagaagaccaccgtgaccggcgtcgaaatgttccgcaagctgctcgaccagggcgaagccggcgacaacatcggtgcgctgatccgcggcatcaagcgtgaagaagtcgagcgtgggcaggttctcgccaagcccggttcggtgaccccgcacaccgaattctcggccgaggtctacgtgctgtcgaaggacgaaggtggccgtcacacgccgttcttcgccaactaccgcccgcagttctacttccgcaccaccgacgtcaccggtgaggtcgtcctccccgagggcaccgagatggtgatgccgggcgacaacgtcaccctggctgtcaagctgatcgctccgatcgcgatggacgaaggtctgcgcttcgcaattcgcgaaggcggccgcaccgtcggttcgggggttgtcagcaagatcacgaagtaa

SEQ ID NO: 27238 - protein, 396 aa, Novosphingobium aromaticivorans DSM 12444
MAKAKFERNKPHCNIGTIGHVDHGKTTLTAAITKVLAEQGGAEFTDYANIDKAPEERERGITISTAHVEYETANRHYAHVDCPGHADYVKNMITGAAQMDGAILVVNAADGPMPQTREHILLARQVGVPALVVYMNKVDQVDDEEILELVELEVRELLSSYDFPGDDIPIVKGSALAALEGRDDNIGKDSINALMAAVDAYIPQPPRPTDKPFLMPVEDVFSISGRGTVVTGRIETGIIKVGEEVEIIGLKDTQKTTVTGVEMFRKLLDQGEAGDNIGALIRGIKREEVERGQVLAKPGSVTPHTEFSAEVYVLSKDEGGRHTPFFANYRPQFYFRTTDVTGEVVLPEGTEMVMPGDNVTLAVKLIAPIAMDEGLRFAIREGGRTVGSGVVSKITK

SEQ ID NO: 27239 - DNA, 1182 bp, Anaplasma phagocytophilum HZ
  CDS (1)..(1182): transl_table=11
atgacagaaggaaggaagccgcatataaacgtagggacaatagggcacgtggatcacggtaagacaacgcttacagctgcgttaactactgttctggctagaaagctaagtggcgcgaacaaagtggtgaagtatgatgagatagacaaggcgccagaagaaaaggcaagaggaataacaatatcaacagcgcatgtggagtatgagactgaaggtagacactatgcgcatgtagactgtccggggcacgctgactacattaagaacatgattactggagcggcgcagatggatgttgcgatactggttgtgtcggcgacagacggagcgatgccgcaaactcgtgagcatatattgttggcgaagcaggttggtgtaaaagacatcgtggtgtggattaacaaatgcgatgtagttgaagatgaagaaatgttatcgctcgtggatatggagatacgcgagttattgagtcagtatggatatgatggtgattctatcgatgctgtaagagggtctgcggttaaggcattggaagaagatgctgatggtccttggagtgataagataatggaattggtaggtgctctggaaaagatagagctgccgatgagagagaaggacaagccgtttttgatgtctgtagaagacgtgttctctatacctggacgtggaacagtggttacaggaagaatagagagaggcgtagtaagagtcggagacaagatagatattgtaggtctgcgtgaattacaaagtacggtttgtactggagtagaaatgttccataaggcattggaagctggtgaagctggtgacaatgctgggatacttctcagaggtataaagaaggaagacgtagagagaggtcaagtactcagtgcgcctgggcaaatgaagtcatataagaagttcaaggcggaagtatacgtattgaagaaggaagagggaggaaggcatactccattctttgctaattaccaacctcagttctacgttagaactacggatgtaacaggaagcatatcgttacctgcgggtgtagaaatggttatgcctggagataatctaagtatagaggtagcgttggataagcctgttgcgatagataaggggcttaggtttgctgtgagagaaggtggaaggactgttggctcaggtattattactgagattttggagtag

SEQ ID NO: 27240 - protein, 393 aa, Anaplasma phagocytophilum HZ
MTEGRKPHINVGTIGHVDHGKTTLTAALTTVLARKLSGANKVVKYDEIDKAPEEKARGITISTAHVEYETEGRHYAHVDCPGHADYIKNMITGAAQMDVAILVVSATDGAMPQTREHILLAKQVGVKDIVVWINKCDVVEDEEMLSLVDMEIRELLSQYGYDGDSIDAVRGSAVKALEEDADGPWSDKIMELVGALEKIELPMREKDKPFLMSVEDVFSIPGRGTVVTGRIERGVVRVGDKIDIVGLRELQSTVCTGVEMFHKALEAGEAGDNAGILLRGIKKEDVERGQVLSAPGQMKSYKKFKAEVYVLKKEEGGRHTPFFANYQPQFYVRTTDVTGSISLPAGVEMVMPGDNLSIEVALDKPVAIDKGLRFAVREGGRTVGSGIITEILE

SEQ ID NO: 27241 - DNA, 1185 bp, Francisella tularensis subsp. holarctica
  CDS (1)..(1185): transl_table=11
atggctaaagaaaaatttgagcgttcgaagccgcatgtaaacgtaggtacaattggtcacgttgaccacggtaaaactactcttacagcagctattacaaaagttatggctgagaagaacggtggtatggcgcgtaaatttgatgagattgatagtgcgccagaagaaaaagcgcgtggtattactattaatacttctcacgttgagtacgagtctcctaatagacactatgctcacgtagactgtccaggacacgctgactacgttaagaacatgattactggtgctgcacagatggatggtgctattctagtatgttctgctgcggatggtcctatgccacaaactcgtgagcacattctgctttctcgtcaagttggtgtaccaaaaatcgttgttttcttaaacaagtgtgacatggttgatgatgaagagttattagagctagttgagatggaagttcgtgagcttttagatcagtatgagttcccaggtgatgacactccagttattatgggttcagctcttagagctattgaaggtgacgaagcttacgttgagaaaattgttgagctagttcaagctatggatgactatattcctgctcctgagcgtgatactgagaagccatttattcttccgatcgaagatgtattctcaatttcaggtcgtggtactgttgtaactggtcgtattgagcgcggtgtagttaacgttggtgatgaagttgaagttgttggtattcgtccaactcaaaaaactacagtaactggtgtggaaatgttccgtaagcttttagatagaggggaagctggtgataacgttggtatcctagttcgtggacttaagagagatgatgttgagcgtggacaagtattatgtaagccaggttcaattaagccacatactaagtttgaagctgaggtttatgtattatctaaagaagagggtggtagacatactccattcttcaagggatatagaccacaattctacttccgtactacagacattactggagctgttgagcttccagagggtgtagaaatggttatgcctggtgataacgttaagatgactatcactctaattaacccaatcgctatggatgaagggttacgttttgcaatccgtgagggtggtagaacagtaggtgctggtgttgtagctaaaattatcgagtaa

SEQ ID NO: 27242 - protein, 394 aa, Francisella tularensis subsp. holarctica
MAKEKFERSKPHVNVGTIGHVDHGKTTLTAAITKVMAEKNGGMARKFDEIDSAPEEKARGITINTSHVEYESPNRHYAHVDCPGHADYVKNMITGAAQMDGAILVCSAADGPMPQTREHILLSRQVGVPKIVVFLNKCDMVDDEELLELVEMEVRELLDQYEFPGDDTPVIMGSALRAIEGDEAYVEKIVELVQAMDDYIPAPERDTEKPFILPIEDVFSISGRGTVVTGRIERGVVNVGDEVEVVGIRPTQKTTVTGVEMFRKLLDRGEAGDNVGILVRGLKRDDVERGQVLCKPGSIKPHTKFEAEVYVLSKEEGGRHTPFFKGYRPQFYFRTTDITGAVELPEGVEMVMPGDNVKMTITLINPIAMDEGLRFAIREGGRTVGAGVVAKIIE

SEQ ID NO: 27243 - DNA, 1203 bp, Desulfitobacterium hafniense Y51
  CDS (1)..(1203): transl_table=11
atggcaaagcaaaaattcgaacgtactaaaccccacgttaacgttggcaccatcggtcacgttgaccatggtaaaaccacctctactgctgctatcaccttagttctttccaaagccggcggcgcagtagcccaagcattcgaccaaatcgacaaggctccggaagaaagagagcgtggaatcaccatctccacttctcacgttgagtatgaaaccgctaaccgccactatgctcacgttgactgcccaggccacgccgactatgttaaaaacatgatcaccggtgctgcccaaatggatggagctatcctggttgtatccgctgctgacggcccgatgccccaaacccgtgagcacatcctccttgcccgtcaagtaggtgttccttacatcgtggtttggctgaacaaagccgacatggtagatgatccggaactcatggaactggttgaaatggaaattcgtgaactcctctccgagtacgaattccctggcgatgatattcccatcattcccggttccggcctgaaagctctccaatgcggttgcggatcccgtgattgtgaatggtgcggcaagatctggaatctgatggatgctgttgactcctatattccaactccagagcgtgctaccgacaagcctttccttatgcctgtggaggacgtattcaccattaccggtcgtggtaccgttgctaccggtcgtgtcgagcgcggtgtgattaaagtcggtgacgagattgaaatcgttggtttgacagaagctcctcgcaaaaccgtttgcaccggcgtggaaatgttccgcaagctccttgaccaagctcaagcaggggacaacatcggagctcttctccgcggtgtggatcgtaaagatatcgaacgcggtcaagtacttgctaaaaccggttctattaaacctcacaccaaatttaccggcgaagttttcgtactgagcaaagaagaaggcggacgtcataccccattcttcaacaactaccgccctcagttctacttccgtacaaccgacgttaccggtgttgtaacccttcctgaaggaacggaaatggttatgcccggagaccgtgttaccatcacttgcgaaattatctcccctatcgctatggaagaaggacttcgtttcgctatccgtgaaggtggccgtactgttggagccggcgttgttgtcagcatcatcgaatag

SEQ ID NO: 27244 - protein, 400 aa, Desulfitobacterium hafniense Y51
MAKQKFERTKPHVNVGTIGHVDHGKTTSTAAITLVLSKAGGAVAQAFDQIDKAPEERERGITISTSHVEYETANRHYAHVDCPGHADYVKNMITGAAQMDGAILVVSAADGPMPQTREHILLARQVGVPYIVVWLNKADMVDDPELMELVEMEIRELLSEYEFPGDDIPIIPGSGLKALQCGCGSRDCEWCGKIWNLMDAVDSYIPTPERATDKPFLMPVEDVFTITGRGTVATGRVERGVIKVGDEIEIVGLTEAPRKTVCTGVEMFRKLLDQAQAGDNIGALLRGVDRKDIERGQVLAKTGSIKPHTKFTGEVFVLSKEEGGRHTPFFNNYRPQFYFRTTDVTGVVTLPEGTEMVMPGDRVTITCEIISPIAMEEGLRFAIREGGRTVGAGVVVSIIE

SEQ ID NO: 27245 - DNA, 1224 bp, Saccharophagus degradans 2-40
  CDS (1)..(1224): transl_table=11
gtggcaaaagaaaaatttgaacgtaataagccccacgtaaacgtgggcacaattggtcacgttgaccacggtaaaactactttgactgcagcgttaacgcgcgtgtgttcagaagtttggggtggtgctgcggtagcgtttgacggtatcgataatgctccagaagagcgtgagcgtggtattactatcgctacctctcacgtagagtacgattcaccgattcgtcactacgcccacgttgactgcccaggtcacgccgactacgtgaaaaacatgattactggtgccgctcagatggatggcgctatcttggtatgtggttctactgacggcccaatgcctcagactcgtgagcacatccttttgtctcgtcaggttggtgtaccttacatcgtagtattcttgaacaaagcagacttgctagcagaagactgtggcggtgttgactctgaagaatacgcagagatgatggaattggttgaaatggaattgcgtgagttgttagacacttacgaattcccaggcgacgacactccaatcattgctggttctgctttgatggcattgaacggcgaagacgagaacgagctaggtactaccgctgttaagaaattggtagaagctttggattcatacattccagagccagagcgtgcaattgatcagccgttcttgatgccagtagaagacgtattctcaatctctggtcgcggtactgttgtgactggtcgtgttgagcgcggtattgttaaagttggtgaagaattggaaatcgttggtattcgcgataccaccaaaactacctgtactggtgttgaaatgttccgtaagttgcttgacgaaggtcgtgcaggtgagaacgttggtgtattgttgcgtggtactaagcgtgatgatgttgagcgtggtcaagtattgtctaagccaggttctgttactccgcacactactttccaatcagaaatctacgtattgtctaaagatgaaggtggtcgtcacactccattcttcaaaggctaccgtccacagttctacttccgtacaactgacgtaactggtgcttgtgagcttccagaaggcgtagaaatggtaatgccaggtgataacgtacaaatgactgttactttgatcgctccaatcgcgatggaagaaggtttgcgcttcgctatccgcgaaggtggccgtacagttggtgctggtgttgttgctaaaatcatcgcttaa

SEQ ID NO: 27246 - protein, 407 aa, Saccharophagus degradans 2-40
MAKEKFERNKPHVNVGTIGHVDHGKTTLTAALTRVCSEVWGGAAVAFDGIDNAPEERERGITIATSHVEYDSPIRHYAHVDCPGHADYVKNMITGAAQMDGAILVCGSTDGPMPQTREHILLSRQVGVPYIVVFLNKADLLAEDCGGVDSEEYAEMMELVEMELRELLDTYEFPGDDTPIIAGSALMALNGEDENELGTTAVKKLVEALDSYIPEPERAIDQPFLMPVEDVFSISGRGTVVTGRVERGIVKVGEELEIVGIRDTTKTTCTGVEMFRKLLDEGRAGENVGVLLRGTKRDDVERGQVLSKPGSVTPHTTFQSEIYVLSKDEGGRHTPFFKGYRPQFYFRTTDVTGACELPEGVEMVMPGDNVQMTVTLIAPIAMEEGLRFAIREGGRTVGAGVVAKIIA

SEQ ID NO: 27247 - DNA, 1191 bp, Methylobacillus flagellatus KT
  CDS (1)..(1191): transl_table=11
atggcaaaaggaaaatttgagcggacgaagccgcacgtcaacgtaggcacgattggtcacgttgaccatggtaagacaacattgacagctgcgatcaccaccgtattgaccaagaaatttggtggcgaagccaaggactactcccagatcgacaacgcgccggaagaaaaggcccgtggcatcaccatcaacacctctcacgtagaatacgaaaccgaaacccgtcactacgcccacgttgactgcccaggccacgccgactacgtcaagaacatgatcactggagctgcccaaatggacggcgccatcctcgttgtatccgctgcagacggccccatgccgcaaacccgcgaacacatcctgctggcccgccaagtgggcgtgccctacatcatcgtcttcctgaacaaggcagacatggttgacgacgcagaactgctcgaactggttgaaatggaagtgcgagaactcctctccaaatacgatttccccggagacgacacccccatcatcaaaggctccgccaagcttgcccttgaaggcgaccaatccgacatcggcgaaccagccatcttccgtttggcagaagccctggacacctacatccccacaccggaacgtgctgttgacggcaccttcctcatgccagtagaagacgtattctccatctctggccgtggtaccgtcgtgaccggtcgagtagagcgcggcatcgtcaaagttggtgacgaaatcgaaattgtcggcctcaagcccaccatcaaaaccacctgtaccggcgtcgaaatgttccgcaaactgctcgaccaaggtcaagcaggtgacaacgttggcgtactcctgcgtggcaccaaacgtgaagaagttgaacgtggccaagtcctcgccaaagtgggctccatcaagccgcacaccaaattcacagctgaaatctacgttctgggcaaagatgaaggtggtcgtcacaccccattcttcaacggctaccgtccccagttctacttccgtaccaccgacgtgacaggtgctgtagaactgccggcaggaaccgaaatggtcatgcctggcgacaacgtctccatctccgtctccctgattgcgccgatcgcgatggaagaaggcctgcgcttcgcgattcgtgaaggtggtcgtaccgtcggtgccggtgtcgtcgctaaaattattgagtaa

SEQ ID NO: 27248 - protein, 396 aa, Methylobacillus flagellatus KT
MAKGKFERTKPHVNVGTIGHVDHGKTTLTAAITTVLTKKFGGEAKDYSQIDNAPEEKARGITINTSHVEYETETRHYAHVDCPGHADYVKNMITGAAQMDGAILVVSAADGPMPQTREHILLARQVGVPYIIVFLNKADMVDDAELLELVEMEVRELLSKYDFPGDDTPIIKGSAKLALEGDQSDIGEPAIFRLAEALDTYIPTPERAVDGTFLMPVEDVFSISGRGTVVTGRVERGIVKVGDEIEIVGLKPTIKTTCTGVEMFRKLLDQGQAGDNVGVLLRGTKREEVERGQVLAKVGSIKPHTKFTAEIYVLGKDEGGRHTPFFNGYRPQFYFRTTDVTGAVELPAGTEMVMPGDNVSISVSLIAPIAMEEGLRFAIREGGRTVGAGVVAKIIE

SEQ ID NO: 27249 - DNA, 1191 bp, Methylobacillus flagellatus KT
  CDS (1)..(1191): transl_table=11
atggcaaaaggaaaatttgagcggacgaagccgcacgtcaacgtaggcacgattggtcacgttgaccatggtaagacaacattgacagctgcgatcaccaccgtattgaccaagaaatttggtggcgaagccaaggactactcccagatcgacaacgcaccggaagaaagggcccgtggcatcaccatcaacacctctcacgtagaatacgaaaccgaaacccgtcactacgcccacgttgactgcccaggccacgccgactacgtcaagaacatgatcactggagctgcccaaatggacggcgccatcctcgtcgtatccgctgcagacggccccatgccacaaacccgcgaacacatcctgctggcccgccaagtgggcgtgccctacatcatcgtcttcctgaacaaggcagacatggttgacgacgcagaactgctcgaactggttgaaatggaagtgcgagaactcctctccaaatacgacttccctggagatgacacccccatcatcaaaggctccgccaagcttgccctcgaaggcgaccaatccgacatcggcgaaccagccatcttccgtttggcagaagccctggacacctacatccccacaccggaacgtgctgttgacggcaccttcctcatgccagtagaagacgtattctccatttctggccgtggtaccgtcgtgaccggtcgagtagagcgcggcatcgtcaaagttggtgacgaaatcgaaattgtcggcctcaagcccaccatcaaaaccacctgtaccggcgtcgaaatgttccgcaaactgctcgaccaaggtcaagcaggtgacaacgttggcgtactcctgcgtggcaccaagcgtgaagaagttgaacgtggccaagtcctcgccaaagtgggctccatcaagccgcacaccaaattcacagccgaaatctacgttctgggcaaagatgaaggtggtcgtcacaccccattcttcaacggctaccgtccccagttctacttccgtaccaccgacgtgacaggtgctgtagaactgccggcaggaaccgaaatggtcatgcctggcgacaacgtctccatctccgtctccctgattgcgccgatcgcgatggaagaaggcctgcgcttcgcgattcgtgaaggtggtcgtaccgtcggtgccggtgtcgtcgctaaaattattgagtaa

SEQ ID NO: 27250 - protein, 396 aa, Methylobacillus flagellatus KT
MAKGKFERTKPHVNVGTIGHVDHGKTTLTAAITTVLTKKFGGEAKDYSQIDNAPEERARGITINTSHVEYETETRHYAHVDCPGHADYVKNMITGAAQMDGAILVVSAADGPMPQTREHILLARQVGVPYIIVFLNKADMVDDAELLELVEMEVRELLSKYDFPGDDTPIIKGSAKLALEGDQSDIGEPAIFRLAEALDTYIPTPERAVDGTFLMPVEDVFSISGRGTVVTGRVERGIVKVGDEIEIVGLKPTIKTTCTGVEMFRKLLDQGQAGDNVGVLLRGTKREEVERGQVLAKVGSIKPHTKFTAEIYVLGKDEGGRHTPFFNGYRPQFYFRTTDVTGAVELPAGTEMVMPGDNVSISVSLIAPIAMEEGLRFAIREGGRTVGAGVVAKIIE

SEQ ID NO: 27251 - DNA, 1191 bp, Burkholderia xenovorans LB400
  CDS (1)..(1191): transl_table=11
atggctaaaggtaaattcgaacggaccaagccgcacgtgaacgtcggcacgatcggtcacgttgaccacggcaagaccacgctgacggcagcgatcacgacggttctgacgcagaagtttggcggcgaagcgaaggcatacgaccagatcgacgcggcgccggaagagaaggcgcgtggtatcacgatcaacacggcacacgtcgagtacgaaacggctaaccgccactacgcacacgtcgactgcccgggccacgctgactatgtgaagaacatgatcacgggcgcagcgcagatggacggcgcgatcctggtgtgctcggccgctgacggcccgatgccgcaaacgcgcgagcacatcctgctggcgcgtcaggttggcgtgccgtacatcatcgtgttcctgaacaagtgcgacatggtggacgacgctgagctgctggagctggtcgagatggaagttcgcgaacttctgtcgaagtacgacttcccgggcgacgagacgccgatcatcaagggttcggcgaagctggcgctggaaggcgacaagggcgagctgggcgaagtggcgatcatgaatctggccgacgcgctggacacgtacatcccgacgccggagcgcgcagttgacggtgcgttcctgatgccggtggaagacgtgttctcgatctcgggtcgcggtacggtggtgacgggtcgcgttgagcgcggcgtcgtgaaggtcggcgaggaaatcgaaattgtcggtatcaagccgacggtgaagacgacctgcacgggcgtggaaatgttccgcaagctgctcgatcaaggtcaggcgggcgacaacgtgggtatcctgctgcgcggcacgaagcgtgaagacgtggagcgtggccaggtgctggccaagccgggttcgatcaacccgcacacgcacttcacggctgaagtgtacgtgctgagcaaggacgaaggtggccgtcacacgccgttcttcaacaactatcgtccgcagttctacttccgtacgacggacgtgacgggctcgatcgagttgccgaaggacaaggaaatggtcatgccgggcgacaacgtgtcgatcacggtgaagctgatcaacccgatcgcgatggaagaaggtctgcgtttcgcaatccgcgaaggcggccgtacggtcggcgcaggtgtggttgccaagattctcgagtaa

SEQ ID NO: 27252 - protein, 396 aa, Burkholderia xenovorans LB400
MAKGKFERTKPHVNVGTIGHVDHGKTTLTAAITTVLTQKFGGEAKAYDQIDAAPEEKARGITINTAHVEYETANRHYAHVDCPGHADYVKNMITGAAQMDGAILVCSAADGPMPQTREHILLARQVGVPYIIVFLNKCDMVDDAELLELVEMEVRELLSKYDFPGDETPIIKGSAKLALEGDKGELGEVAIMNLADALDTYIPTPERAVDGAFLMPVEDVFSISGRGTVVTGRVERGVVKVGEEIEIVGIKPTVKTTCTGVEMFRKLLDQGQAGDNVGILLRGTKREDVERGQVLAKPGSINPHTHFTAEVYVLSKDEGGRHTPFFNNYRPQFYFRTTDVTGSIELPKDKEMVMPGDNVSITVKLINPIAMEEGLRFAIREGGRTVGAGVVAKILE

SEQ ID NO: 27253 - DNA, 1191 bp, Ralstonia metallidurans CH34
  CDS (1)..(1191): transl_table=11
atggcaaaggaaaagttcgagcggaccaagccgcacgtgaacgtaggtacgattggtcacgttgaccacggcaagacgacgctgacggcagcgattgccacggtgctggcagccaagttcggtggcgcagccaagaagtacgacgaaatcgacgcagcgccggaagagaaggcacgcggcatcacgatcaacaccgcgcacgtggaatacgagacggccaaccgtcactacgcccacgttgactgcccgggccacgctgactatgtgaagaacatgatcacgggcgctgcgcagatggacggcgcgattctggtgtgctcggccgctgacggcccgatgccgcagacgcgtgagcacatcctgctggcccgtcaggttggcgtgccgtacatcatcgtgttcctgaacaagtgcgacatggtggacgacgccgagctgctcgagctggtggaaatggaagtgcgcgagctgctgtcgaagtacgaattcccgggcgacgacacgccgatcatcaagggttcggccaagctggcgctggaaggcgacaagggcgaactgggtgaagtggcgatcatgaacctggccgacgcgctggacacgtacatcccgacgccggagcgcgctgtggacggtacgttcctgatgccggtggaagacgtgttctcgatctcgggccgcggtaccgtggtgaccggtcgtatcgagcgtggcgtgatcaaggtcggtgaagaaatcgaaatcgtgggtatccgcccgacggtgaagacgacttgcacgggcgtggaaatgttccgcaagctgctggatcaaggccaggctggtgacaacgttggtctgctgctgcgcggcacgaagcgcgaagacgtggagcgtggtcaagttctgtgcaagccgggctcgatcaagccgcacacgcacttcacgggtgaggtgtacattctgtcgaaggacgaaggtggtcgtcacacgccgttcttcaacaactaccgcccgcagttctatttccgtacgaccgacgtgaccggctcgatcgagctgccgcaggacaaggaaatggtgatgccgggtgacaacgtgtcgatcactgtcaagctgatcgccccgatcgccatggaagaaggtctgcgcttcgctatccgcgaaggtggccgtaccgtcggcgccggcgttgtggcaaagatcctcgactaa

SEQ ID NO: 27254 - protein, 396 aa, Ralstonia metallidurans CH34
MAKEKFERTKPHVNVGTIGHVDHGKTTLTAAIATVLAAKFGGAAKKYDEIDAAPEEKARGITINTAHVEYETANRHYAHVDCPGHADYVKNMITGAAQMDGAILVCSAADGPMPQTREHILLARQVGVPYIIVFLNKCDMVDDAELLELVEMEVRELLSKYEFPGDDTPIIKGSAKLALEGDKGELGEVAIMNLADALDTYIPTPERAVDGTFLMPVEDVFSISGRGTVVTGRIERGVIKVGEEIEIVGIRPTVKTTCTGVEMFRKLLDQGQAGDNVGLLLRGTKREDVERGQVLCKPGSIKPHTHFTGEVYILSKDEGGRHTPFFNNYRPQFYFRTTDVTGSIELPQDKEMVMPGDNVSITVKLIAPIAMEEGLRFAIREGGRTVGAGVVAKILD

SEQ ID NO: 27255 - DNA, 1176 bp, Silicibacter sp. TM1040
  CDS (1)..(1176): transl_table=11
atggctaaggaaaagtttgaacgtaataaaccgcacgtcaacatcggcaccgttggccacgttgaccacggtaaaaccacgctgaccgcagcaatcaccaaatacttcggcgacttcaaggcatacgaccagatcgatggcgcgccggaagaaaaagcgcgtggtatcaccatctccaccgcccacgtggaatacgaaaccgaaggccgtcactacgcacacgtcgactgccccggccacgctgactatgtgaaaaacatgatcaccggtgcggcgcagatggacggcgcgatcctggttgtgaacgcagccgacggcccgatgccccagacccgcgagcacatcctgctggcgcgtcaggttggcgttcccgcgctggtcgtgttcatgaacaaagtggaccaggtcgacgacgaagagctgctcgagctcgtcgagatggaaatccgcgaattgctgtcgtcctacgacttccccggcgacgatatcccgatcatcgcaggttccgctctggcggcgatggaaggccgtgacccggaaatcggcgaaaacaagatcaaggaactgatggcggctgtggatgagtacatcccgacccccgagcgcgctgttgaccagccgttcctgatgccgatcgaagacgtgttctcgatctctggccgtggtaccgttgtgaccggtcgtgttgagcgtggcgtgatcaatgttggcgacaacatcgaaatcgttggcatcaaagacaccaccaccaccacctgtaccggtgtggaaatgttccgcaagctgctggaccgcggtgaagcaggcgacaacatcggcgccctgctgcgtggtatcgaccgtgaagcggttgagcgtggccaggttctgtgtaagccgggctccgtgaccccgcacaccaaattcgaggcagaagcttatattctgaccaaagaagaaggtggccgtcacaccccgttctttgcgaactaccgtccgcagttctacttccgcaccaccgacgtgaccggcaccgtgaccctgccggaaggcaccgaaatggtgatgccgggcgacaacctgaagttcgaagttgaactgatcgccccgatcgcaatggaagacggtctgcgtttcgcgatccgcgaaggcggccgcaccgttggcgcgggcgttgtgtccaagatcctcgcgtaa

SEQ ID NO: 27256 - protein, 391 aa, Silicibacter sp. TM1040
MAKEKFERNKPHVNIGTVGHVDHGKTTLTAAITKYFGDFKAYDQIDGAPEEKARGITISTAHVEYETEGRHYAHVDCPGHADYVKNMITGAAQMDGAILVVNAADGPMPQTREHILLARQVGVPALVVFMNKVDQVDDEELLELVEMEIRELLSSYDFPGDDIPIIAGSALAAMEGRDPEIGENKIKELMAAVDEYIPTPERAVDQPFLMPIEDVFSISGRGTVVTGRVERGVINVGDNIEIVGIKDTTTTTCTGVEMFRKLLDRGEAGDNIGALLRGIDREAVERGQVLCKPGSVTPHTKFEAEAYILTKEEGGRHTPFFANYRPQFYFRTTDVTGTVTLPEGTEMVMPGDNLKFEVELIAPIAMEDGLRFAIREGGRTVGAGVVSKILA

SEQ ID NO: 27257 - DNA, 1191 bp, Myxococcus xanthus DK 1622
  CDS (1)..(1191): transl_table=11
atggccaaggagaagttcgagcgtaacaagccccacgtgaacatcggcacgatcggacacgtggaccacggcaagacgtcgctgacggccgccatcaccaaggtgctggcgaagacgggcggcgccacgttcctggcgtacgacctgattgacaaggcgccggaggagcgtgagcgcggtatcacgatttccacctcgcacgtggagtaccagacgtcgaaccggcactacgcccacgtcgactgtccgggccacgccgactacgtgaagaacatgatcacgggcgcggcgcagatggacggcgccatcctggtggtgtcggcggcggacggcccgatgccgcagacgcgtgagcacatcctgctggcgcgccaggtcggcgttccgtacatcgtggtcttcctgaacaaggtggacatgctggacgaccccgagctgcgcgagctcgtggagatggaagtccgcgacctgctgaagaagtacgagttccctggcgatgacatccccatcatcccgggctcggcgctgaaggcgctggagggtgacaccagcgacatcggcgagccggccatcctgaagctgatggaggcggtggacagctacatcccgacgccgcagcgcgcgacggacaagcccttcctgatgccggtggaggacgtgttctccatctccggccgcggcacggtggccacgggccgcgtcgagcgcggtatcatcaaggtcggcgaggaagtggaagtcgttggtctgcgcccgacgcagaagacggtcgtcacgggcgtggagatgttccgcaagctgctggaccagggcatggcgggcgacaacatcggcgcgctggtgcgcggcctgaagcgcgaggacatggagcgcggccaggtgctggccaagccgggcagcatcaccccgcacaccaagttcaaggcgcagatctacgtgctgtcgaaggaagagggcggtcgtcacaccccgttcttcaagggctaccgcccgcagttctacttccgcaccacggacgtgacgggctcggtgaagctgccggagaacgtcgaaatggtgatgccgggcgacaacatcgccatcgaggtggagctcatcacccccgtggccatggagaaggagctgcgcttcgctgttcgcgagggtggccgcaccgtgggcgccggcgtcgtggcggaaatcatcgagtaa

SEQ ID NO: 27258 - protein, 396 aa, Myxococcus xanthus DK 1622
MAKEKFERNKPHVNIGTIGHVDHGKTSLTAAITKVLAKTGGATFLAYDLIDKAPEERERGITISTSHVEYQTSNRHYAHVDCPGHADYVKNMITGAAQMDGAILVVSAADGPMPQTREHILLARQVGVPYIVVFLNKVDMLDDPELRELVEMEVRDLLKKYEFPGDDIPIIPGSALKALEGDTSDIGEPAILKLMEAVDSYIPTPQRATDKPFLMPVEDVFSISGRGTVATGRVERGIIKVGEEVEVVGLRPTQKTVVTGVEMFRKLLDQGMAGDNIGALVRGLKREDMERGQVLAKPGSITPHTKFKAQIYVLSKEEGGRHTPFFKGYRPQFYFRTTDVTGSVKLPENVEMVMPGDNIAIEVELITPVAMEKELRFAVREGGRTVGAGVVAEIIE

SEQ ID NO: 27259 - DNA, 1230 bp, Helicosporidium sp. ex Simulium jonesii
  CDS (1)..(1230): transl_table=11
atggcacgtgaaaaatttgaacgtataaaaccacatatcaatattggtacaataggacatgtagatcatggtaaaactacattaacagctgctataactatggcattagcaagcataggaaatactaaaggaaaaaattatgctgatattgattcagctcctgaagaaaaagcacgaggaattactataaatacaacacatgttgaatatgaaacagctaagcgccattatgcccatgtagattgtccaggacatgccgactatattaaaaatatgattacaggagctgctcaaatggatggtgctattttagtagtttcaggagctgatggtccaatgcctcaaactcgagaacatatagtattagctaagcaagtaggtgtaccttctatggtagtttttattaataaagaaggtcaagtagatgatccagaaattttagagcttgtagaattagaagttagagatcttctaacaagttacaaatttgaaggagaagaggtacctgtaataacaggttctgctcttttagctttagaagcctttataaaaaatccaaaaatattaaaaggagaaaatccttgggtcgacaaaatatataatttaatggatagtgttgattcatatatacctacaccagttcgtgaaattgataaaccctttttaatggctatagaagacgtcttttctataagtggtcgtggaacagtagctacaggacgcatagagcgtggtaaaataaaaatgggagattctattgaaattattggagggtctttaagaaaaacaactacagtaacaggaatagaaatgtttcaaaaaacattaactgatggtgtagctggcgataatgtaggtattttaatgcgcgggattcaaaaaaaagaaattgaacgaggaatggtattaactaagcctaaatcaatagatccattaacaagttttgaagcacaagtttatttattaactaaagaagaaggaggacgttctaaaggctttacaataggttatagacctcagttttatgttcgtactacagatgtaacaggggctattttaaatatgcttagtgatgataatacaccattaaaaatagcatcacctggagatagaataacaatgtcagttaaacttattcaaccaatcgctcttgaaaaaaatatgagatttgctatacgtgaaggaggtaaaacagtaggagctggagtagtctcaaaattaattaattaa

SEQ ID NO: 27260 - protein, 409 aa, Helicosporidium sp. ex Simulium jonesii
MAREKFERIKPHINIGTIGHVDHGKTTLTAAITMALASIGNTKGKNYADIDSAPEEKARGITINTTHVEYETAKRHYAHVDCPGHADYIKNMITGAAQMDGAILVVSGADGPMPQTREHIVLAKQVGVPSMVVFINKEGQVDDPEILELVELEVRDLLTSYKFEGEEVPVITGSALLALEAFIKNPKILKGENPWVDKIYNLMDSVDSYIPTPVREIDKPFLMAIEDVFSISGRGTVATGRIERGKIKMGDSIEIIGGSLRKTTTVTGIEMFQKTLTDGVAGDNVGILMRGIQKKEIERGMVLTKPKSIDPLTSFEAQVYLLTKEEGGRSKGFTIGYRPQFYVRTTDVTGAILNMLSDDNTPLKIASPGDRITMSVKLIQPIALEKNMRFAIREGGKTVGAGVVSKLIN

SEQ ID NO: 27261 - DNA, 1176 bp, Mesorhizobium sp. BNC1
  CDS (1)..(1176): transl_table=11
atggccaaaggtaaatttgagcgcacgaagccgcatgtgaacatcgggacgattggtcacgtcgaccatgggaagacgtctctgacggccgcgatcacgaagtatttcggtgagttcaaggcttacgatcagattgacgcggcgcctgaggaaaaggcgcgcggcatcacgatctcgacggcgcatgtggaatacgagacggagaaccggcactacgcgcatgtggactgccccggccacgcggactatgtgaagaacatgatcacgggcgcggcgcagatggacggcgcgatcctggttgtttcggccgccgacggcccgatgccgcagacgcgcgagcacattcttcttgcgcgccaggttggcgttccggcgatcgtggtgttcctgaacaaggttgaccaggtggacgacccggagcttctggagctggtggagctggagatccgcgagcttctgtcgaaatacgagttcccgggcgacgacattccgatcgtcaagggctcggcgcttgcggcgcttgaggattcgaacaaggagatcggcgaggacgcggtgcgccagctgatggccgaggtcgacaagtacatcccgacgccggagcgtccgatcgaccagccgttcctgatgcctatcgaggacgtgttctcgatttcgggccgcggcacggtggtgacggggcgcgttgagcgcggcgttgtgaaggtgggcgaggaagtcgagatcgtcggcatccgtccgacctcgaagacgacggtgacgggcgtggagatgttccgcaagctgctcgaccaggggcaggcgggcgacaatatcggcgcgcttttgcgcggcatcgaccgtgagggcgtcgagcgcgggcaggttcttgccaagccgggctcggtgaccccgcacacgaagttcaaggccgaggcctatatcctgaccaaggaggagggcgggcgccacacgccgttcttcaccaactaccggccgcaattctatttccgcacgacggacgtgacgggcgtcgtgacgctgccggaaggcacggagatggtgatgccgggcgacaatgtgacgatggacgtgacgctgatcgtgccgatcgccatggaggagcgcctgcgcttcgccatccgcgaaggcggccgcaccgtcggggccggcatcgtcgccagcatcacagagtaa

SEQ ID NO: 27262 - protein, 391 aa, Mesorhizobium sp. BNC1
MAKGKFERTKPHVNIGTIGHVDHGKTSLTAAITKYFGEFKAYDQIDAAPEEKARGITISTAHVEYETENRHYAHVDCPGHADYVKNMITGAAQMDGAILVVSAADGPMPQTREHILLARQVGVPAIVVFLNKVDQVDDPELLELVELEIRELLSKYEFPGDDIPIVKGSALAALEDSNKEIGEDAVRQLMAEVDKYIPTPERPIDQPFLMPIEDVFSISGRGTVVTGRVERGVVKVGEEVEIVGIRPTSKTTVTGVEMFRKLLDQGQAGDNIGALLRGIDREGVERGQVLAKPGSVTPHTKFKAEAYILTKEEGGRHTPFFTNYRPQFYFRTTDVTGVVTLPEGTEMVMPGDNVTMDVTLIVPIAMEERLRFAIREGGRTVGAGIVASITE

SEQ ID NO: 27263 - DNA, 1185 bp, Haemophilus somnus 129PT
  CDS (1)..(1185): transl_table=11
gtgtctaaagaaaaatttgaacgtacaaaaccgcacgtaaacgtgggtacaatcggccacgttgaccacggtaaaacaactttaacagcagcgatcacgactgtattatccaaacactttggtggtgcggcacgtgcatttgaccaaattgataacgcaccggaagagaaagcacgtggtatcactatcaacacttcacacgttgaatatgatacagcgacacgtcactacgcacacgttgactgtccgggacatgctgactatgtaaaaaatatgattacaggtgcggcacaaatggacggagctattttagtggtagcggcaacagacggtccaatgccacaaactcgtgagcacatcttattaggtcgtcaggtgggtgtaccgtacatcatcgtattcttaaacaaatgcgacatggtagatgacgaagaattattggaattggttgagatggaagtacgtgaattactttctcaatacgacttcccgggcgatgacacaccaattgtacgtggttcagcattacaagcattaaatggagttgctgagtgggaagaaaaaattcttgaattagcatctcacttagacaactatattccggagcctgagcgtgcgattgaccaaccgttcttattaccgattgaagatgttttctcaatttcaggacgtggtacagtagtaaccggacgtgtagagcgtggtattattcgtactggtgaagaagttgaaattgtcggtattaaagagacaacaaaaaccacagtaacgggtgtagaaatgttccgtaaattattagacgaaggtcgtgcgggagaaaacattggagcgttattacgtggaacaaaacgtgaagaaattgaacgtggtcaagtattagcgaaacctggttcaattacaccgcacacagactttgaatcggaagtgtatgtgttgtcaaaagaggaaggaggacgtcatacaccattcttcaaaggttaccgtccacaattctatttccgtactactgacgtaactggtacaattgaattaccggaaggtgttgaaatggtcatgcctggcgataacatcaaaatgacagtaagcttaattcacccgattgcgatggaccaagggttacgttttgcgattcgtgaaggtggacgtactgtaggtgcgggtgttgttgctaagattattaagtaa

SEQ ID NO: 27264 - protein, 394 aa, Haemophilus somnus 129PT
MSKEKFERTKPHVNVGTIGHVDHGKTTLTAAITTVLSKHFGGAARAFDQIDNAPEEKARGITINTSHVEYDTATRHYAHVDCPGHADYVKNMITGAAQMDGAILVVAATDGPMPQTREHILLGRQVGVPYIIVFLNKCDMVDDEELLELVEMEVRELLSQYDFPGDDTPIVRGSALQALNGVAEWEEKILELASHLDNYIPEPERAIDQPFLLPIEDVFSISGRGTVVTGRVERGIIRTGEEVEIVGIKETTKTTVTGVEMFRKLLDEGRAGENIGALLRGTKREEIERGQVLAKPGSITPHTDFESEVYVLSKEEGGRHTPFFKGYRPQFYFRTTDVTGTIELPEGVEMVMPGDNIKMTVSLIHPIAMDQGLRFAIREGGRTVGAGVVAKIIK

SEQ ID NO: 27265 - DNA, 1230 bp, Trichodesmium erythraeum IMS101
  CDS (1)..(1230): transl_table=11
atggcacgtgcaaaatttgaaagaaataaacctcatgtcaatattggaactattggccatgtagaccacggtaaaacaaccttaactgctgcaattacaatgagtctagcagcgcaaggaaaggctaaggcaagaaattatgcagatattgatgcagctccagaagagaaagcacggggtatcacaattaatactgctcatgtagagtatgaaacagaaggacgtcactatgctcatgtagattgtccaggacatgctgactacgtaaaaaatatgattacaggtgcagctcaaatggatggtgcaattctagtagtttcagctgcagatggcccaatgccccaaactcgtgagcatattctgttagcaaaacaagtgggggttcctaatatagttatcttccttaacaagcaagatatggtagatgatgaagaacttttagaactagtggaactggaagttagggaacttttaagcgactatgattttgatggagataatattcctatcgtggctggttctgctttacaggcagtagaagcactaacagcaaacccaggaataggaaagggagaaaatgaatgggtagataaaattctctctctgatggatgaagttgatgggtacattcctcaaccagaacgtgatgttgataagccattcttaatggcggtagaagacgtattttctattacgggtcgcggtactgtagctacaggacggattgaacgtggtaagataaaagttggggaaactgtagaattggttggaattaaagatactcgcaatagtactgttacaggtgtggaaatgttccagaaaattctggacgaaggaatggctggagataatgtaggattactactacgtggtatgcagaaagatgatatccaacgtggtatggttttagctaaatcaggttctattactccccataagaagtttgagtcagaagtatatgttctcaaaaaggaggaaggaggccgtcatacacctttcttcccaaattatcgccctcaattctatattcggacaacagatgtgactggtgctattgagtcttttactgctgatgatggtagtgtggcagagatggtcatgcctggtgacaggattaaaatgacagttcaactaatcaatccagtggccattgaacaaggtatgcgttttgccattcgtgaaggtgggagaactattggcgctggtgttgtctctaagattgtagagtag

SEQ ID NO: 27266 - protein, 409 aa, Trichodesmium erythraeum IMS101
MARAKFERNKPHVNIGTIGHVDHGKTTLTAAITMSLAAQGKAKARNYADIDAAPEEKARGITINTAHVEYETEGRHYAHVDCPGHADYVKNMITGAAQMDGAILVVSAADGPMPQTREHILLAKQVGVPNIVIFLNKQDMVDDEELLELVELEVRELLSDYDFDGDNIPIVAGSALQAVEALTANPGIGKGENEWVDKILSLMDEVDGYIPQPERDVDKPFLMAVEDVFSITGRGTVATGRIERGKIKVGETVELVGIKDTRNSTVTGVEMFQKILDEGMAGDNVGLLLRGMQKDDIQRGMVLAKSGSITPHKKFESEVYVLKKEEGGRHTPFFPNYRPQFYIRTTDVTGAIESFTADDGSVAEMVMPGDRIKMTVQLINPVAIEQGMRFAIREGGRTIGAGVVSKIVE

SEQ ID NO: 27267 - DNA, 1185 bp, Shewanella sp. MR-4
  CDS (1)..(1185): transl_table=11
atggcaaaagctaaatttgaacgtaataagccccatgttaacgtgggcaccatcggtcacgttgaccatggtaaaaccactctgactgcagctatctctcacgtactggctaagacctacggtggtgaagctaaagacttctctcaaatcgataacgctccagaagagcgtgagcgcggtattaccatcaatacctctcacatcgaatacgatactccaactcgccactacgcacacgtagactgcccaggccacgctgactatgttaaaaacatgatcactggtgctgcacagatggacggcgcgatcctggtagtagcttctactgacggtccaatgccacaaactcgtgagcacatcctgctgtctcgccaagtaggcgtaccattcatcatcgtattcatgaacaagtgtgacatggttgacgatgctgaactgttagaattagtagaaatggaagtacgtgaactgttatcagaatacgacttcccaggtgatgacttaccagttatccaaggttctgctctgaaagcgctagaaggcgagccagagtgggaagctaagatcatcgaattagcagaagcactggattcttacattccagaaccagagcgtgatatcgataagccattcctgatgccaatcgaagacgtattctcaatctctggccgtggtacagtagtaactggtcgtgttgagcgtggtatcgtacgtgttggtgacgaagtagaaatcgttggtatccgtgcaaccactaagacaacctgtactggtgttgaaatgttccgtaagctgcttgacgaaggtcgtgcaggtgagaactgtggtatcctgttacgtggtactaagcgtgatgacgtagaacgtggtcaagtattatctaagccaggctcaatcaacccacacactacttttgaatcagaagtatacgttctgtcaaaagaagaaggtggtcgtcacactccattcttcaaaggctaccgtccacagttctacttccgtacaactgacgtgactggaactatcgaactgccagaaggcgtagagatggtaatgccaggcgacaacatcaagatgaaagtcaccctgatctgcccaatcgcgatggacgaaggtttacgcttcgcaatccgtgaaggtggccgtacagtcggtgcaggtgttgtagctaagattttcgcttaa

SEQ ID NO: 27268 - protein, 394 aa, Shewanella sp. MR-4
MAKAKFERNKPHVNVGTIGHVDHGKTTLTAAISHVLAKTYGGEAKDFSQIDNAPEERERGITINTSHIEYDTPTRHYAHVDCPGHADYVKNMITGAAQMDGAILVVASTDGPMPQTREHILLSRQVGVPFIIVFMNKCDMVDDAELLELVEMEVRELLSEYDFPGDDLPVIQGSALKALEGEPEWEAKIIELAEALDSYIPEPERDIDKPFLMPIEDVFSISGRGTVVTGRVERGIVRVGDEVEIVGIRATTKTTCTGVEMFRKLLDEGRAGENCGILLRGTKRDDVERGQVLSKPGSINPHTTFESEVYVLSKEEGGRHTPFFKGYRPQFYFRTTDVTGTIELPEGVEMVMPGDNIKMKVTLICPIAMDEGLRFAIREGGRTVGAGVVAKIFA

SEQ ID NO: 27269 - DNA, 1185 bp, Shewanella sp. MR-4
  CDS (1)..(1185): transl_table=11
gtggcaaaagctaaatttgaacgtaataagcctcacgtaaacgtgggcaccatcggtcacgttgaccatggtaaaaccactctgactgcagctatctctcacgtactggctaagacctacggtggtgaagctaaagacttctctcaaatcgataacgctccagaagagcgtgagcgcggtattaccatcaatacctctcacatcgaatacgatacaccaactcgtcactacgcacacgtagactgcccaggccacgctgactatgttaaaaacatgatcactggtgctgcacagatggacggcgcgatcctggtagtagcttctactgacggtccaatgccacaaactcgtgagcacatcctgctgtctcgccaagtaggcgtacctttcatcatcgtattcatgaacaagtgtgacatggttgacgatgctgaactgttagaattagtagaaatggaagtacgtgaactgttatcagaatacgacttcccaggtgatgacttaccagttatccaaggttctgctctgaaagcgctagaaggcgagccagagtgggaagctaagatcatcgaattagcagcggcactggattcttacattccagaaccagagcgtgatatcgataagccattcctgatgccaatcgaagacgtattctcaatctctggccgtggtacagtagtaactggccgtgttgagcgtggtatcgtacgtgttggtgacgaagtagaaatcgttggtatccgtacaacgactaagacaacctgtactggtgttgaaatgttccgtaagctgcttgacgaaggtcgtgcaggtgagaactgtggtatcctgttacgtggtactaagcgtgatgacgtagaacgtggtcaagtattatctaagccaggttcaatcaacccacacactacttttgaatcagaagtatacgttctgtcaaaagaagaaggtggtcgtcacactccattcttcaaaggctaccgtccacagttctacttccgtacaactgacgtgactggtaccatcgaactgccagaaggcgtagagatggtaatgccaggcgacaacatcaagatggttgttacgctgatctgcccaatcgcgatggacgaaggtttacgcttcgcaatccgtgaaggtggccgtacagtaggtgcaggtgttgtagctaagatcatcgcttaa

SEQ ID NO: 27270 - protein, 394 aa, Shewanella sp. MR-4
MAKAKFERNKPHVNVGTIGHVDHGKTTLTAAISHVLAKTYGGEAKDFSQIDNAPEERERGITINTSHIEYDTPTRHYAHVDCPGHADYVKNMITGAAQMDGAILVVASTDGPMPQTREHILLSRQVGVPFIIVFMNKCDMVDDAELLELVEMEVRELLSEYDFPGDDLPVIQGSALKALEGEPEWEAKIIELAAALDSYIPEPERDIDKPFLMPIEDVFSISGRGTVVTGRVERGIVRVGDEVEIVGIRTTTKTTCTGVEMFRKLLDEGRAGENCGILLRGTKRDDVERGQVLSKPGSINPHTTFESEVYVLSKEEGGRHTPFFKGYRPQFYFRTTDVTGTIELPEGVEMVMPGDNIKMVVTLICPIAMDEGLRFAIREGGRTVGAGVVAKIIA

SEQ ID NO: 27271 - DNA, 1185 bp, Shewanella sp. MR-7
  CDS (1)..(1185): transl_table=11
gtggcaaaagctaaatttgaacgtaataagcctcacgtaaacgtgggcaccatcggtcacgttgaccatggtaaaaccactctgactgcagctatctctcacgtactggctaagacctacggtggtgaagctaaagacttctctcaaatcgataacgctccagaagagcgtgagcgcggtattaccatcaatacctctcacatcgaatacgatacaccaactcgccactacgcacacgtagactgcccaggccacgctgactatgttaaaaacatgatcacaggtgctgcacagatggacggcgcgatcctggtagtagcttctactgacggtccaatgccacaaacacgtgagcacatcctgctgtctcgccaagtaggcgtacctttcatcatcgtattcatgaacaagtgtgacatggttgacgatgctgaactgttagaattagtagaaatggaagtacgtgaactgttatcagaatatgacttcccaggtgatgacttaccagttatccaaggttctgctctgaaagcgctagaaggcgagccagagtgggaagctaagatcatcgaattagcagaagcactggattcttacattccagaaccagagcgtgatatcgataagccattcctgatgccaatcgaagacgtattctcaatctctggtcgtggtacagtagtaactggccgtgttgagcgtggtatcgtacgtgttggtgacgaagtagaaatcgttggtatccgtacaacgactaagacaacctgtactggtgttgaaatgttccgtaagctgcttgacgaaggtcgtgcaggtgagaactgtggtatcctgttacgtggtactaagcgtgatgacgtagaacgtggtcaagtattatctaagccaggttcaatcaacccacacactacttttgaatcagaagtatacgttctgtcaaaagaagaaggtggtcgtcacactccattcttcaaaggctaccgtccacagttctacttccgtacaactgacgtgactggtaccatcgaactgccagaaggcgtagagatggtaatgccaggcgacaacatcaagatggttgttacgctgatctgcccaatcgcgatggacgaaggtttacgcttcgcaatccgtgaaggtggccgtacagtaggtgcaggtgttgtagctaagatcatcgcttaa

SEQ ID NO: 27272 - protein, 394 aa, Shewanella sp. MR-7
MAKAKFERNKPHVNVGTIGHVDHGKTTLTAAISHVLAKTYGGEAKDFSQIDNAPEERERGITINTSHIEYDTPTRHYAHVDCPGHADYVKNMITGAAQMDGAILVVASTDGPMPQTREHILLSRQVGVPFIIVFMNKCDMVDDAELLELVEMEVRELLSEYDFPGDDLPVIQGSALKALEGEPEWEAKIIELAEALDSYIPEPERDIDKPFLMPIEDVFSISGRGTVVTGRVERGIVRVGDEVEIVGIRTTTKTTCTGVEMFRKLLDEGRAGENCGILLRGTKRDDVERGQVLSKPGSINPHTTFESEVYVLSKEEGGRHTPFFKGYRPQFYFRTTDVTGTIELPEGVEMVMPGDNIKMVVTLICPIAMDEGLRFAIREGGRTVGAGVVAKIIA

SEQ ID NO: 27273 - DNA, 1191 bp, Alkalilimnicola ehrlichei MLHE-1
  CDS (1)..(1191): transl_table=11
atgtccaagagcaagtttgagcgtaagaagccacacgtaaacgtagggaccattggtcacgttgaccatggtaagacgacgctgacggcggcgatgacggtggtgctggcggaagcgtttgggggtgacgcccgggcctttgatcagattgacaacgcgccggaggagaaggcgcgtggtatcacgattgcgacggcgcacgtggagtatgagacgagtgagcgtcactatgcgcacgtggactgcccgggtcacgcggattatgtgaagaacatgatcacgggtgcggcgcagatggacggtgccattttggtggtgtctgctgcggacggtccgatgccgcagacgcgggagcacattttgctggcgcgtcaggtgggtgtgccgtacatcgtggtttacctgaacaaggcggacatggtggacgacgaggagcttctggagctggtggagatggaggtccgggagcttctgagtgattacgatttcccgggtgatgacacgccggtgatcacgggttcggcgctgaaggcgctggagggtgatgactcggagattggcaagccgtcgatcatcaagctggcggaggcgatggatgagtacatcccgacgccggagcgtccggtggatcagccgttcctgatgccgattgaggacgtgttctcgatttcgggtcggggcacggtggtgacgggtcgtgtggagcgtggtgtgatcaagaccggtgaggaggttgagattgtgggtctgaaggagacccagaagacgacctgcacgggtgttgagatgttccgcaagatgctggaccagggtgaggccggtgataacatcggtgcgctgctgcgtggcaccaagcgggatgaggtggagcgtggtcaggtgctgtgcaagccgggcagcatcacgccgcacacgaagtttgagtgtgaggtgtacgtgctgagcaaggacgaggggggtcgacacaccccgttctttaacggttaccgtccgcagttttacttccgtaccacggacgtgaccggttcctgcgagctgcccgagggtgtggagatggtgatgccgggtgacaacgtcaagatgacggtgtcgctgattgcgcccatcgccatggaagatgggctgcgtttcgcggtccgcgagggcggccgcaccgtgggtgccggcgtcgtctccaagatcatcgagtaa

SEQ ID NO: 27274 - protein, 396 aa, Alkalilimnicola ehrlichei MLHE-1
MSKSKFERKKPHVNVGTIGHVDHGKTTLTAAMTVVLAEAFGGDARAFDQIDNAPEEKARGITIATAHVEYETSERHYAHVDCPGHADYVKNMITGAAQMDGAILVVSAADGPMPQTREHILLARQVGVPYIVVYLNKADMVDDEELLELVEMEVRELLSDYDFPGDDTPVITGSALKALEGDDSEIGKPSIIKLAEAMDEYIPTPERPVDQPFLMPIEDVFSISGRGTVVTGRVERGVIKTGEEVEIVGLKETQKTTCTGVEMFRKMLDQGEAGDNIGALLRGTKRDEVERGQVLCKPGSITPHTKFECEVYVLSKDEGGRHTPFFNGYRPQFYFRTTDVTGSCELPEGVEMVMPGDNVKMTVSLIAPIAMEDGLRFAVREGGRTVGAGVVSKIIE

SEQ ID NO: 27275 - DNA, 1191 bp, Hyphomonas neptunium ATCC 15444
  CDS (1)..(1191): transl_table=11
atgggcaaggcaaagtttgagcgcaacaagccgcacgtaaacattggcacgattggccacgttgaccacggcaagacgacgctgacagcggcgatcacgatcacgctggcgaagaccggtggcgcgacggcgaagaattacgccgacattgacgcggcgccggaagagaaggcacgcgggatcacgatcaacacggcgcacgtcgagtatgagacgcctgcccgtcactatgcccacgtcgactgccccggccacgctgactatgtgaagaacatgatcaccggcgctgcgcagatggacggcgcgatcctggtgtgttcggccgctgacggcccgatgccgcagacgcgtgagcacatccttctggcccgccaggttggcgtgccggcgctggtggtgttcctcaacaaggtcgacatggtcgacgatgaggagcttctggagctggtcgagatggaagtgcgcgagctgctttcgtcctacaacttccctggcgacgacattccgatcatcaagggctcggctctggccgctgttgaagaccgcaatcctgaaatcggccaggaccgtatcctggagctgatgaaggctgtggacgagtacatcccgacgccggagcgtccgctggacaagccgttcctgatgccggttgaagacgtgttctcgatctcgggccgcggtacggttgtgaccggccgggttgagcagggcatcgtcaaggttggcgaagaaatcgagatcgtcggcatccgcccgacggtgaagacgacctgcacgggcgttgagatgttccgcaagctgctcgaccagggccaggctggcgacaacatcggcgcgctgctgcgcggtgttgaccgtgaaggcgttgagcgcgggcaggttctctgcaagccgggctcgatcacgccgcacacgctgttcgaagccgaagcctacatcctgacgaaggaagagggtggccgtcacacgccgttcttcaccaactaccgtccgcagttctacttccgcaccacggacgtcacaggcatcgtcaagctgcctgaggacaaagagatggttctgccgggcgacaacgtgaaaatggatgtcgagctgatcaacccgatcgccatggacaagggcctgcgcttcgccatccgcgaaggcggccgcaccgtcggcgccggcgtcgtctccgaaatcaagaaataa

SEQ ID NO: 27276 - protein, 396 aa, Hyphomonas neptunium ATCC 15444
MGKAKFERNKPHVNIGTIGHVDHGKTTLTAAITITLAKTGGATAKNYADIDAAPEEKARGITINTAHVEYETPARHYAHVDCPGHADYVKNMITGAAQMDGAILVCSAADGPMPQTREHILLARQVGVPALVVFLNKVDMVDDEELLELVEMEVRELLSSYNFPGDDIPIIKGSALAAVEDRNPEIGQDRILELMKAVDEYIPTPERPLDKPFLMPVEDVFSISGRGTVVTGRVEQGIVKVGEEIEIVGIRPTVKTTCTGVEMFRKLLDQGQAGDNIGALLRGVDREGVERGQVLCKPGSITPHTLFEAEAYILTKEEGGRHTPFFTNYRPQFYFRTTDVTGIVKLPEDKEMVLPGDNVKMDVELINPIAMDKGLRFAIREGGRTVGAGVVSEIKK

SEQ ID NO: 27277 - DNA, 1176 bp, Rhizobium leguminosarum bv. viciae 3841
  CDS (1)..(1176): transl_table=11
atgggaaagagtaagtttgagcgcaacaagccgcacgtcaacattggcacgattggccacgttgaccacggtaagacgtctctgacggcagcgatcacgaagtacttcggtgagtacaaggcgtacgaccagatcgacgcggctccggaagaaaaggcgcgtggcatcacgatttcgacggcccacgttgaatacgagacgccggcccgccactacgcccacgtcgactgccccggccacgccgactacgtcaagaacatgatcaccggtgctgcccagatggacggcgcgatccttgtgtgctcggccgctgacggcccgatgccgcagacgcgcgaacacattctgctggctcgccaggttggcgttccggcaatcgtggtgttcctgaacaaggtcgaccaggtcgacgacgccgagcttctcgaactggtcgagctcgaagttcgcgaactgctgtcgtcctacgacttcccgggcgacgatattccgatcatcaagggttccgcacttgctgcccttgaagattcggacaagaagatcggcgaagacgcgatccgcgagctgatggctgcggttgacgcctacatcccgacgcctgagcgtccgatcaacctgccgttcctgctgccgatcgaagacgtgttctcgatctcgggccgcggcacggttgtgaccggccgcgtcgagcgtggcattgtcaaggttggcgaagaagtcgagatcgtcggcatccgcccgacgacgaagacgacggtgaccggcgttgaaatgttccgcaagctgctcgatcagggccaggctggcgacaacatcggcgcgctgatccgcggcgtcacccgtgacggcgttgagcgtggccagattctgtgcaagccgggttcggtcaagccgcacaagaagttcatggcagaagcctacatcctgacgaaggaagagggtggtcgtcatacgccgttcttcaccaactaccgtccgcagttctacttccgcacgaccgacgtgacgggcatcgtgacgctgccggaaggcacggagatggtcatgccgggcgacaacgtcacggtatcggtcgagctgatcgttccgatcgcgatggaagaaaagctgcgcttcgcgatccgcgaaggcggccgcaccgtcggcgccggtatcgtcgcgtcgatcgtcgagtaa

SEQ ID NO: 27278 - protein, 391 aa, Rhizobium leguminosarum bv. viciae 3841
MGKSKFERNKPHVNIGTIGHVDHGKTSLTAAITKYFGEYKAYDQIDAAPEEKARGITISTAHVEYETPARHYAHVDCPGHADYVKNMITGAAQMDGAILVCSAADGPMPQTREHILLARQVGVPAIVVFLNKVDQVDDAELLELVELEVRELLSSYDFPGDDIPIIKGSALAALEDSDKKIGEDAIRELMAAVDAYIPTPERPINLPFLLPIEDVFSISGRGTVVTGRVERGIVKVGEEVEIVGIRPTTKTTVTGVEMFRKLLDQGQAGDNIGALIRGVTRDGVERGQILCKPGSVKPHKKFMAEAYILTKEEGGRHTPFFTNYRPQFYFRTTDVTGIVTLPEGTEMVMPGDNVTVSVELIVPIAMEEKLRFAIREGGRTVGAGIVASIVE

SEQ ID NO: 27279 - DNA, 1188 bp, Pediococcus pentosaceus ATCC 25745
  CDS (1)..(1188): transl_table=11
atggcaaaagaacattacgaaagaacaaaaccccatgtaaatattggtacaattggccacgttgaccatgggaaaactactttgacagctgctattacaaaagtgttgtcagaaaaaggactagctaaagcttcagattacgctgatattgatgctgctccagaagaaaaggaacgtggtatcacaatcaacacagcccacgttgaatatgaaacagaaaagcgtcattacgctcatatcgatgctccaggacatgctgattacgttaagaacatgatcactggtgctgcacaaatggatggtgctatcttagttgttgctgcaactgatggtcctatgccacaaacacgtgaacatatccttcttgctcaccaagttggtgttgactacatcgttgtcttcttaaacaagactgatcttgttgatgatgatgaattagttgaccttgttgagatggaagttcgtgaacttctatctgaatatgatttccctggtgacgatgttcctgtacttcgcggttcagctttgaaagctcttgaaggcgatgcagaacaagaaaaagttatcatggatcttatggatacaatcgacgaatacattccaacaccagaacgttctacagacaagccattcttgatgcctgttgaagacgtatttacaattactggtcgtggtactgttgcttctggtcgtatcgatcgtggtgaaatcaaagtcggtgacgaagttgaaatcgttggtcttaaagaagacgtaacaaagacaactgttacaggaattgaaatgttccgtaagactcttgatgttggtgaagctggtgataacattggtgcacttctacgtggtgttaaccgtgaagatgttgtccgtggacaagttttggctgctcctggctcaatccaaacacacaagaagttcaagggtgaagtttatatcctttctaaggatgaaggtggacgtcatactccattcttctcaaactaccgtcctcaattctacttccatacaactgatgtaacaggtgttattgaattacctgacaacgttgaaatggttatgcctggtgataacgttacatttactgtagaacttatcgaaccagttgctattgaaaaaggtactaagttcactgttcgtgaaggtggacacactgttggtgctggtgttgtatcagaaattgacgactaa

SEQ ID NO: 27280 - protein, 395 aa, Pediococcus pentosaceus ATCC 25745
MAKEHYERTKPHVNIGTIGHVDHGKTTLTAAITKVLSEKGLAKASDYADIDAAPEEKERGITINTAHVEYETEKRHYAHIDAPGHADYVKNMITGAAQMDGAILVVAATDGPMPQTREHILLAHQVGVDYIVVFLNKTDLVDDDELVDLVEMEVRELLSEYDFPGDDVPVLRGSALKALEGDAEQEKVIMDLMDTIDEYIPTPERSTDKPFLMPVEDVFTITGRGTVASGRIDRGEIKVGDEVEIVGLKEDVTKTTVTGIEMFRKTLDVGEAGDNIGALLRGVNREDVVRGQVLAAPGSIQTHKKFKGEVYILSKDEGGRHTPFFSNYRPQFYFHTTDVTGVIELPDNVEMVMPGDNVTFTVELIEPVAIEKGTKFTVREGGHTVGAGVVSEIDD

SEQ ID NO: 27281 - DNA, 1191 bp, Oenococcus oeni PSU-1
  CDS (1)..(1191): transl_table=11
ttggctgaaaaggaacattacgaaagaactaagccgcacgttaatattggtactatcggtcatgttgatcatggtaaaaccactttaacggctgctatcactaaggtattgtctgaaaagggccttgcgcaagctcaagattatgcctcaattgatgccgctcctgaagagcgtgaacgtggaatcaccatcaatactgcccacgttgaatatgaaactgataagcgtcactatgcacacatcgatgcaccaggtcacgccgactatgttaaaaatatgatcactggagccgcacaaatggatggagccatccttgttgttgctgctactgatggtcctatgccacagactcgtgaacatattttgcttgcccgtcaagttggtgttaactatattgttgtcttcttaaataagactgaccttgttgatgatccagaattaatcgatcttgttgagatggaagttcgtgaacttttgtctgaatatgattttcctggagatgatattcctattattcgcggttctgctttgaaggctcttcaaggcgatccggaacaggaaaaagttatcttgcacttaatggatgttatcgatgaatacatcccaactccagttcgtgatgttgataagccattcttgatgcctgtcgaagatgtcttcactatcactggacgtggtactgttgcgtctggacgtatcgatcgtggaactgtcaagattaacgatccagttgaaattgttggtttgaaggatgaagttaaaaacactgttgttaccggtgttgaaatgttccggaagactttggatcttggtgaagccggagataatatcggagctctgcttcgtggaattgatcgcgatggtgttgaacgtggacaagttttggcaaagccaggttcaattcagacccataaaaagtttaagggtgaagtttatatccttactaaggaagaaggtggacgtcatactccattcttcactaactatcgtcctcaattctatttccacacgactgatgttaccggtgtcgtagaattgcctgaaggtgttgaaatggttatgcctggtgatcacgtcacatttactgttgaattgatgaaaccagtcgctatcgaaaaaggtttgaaattcactatccgtgaaggtggccacactgttggtgccggaactgtctctgaaattgatgactaa

SEQ ID NO: 27282 - protein, 396 aa, Oenococcus oeni PSU-1
MAEKEHYERTKPHVNIGTIGHVDHGKTTLTAAITKVLSEKGLAQAQDYASIDAAPEERERGITINTAHVEYETDKRHYAHIDAPGHADYVKNMITGAAQMDGAILVVAATDGPMPQTREHILLARQVGVNYIVVFLNKTDLVDDPELIDLVEMEVRELLSEYDFPGDDIPIIRGSALKALQGDPEQEKVILHLMDVIDEYIPTPVRDVDKPFLMPVEDVFTITGRGTVASGRIDRGTVKINDPVEIVGLKDEVKNTVVTGVEMFRKTLDLGEAGDNIGALLRGIDRDGVERGQVLAKPGSIQTHKKFKGEVYILTKEEGGRHTPFFTNYRPQFYFHTTDVTGVVELPEGVEMVMPGDHVTFTVELMKPVAIEKGLKFTIREGGHTVGAGTVSEIDD

SEQ ID NO: 27283 - DNA, 1188 bp, Leuconostoc mesenteroides subsp. mesenteroides ATCC 8293
  CDS (1)..(1188): transl_table=11
ttggctaaggaaacttacgttcgcactaagccccacgttaacattggtactattggacacgtcgatcacggaaagacgactttgactgccgctatctcaaaggtattggctgaaaagcaaggtgttgatgctactgattttgctgaaatcgataacgcgcctgaagaaaaagaacgtggtatcacaattaacacttctcatatcgaatatgaaacagagaagcgtcactatgcccacattgatgccccaggtcacgcggattacgttaaaaacatgatcactggtgctgcccaaatggatggtgctatcttggttgttgctgcaactgatggtcctatgccacaaacacgtgaacacatcttgttggcacgtcaagttggtgttgactacttggttgtcttcttgaacaagactgatttggttgatgatgaagaattagttgaattggttgaaatggaagttcgtgaattgttgtcagaatatgacttccctggtgacgatattcctgtacttaagggttcagctttgaaggctttggaaggtgatcctgaacaagttaaggttatcgaagaattgatggatactgttgattcatacattccagaaccagcacgtgaaacagacaagccattcttgatgcctgtcgaagatgtcttcacaatcactggtcgtggtacagttgcttctggtcgtgtcgaccgtggtgtattgactacaggaactgaaattgaaatcgttggtttgaaggacgaagttcaaaagactactgttacaggtatcgaaatgttccgtaagactttggaagaagctcaagcgggtgataacattggtgcattgttgcgtggtgttgatcgtagcaacattgaacgtggtcaagttttggcaaagccaggttcaattaagacacacaagaagttcaaggctgaagtttatgtcttgacaaaggaagaaggtggtcgtcatacaccattcttcactaactaccgtccacaattctacttccacacaactgatgttacaggtgttgttgaattgccagccggtgttgaaatggttatgcctggtgaccaagtgacattcgaaatcgaattgatctcaccagttgccatcgaacaagggttgaagtttactgttcgtgaaggtggccacactgttggtgctggaacagttactgatatcgaagactaa

SEQ ID NO: 27284 - protein, 395 aa, Leuconostoc mesenteroides subsp. mesenteroides ATCC 8293
MAKETYVRTKPHVNIGTIGHVDHGKTTLTAAISKVLAEKQGVDATDFAEIDNAPEEKERGITINTSHIEYETEKRHYAHIDAPGHADYVKNMITGAAQMDGAILVVAATDGPMPQTREHILLARQVGVDYLVVFLNKTDLVDDEELVELVEMEVRELLSEYDFPGDDIPVLKGSALKALEGDPEQVKVIEELMDTVDSYIPEPARETDKPFLMPVEDVFTITGRGTVASGRVDRGVLTTGTEIEIVGLKDEVQKTTVTGIEMFRKTLEEAQAGDNIGALLRGVDRSNIERGQVLAKPGSIKTHKKFKAEVYVLTKEEGGRHTPFFTNYRPQFYFHTTDVTGVVELPAGVEMVMPGDQVTFEIELISPVAIEQGLKFTVREGGHTVGAGTVTDIED

SEQ ID NO: 27285 - DNA, 1185 bp, Shewanella sp. ANA-3
  CDS (1)..(1185): transl_table=11
gtggcaaaagctaaatttgaacgtaataagcctcacgtgaacgtgggcaccatcggtcacgttgaccatggtaaaaccactctgactgcagctatctctcacgtactggctaagacctacggtggtgaagctaaagacttctctcaaatcgataacgctccagaagagcgtgagcgcggtattaccatcaatacctctcacatcgaatacgatacaccaactcgccattacgcacacgtagactgcccaggccacgctgactatgttaaaaacatgatcactggtgctgcacagatggacggcgcgatcctggtagtagcttctactgacggtccaatgccacaaacacgtgagcacatcctgctgtctcgccaagtaggcgtaccattcatcatcgtattcatgaacaaatgtgacatggttgacgatgctgagctgttagaattagtagaaatggaagtacgtgaactgttatcagaatacgacttcccaggtgatgacttaccagttatccaaggttctgctctgaaagcgcttgaaggcgagccagagtgggaagctaagatcatcgaattagccgctgcactggattcttacattccagaaccagagcgtgatatcgataagccattcctgatgccaatcgaagacgtattctcaatctctggccgtggtacagtagtaacaggtcgtgttgagcgtggtatcgtacgtgttggtgacgaagtagaaatcgttggtatccgtgcaactactaagacaacctgtactggtgttgaaatgttccgtaagctgcttgacgaaggtcgtgcaggtgagaactgtggtatcctgttacgtggtactaagcgtgatgacgtagaacgtggtcaagtattatctaagccaggttcaatcaacccacacactacttttgaatcagaagtatacgttctgtcaaaagaagaaggtggtcgtcacactccattcttcaaaggctaccgtccacagttctacttccgtacaactgacgtgacaggtactatcgaactgccagaaggcgtagagatggtaatgccaggcgacaacatcaagatgaaagtgactctgatctgcccaatcgcgatggacgaaggtttacgcttcgcaatccgtgaaggtggccgtacagtaggcgctggtgttgtagctaagattttcgcttaa

SEQ ID NO: 27286 - protein, 394 aa, Shewanella sp. ANA-3
MAKAKFERNKPHVNVGTIGHVDHGKTTLTAAISHVLAKTYGGEAKDFSQIDNAPEERERGITINTSHIEYDTPTRHYAHVDCPGHADYVKNMITGAAQMDGAILVVASTDGPMPQTREHILLSRQVGVPFIIVFMNKCDMVDDAELLELVEMEVRELLSEYDFPGDDLPVIQGSALKALEGEPEWEAKIIELAAALDSYIPEPERDIDKPFLMPIEDVFSISGRGTVVTGRVERGIVRVGDEVEIVGIRATTKTTCTGVEMFRKLLDEGRAGENCGILLRGTKRDDVERGQVLSKPGSINPHTTFESEVYVLSKEEGGRHTPFFKGYRPQFYFRTTDVTGTIELPEGVEMVMPGDNIKMKVTLICPIAMDEGLRFAIREGGRTVGAGVVAKIFA

SEQ ID NO: 27287 - DNA, 1191 bp, Mycobacterium smegmatis str. MC2 155
  CDS (1)..(1191): transl_table=11
gtggcgaaggcgaagttcgagcggacgaagccgcacgtcaacatcgggaccatcggtcacgttgaccacggcaagaccacgctgaccgcggctatcaccaaggttctgcacgacaagttccccgatttgaacgaatcgcgcgcattcgaccagatcgacaatgcgcctgaagagcgtcagcgcggtatcaccatcaacatctcccacgtggagtaccagaccgacaagcgtcactacgcacacgtcgacgcccccggtcacgctgactacatcaagaacatgatcaccggtgccgcccagatggacggcgcgatcctggtggtcgccgccactgacggcccgatgccgcagacccgcgagcacgtgctgctggcccgccaggtgggtgtgccctacatcctggtcgcgctgaacaagtcggacgcggtggacgacgaggagctcatcgagctcgtcgagatggaggtccgcgaactgctggccgcccaggacttcgacgaggaggcccccgtggtccgcgtctcggcgctcaaggcgctcgagggcgatcccaagtgggtcaagtcggtcgaggagctcatggaggccgtcgacgcgtccatcccggatccggtccgcgagaccgacaagccgttcctgatgcccgttgaggacgtcttcacgatcaccggtcgtggcaccgtcgtcaccggccgtgtcgagcgcggtgtgatcaacgtgaacgaggaagtcgagatcgtcggcatccgcccggagaccaccaagaccacggtcaccggtgtcgagatgttccgcaagctgctcgaccagggccaggccggtgacaacgtcggtctgctgctccgcggcatcaagcgcgaggacgtcgagcgtggccaggttgtggtcaagcccggcaccaccaccccgcacaccgagttcgagggccaggtctacatcctgtccaaggacgagggtggccgccacacgccgttcttcaacaactaccgtccgcagttctacttccgcaccacggacgtgaccggcgttgtgaccctgcccgagggcaccgagatggtgatgcccggtgacaacaccgacatctccgtcaagctgatccagcccgtcgccatggacgagggcctgcgcttcgcgatccgcgagggcggccgtaccgtcggcgccggccgcgtcaccaagatcatcaagtga

SEQ ID NO: 27288 - protein, 396 aa, Mycobacterium smegmatis str. MC2 155
MAKAKFERTKPHVNIGTIGHVDHGKTTLTAAITKVLHDKFPDLNESRAFDQIDNAPEERQRGITINISHVEYQTDKRHYAHVDAPGHADYIKNMITGAAQMDGAILVVAATDGPMPQTREHVLLARQVGVPYILVALNKSDAVDDEELIELVEMEVRELLAAQDFDEEAPVVRVSALKALEGDPKWVKSVEELMEAVDASIPDPVRETDKPFLMPVEDVFTITGRGTVVTGRVERGVINVNEEVEIVGIRPETTKTTVTGVEMFRKLLDQGQAGDNVGLLLRGIKREDVERGQVVVKPGTTTPHTEFEGQVYILSKDEGGRHTPFFNNYRPQFYFRTTDVTGVVTLPEGTEMVMPGDNTDISVKLIQPVAMDEGLRFAIREGGRTVGAGRVTKIIK

SEQ ID NO: 27289 - DNA, 1194 bp, Nocardioides sp. JS614
  CDS (1)..(1194): transl_table=11
gtggctaaggcgaagttcgagcggaccaagccgcacgtcaacatcggcaccatcggtcacatcgaccacggcaagacgacgctcacggcggcgatcaccaaggtgctgcacgacaagtacccggacctgaaccccttcacgccgttcgacgagatcgacaaggcccctgaggagcgtcagcgcggtatcaccatctcgatcgcgcacgtcgagtaccagaccgagtcgcggcactacgcgcacgtcgactgcccgggtcacgcggactacatcaagaacatgatcaccggtgccgcgcagatggacggcgcgatcctcgtggtcgccgccaccgacggcccgatgccgcagacccgtgagcacgtgctgctggcccgccaggtcggcgtgcccgccctggtcgtcgcgctcaacaagtgcgacatggtcgacgacgaggagctcatcgagctcgtcgagatggaggtgcgcgagctcctctccgagtacgagttcccgggcgacgacatcccggtcgtgcgcgtggcggccttcccggccctcaacggcgacgccaagtggggcgagtcggtcctcgagctgatgaacgcggtcgacgagtacatcccgaccccggagcgcgacaccgagaagccgttcctgatgccggtcgaggacgtcttcacgatcaccggtcgcggcacggtcatcaccggccggatcgagcgcggcatcgtcaaggtcggcgaggaggtcgagatcctcggcatccgcgaggcctcgcagaagagcaccgtcaccggtgtcgagatgttccgcaagctgctcgacgagggccaggccggtgagaacgtcggtctgctgctccgcggcaccaagcgcgaggacgtcgagcgcggcatggtcgtcgccaagcccggcaccacgaccccgcacaccaacttcgaggcctcggtctacatcctctcgaaggaggagggcggccgccacacgccgttcttcaacaactaccgcccgcagttctacttccggaccacggacgtgaccggcgtggtgaccctccccgagggcaccgagatggtcatgccgggcgacaacaccgagatggccgtcgagctgatccagccgatcgccatggacgagggtctgcgcttcgcgatccgcgagggcggccgcaccgtcggcgccggccgggtcaccaagatcacgaagtga

SEQ ID NO: 27290 - protein, 397 aa, Nocardioides sp. JS614
MAKAKFERTKPHVNIGTIGHIDHGKTTLTAAITKVLHDKYPDLNPFTPFDEIDKAPEERQRGITISIAHVEYQTESRHYAHVDCPGHADYIKNMITGAAQMDGAILVVAATDGPMPQTREHVLLARQVGVPALVVALNKCDMVDDEELIELVEMEVRELLSEYEFPGDDIPVVRVAAFPALNGDAKWGESVLELMNAVDEYIPTPERDTEKPFLMPVEDVFTITGRGTVITGRIERGIVKVGEEVEILGIREASQKSTVTGVEMFRKLLDEGQAGENVGLLLRGTKREDVERGMVVAKPGTTTPHTNFEASVYILSKEEGGRHTPFFNNYRPQFYFRTTDVTGVVTLPEGTEMVMPGDNTEMAVELIQPIAMDEGLRFAIREGGRTVGAGRVTKITK

SEQ ID NO: 27291 - DNA, 1191 bp, Azoarcus sp. BH72
  CDS (1)..(1191): transl_table=11
atggctaagggtaagttcgagcggacgaaaccgcacgtaaacgttggtacgatcggtcacgttgaccacggcaagacgacgctgacggcggcgatcaccacgattctgtcgaagaagttcggcggtgaagcgaaggcctacgaccagatcgacgcggcgccggaagaaaaggcgcgtggtatcacgatcaacaccgcgcacgtcgagtacgaaaccgcgacccgtcactacgcccacgtcgattgcccgggccacgccgactacgtcaagaacatgatcaccggcgctgcgcagatggacggcgcgatcctggtgtgttcggccgcggacggcccgatgccgcagacccgcgagcacatcctgctggcgcgtcaggttggtgtgccgtacatcatcgtcttcctgaacaagtgcgacatggtcgacgacgaagagctgctcgagctggtcgaaatggaagtgcgcgaactgctctccaagtacgacttcccgggcgatgacattcccatcgtcaagggttcggcgctgaaggcgctcgaaggcgaccagtccgacatcggcgagccggcgatcttccgcctggccgacgcgctggacagctacatcccgaccccggagcgtgcgatcgacaagcccttcctgctgccgatcgaagacgtgttctcgatctccggccgcggcaccgtggtgaccggtcgtgtcgagcgcggcatcgtgaaggttggcgaagaaatcgaaatcgtcggcatcaagcccaccgtcaagaccacctgcaccggcgtggaaatgttccgcaagctgctggaccagggtcaggcgggcgacaacgtcggcgtgctgctgcgcggcaccaagcgtgaagacgtcgagcgtggccaggtgctgtgcaagccgggttcgatcaccccgcacacccacttcaccggcgaaatctacgtgctgtcgaaggaagagggcggtcgtcacaccccgttcttcaacaactaccgtccgcagttctacttccgtaccaccgacgtgaccggttcgatctcgctgcccgaaggcaccgagatggtcatgccgggcgacaacgtgtcgatcaccgtgaagctgatcgccccgatcgccatggaagaaggtctgcgtttcgccatccgtgaaggcggtcgtaccgtcggcgccggcgtcgttgccaagatcatcgagtaa

SEQ ID NO: 27292 - protein, 396 aa, Azoarcus sp. BH72
MAKGKFERTKPHVNVGTIGHVDHGKTTLTAAITTILSKKFGGEAKAYDQIDAAPEEKARGITINTAHVEYETATRHYAHVDCPGHADYVKNMITGAAQMDGAILVCSAADGPMPQTREHILLARQVGVPYIIVFLNKCDMVDDEELLELVEMEVRELLSKYDFPGDDIPIVKGSALKALEGDQSDIGEPAIFRLADALDSYIPTPERAIDKPFLLPIEDVFSISGRGTVVTGRVERGIVKVGEEIEIVGIKPTVKTTCTGVEMFRKLLDQGQAGDNVGVLLRGTKREDVERGQVLCKPGSITPHTHFTGEIYVLSKEEGGRHTPFFNNYRPQFYFRTTDVTGSISLPEGTEMVMPGDNVSITVKLIAPIAMEEGLRFAIREGGRTVGAGVVAKIIE

SEQ ID NO: 27293 - DNA, 1191 bp, Acidovorax sp. JS42
  CDS (1)..(1191): transl_table=11
atggcaaaaggtaagtttgaacgtaccaagccccacgtgaacgtgggcacgatcggtcacgtggaccatggcaagacgacgctgacggcggccatcgccacggtgctggccaagaagttcggcggcgaagccaagggctacgaccagatcgacaacgcccctgaagaaaaggcgcgcggcatcacgatcaacacctcgcacgtggaatacgaaacggccacccgccactacgcccacgtcgactgccccggccacgccgactacgtcaagaacatgatcaccggcgccgctcagatggacggcgccatcctggtgtgctcggccgctgacggcccgatgccccagacgcgcgagcacatcctgttggctcgccaggtgggtgtgccctacatcatcgtgttcctgaacaagtgcgacatggtcgacgacgaggaactgctcgagctggtcgagatggaagtgcgcgagctgctggacaagtacgacttccccggcgacgacacccccatcatccgcggctccgccaagttggccctggaaggcgaccagtccgacaagggcgagcccgccatcttgcgcctggccgaagctctggacacctacatccccacgcctgagcgcgctgtggacggtgccttcctgatgcccgtggaagacgtgttctccatctccggccgcggcaccgtggtgaccggccgtgtcgagcgcggcatcatcaaggtcggcgaagaaatcgaaatcgtgggtatccgcgacacgcagaagaccaccgtcaccggcgtggaaatgttccgcaagctgctggaccaaggtcaagctggcgacaacgttggtctgctgctgcgcggcaccaagcgcgaagacgtggaacgcggccaagtgctgtgcaagcccggctcgatcaagccccacacccacttcactgctgaagtgtatgtgttgagcaaggacgaaggcggccgccacacgcccttcttcaacaactaccgcccccagttctacttccgcaccaccgacgtgaccggctccatcgagctgccggccgacaaggaaatggtgatgcccggcgacaacgtgtcgatcactgtgaagctgatcaaccccatcgccatggaagaaggcctgcgcttcgctatccgcgaaggcggccgtaccgtgggcgccggcgtcgttgccaagatcattgcgtaa

SEQ ID NO: 27294 - protein, 396 aa, Acidovorax sp. JS42
MAKGKFERTKPHVNVGTIGHVDHGKTTLTAAIATVLAKKFGGEAKGYDQIDNAPEEKARGITINTSHVEYETATRHYAHVDCPGHADYVKNMITGAAQMDGAILVCSAADGPMPQTREHILLARQVGVPYIIVFLNKCDMVDDEELLELVEMEVRELLDKYDFPGDDTPIIRGSAKLALEGDQSDKGEPAILRLAEALDTYIPTPERAVDGAFLMPVEDVFSISGRGTVVTGRVERGIIKVGEEIEIVGIRDTQKTTVTGVEMFRKLLDQGQAGDNVGLLLRGTKREDVERGQVLCKPGSIKPHTHFTAEVYVLSKDEGGRHTPFFNNYRPQFYFRTTDVTGSIELPADKEMVMPGDNVSITVKLINPIAMEEGLRFAIREGGRTVGAGVVAKIIA

SEQ ID NO: 27295 - DNA, 1191 bp, Acidovorax sp. JS42
  CDS (1)..(1191): transl_table=11
atggcaaaaggtaagtttgaacgtaccaagccccacgtgaacgtgggcacgatcggtcacgtggaccatggcaagacgacgctgacggcggccatcgccaccgtgctgtccaagaagttcggcggcgaagccaagggctacgaccagatcgacaacgcccctgaagaaaaggcgcgcggcatcacgatcaacacctcgcacgtggaatacgaaacggccacccgccactacgcccacgtcgactgccccggccacgccgactacgtcaagaacatgatcaccggcgccgctcaaatggacggcgccatcctggtgtgctcggccgctgacggcccgatgccccagacgcgcgagcacatcctgctggcccgtcaggtgggcgtgccctacatcatcgtgttcctgaacaagtgcgacatggtcgacgacgaggaactgcttgagctggtcgaaatggaagtgcgcgagctgctggacaagtacgacttccccggcgacgacacccccatcatccgcggctccgccaagctggccctggaaggtgaccagtccgacaagggcgaacccgccatcctgcgcctggccgaagccctggacacctacatccccacgcctgagcgcgccgtggacggcgccttcctgatgcctgtggaagacgtgttctccatctccggccgcggcaccgtggtgaccggccgcgtcgagcgcggcatcatcaaggtcggcgaagaaatcgaaatcgtcggtatccgcgacacgcaaaagaccaccgtcaccggcgtggaaatgttccgcaagctgctggaccagggccaggctggcgacaacgtgggcctgctgctgcgcggcaccaagcgcgaagacgtcgagcgcggccaagtgctgtgcaagcccggctccatcaagccccacacccacttcacggctgaggtgtacgtgctgagcaaggacgaaggcggccgtcacacgcccttcttcaacaactaccgtccccagttctacttccgcaccaccgacgtgaccggctccatcgagctgccggccgacaaggaaatggtgatgcccggcgacaacgtgtcgatcactgtgaagctgatcaaccccatcgccatggaagaaggcctgcgcttcgctatccgcgaaggcggccgtaccgtgggcgccggcgtcgttgccaagatcattgcgtaa

SEQ ID NO: 27296 - protein, 396 aa, Acidovorax sp. JS42
MAKGKFERTKPHVNVGTIGHVDHGKTTLTAAIATVLSKKFGGEAKGYDQIDNAPEEKARGITINTSHVEYETATRHYAHVDCPGHADYVKNMITGAAQMDGAILVCSAADGPMPQTREHILLARQVGVPYIIVFLNKCDMVDDEELLELVEMEVRELLDKYDFPGDDTPIIRGSAKLALEGDQSDKGEPAILRLAEALDTYIPTPERAVDGAFLMPVEDVFSISGRGTVVTGRVERGIIKVGEEIEIVGIRDTQKTTVTGVEMFRKLLDQGQAGDNVGLLLRGTKREDVERGQVLCKPGSIKPHTHFTAEVYVLSKDEGGRHTPFFNNYRPQFYFRTTDVTGSIELPADKEMVMPGDNVSITVKLINPIAMEEGLRFAIREGGRTVGAGVVAKIIA

SEQ ID NO: 27297 - DNA, 1191 bp, Magnetospirillum magnetotacticum MS-1
  CDS (1)..(1191): transl_table=11
atggccaaggctaaattcgagcgcaacaagcctcactgcaacatcgggaccatcggtcacgttgaccatggcaagacctcgctgaccgcggcgatcaccaagatcctggccgagaccggcggcgccaccttcaccgcctacgaccagatcgacaaggcgccggaagagaaggcccgtggcatcaccatctcgaccgctcacgtcgagtacgagaccaccaaccgccactacgcccatgtggactgccccggccacgccgactatgtgaagaacatgattaccggcgcggcgcagatggacggcgccatcctggtcgtgtcggccgccgacggccccatgccccagacccgcgagcacatcctgctggcccgtcaggtgggcgtgcccgccctggtggtgttcatgaacaagtgcgacatggtcgatgatcccgagctgctggatctggtcgagctggaagtgcgcgagctgctgagctcgtatgacttccccggcgacgacattccgatcgtgcgcggctcggccctgtgcgccctggaagacaagcagccggaaatcggccgcgaggcgatcctgtcgctgatggccgaagtggacaagtacatcccgcagccggagcgtcccaaggacaagccgttcctgatgcccatcgaagacgtgttctccatctcgggccgcggcaccgtggtgaccggccgtgtcgagcgtggcgtcgtgaaggtgggcgaggaagtcgagatcgtcggcatcaaggcgaccgtcaagaccacctgcaccggcgtggaaatgttccgcaagctgctcgatcagggtgaggctggcgacaatatcggcgccctgctgcgcggcaccaagcgcgaggacgtggagcgcggtcaggttctggcggctccgggctccatcacgccccacaccgacttcgaggccgaagcctacatcctgaacaaggaagaaggcggccgtcataccccgttcttcaccaactaccgtccgcagttctacttccgcaccaccgacgtgaccggtgtggttgctctgccggaaggcaccgagatggtgatgccgggcgacaacgtgaagatgatcgtgaccctgatcgcccccatcgccatggaccagggcctgcgcttcgccatccgcgaaggcggccgtaccgtcggcgccggcgtggtggccaagatcatcaagtag

SEQ ID NO: 27298 - protein, 396 aa, Magnetospirillum magnetotacticum MS-1
MAKAKFERNKPHCNIGTIGHVDHGKTSLTAAITKILAETGGATFTAYDQIDKAPEEKARGITISTAHVEYETTNRHYAHVDCPGHADYVKNMITGAAQMDGAILVVSAADGPMPQTREHILLARQVGVPALVVFMNKCDMVDDPELLDLVELEVRELLSSYDFPGDDIPIVRGSALCALEDKQPEIGREAILSLMAEVDKYIPQPERPKDKPFLMPIEDVFSISGRGTVVTGRVERGVVKVGEEVEIVGIKATVKTTCTGVEMFRKLLDQGEAGDNIGALLRGTKREDVERGQVLAAPGSITPHTDFEAEAYILNKEEGGRHTPFFTNYRPQFYFRTTDVTGVVALPEGTEMVMPGDNVKMIVTLIAPIAMDQGLRFAIREGGRTVGAGVVAKIIK

SEQ ID NO: 27299 - DNA, 1230 bp, Nostoc punctiforme PCC 73102
  CDS (1)..(1230): transl_table=11
atggcacgcgcaaagtttgaaagaaataaaccccacctcaatatcggtactattggccacgttgaccacggtaaaaccacgttaacagcagccatcactatgaccttggcagctcttggtcaagctacagctaaaggctacgaccaaatcgataacgcgccagaagaaaaagcacggggtattaccatcaataccgctcacgttgagtatgaaaccgaaaatcggcactatgctcacgtagactgtccaggccacgctgactatgtgaagaacatgatcactggtgctgctcagatggatggaggtatcctcgtagtagctgctactgatggccctatgccccaaacccgcgaacatattctgttagcaaaacaggtgggcgttcctagtctggttgtattcttgaacaaagaagacttgatggatgacccagaactcttggaactagtagaactagaactcagagaactgttaagtagctatgacttccctggcgatgatatccctattattaaaggctctggtctgcaagctctcgaagcaatgaccaagaatcctaagaccaaaaaaggtgaaaatccttgggtagataaaatctacgaattgatggatgctgtggattcctttatccccactcctgagcgggatgtagataagcccttcttgatggcagtagaagacgtgttcaccatcacaggtcgtggtactgtggctactggacggattgaacgcgggaaagttaaggttggcgatacagtcgagctaattggcctgaaagacactcgtactaccgccgtcaccgggattgagatgttcaagaagagcctcgaagaaggtctggctggagataacgcgggtgtactactgcgtggtctcaaaaaagaagatatcgagcgcggtatggtaatagccaaaccaggttcaattacacctcacactcaatttgaaggggaagtatacgtcctaacagaaaaagaaggtggtcgtaagactccatttttcgctggctaccgtccccagttctatgtacggacaaccgatgtaactggtactatcaaagcctacacctccgatgaaggcaaagaagtagaaatggtgatgccaggcgatcgcatcaagatgacagtagaattgatcaacgcgatcgctattgaacaaggaatgcgtttcgctatccgtgaaggtggacgtaccatcggtgctggtgtcgtctccaaaattatcaaatag

SEQ ID NO: 27300 - protein, 409 aa, Nostoc punctiforme PCC 73102
MARAKFERNKPHLNIGTIGHVDHGKTTLTAAITMTLAALGQATAKGYDQIDNAPEEKARGITINTAHVEYETENRHYAHVDCPGHADYVKNMITGAAQMDGGILVVAATDGPMPQTREHILLAKQVGVPSLVVFLNKEDLMDDPELLELVELELRELLSSYDFPGDDIPIIKGSGLQALEAMTKNPKTKKGENPWVDKIYELMDAVDSFIPTPERDVDKPFLMAVEDVFTITGRGTVATGRIERGKVKVGDTVELIGLKDTRTTAVTGIEMFKKSLEEGLAGDNAGVLLRGLKKEDIERGMVIAKPGSITPHTQFEGEVYVLTEKEGGRKTPFFAGYRPQFYVRTTDVTGTIKAYTSDEGKEVEMVMPGDRIKMTVELINAIAIEQGMRFAIREGGRTIGAGVVSKIIK

SEQ ID NO: 27301 - DNA, 1185 bp, Rickettsia sibirica 246
  CDS (1)..(1185): transl_table=11
atggcaaaagcaaaatttgaacgaactaaaccgcacgttaatataggtacgatcggtcacgtagatcacggtaaaacttccttaacggcagcaataactatagtacttgctaagacaggtggagcacaagctacagcgtatgatcaaattgatgctgcgcctgaagaaaaagaaagaggtataactatttctactgcacacgtagaatatgagactaaaaatagacactatgcacacgtagattgtccgggacacgctgactatgtaaagaacatgataaccggtgccgctcagatggacggtgcaatattagtagtttctgctgctgatggtcctatgccgcaaactagagagcatatattactagcaaaacaggtaggtgtgcctgctatggtagtattcttaaataaaatagatatggtggatgatcctgatctattagaactagtagagatggaagtaagggaattattatcaaaatatggtttcccgggtgatgaaatacctattattaaaggttctgcacttcaagctttagaaggaaagcctgaaggtgaaaaagctattaatgagctaatggatgcagtagatagctatataccgcagcctgtaagagctacggataaacctttcttaatgccaatagaagatgtattctctatttcaggaagaggtactgttgtaactggtagagtagagtcaggaataattaaggtaggtgaggaaattgaaatagtcggtctaaaagatacgcaaaaaactacctgtaccggtgtagaaatgttcaggaaattacttgatgaaggacaagccggagataatgttggcatattactacgcggtacaaaaagagaagaagttgaaagaggacaagttctcgcaaaacctggtagcataaaaccgcatgataagtttgaagctgaagtatatgtgcttagtaaagaagaaggtggacgtcataccccatttactaatgactatcgtccgcagttctattttagaacaacagatgttaccggtacaataaaattgcctgctgataagcagatggttatgcctggagataatgctacttttacagtggaattaattaaaccgattgcgatgcaggaagggttgaaattctctatacgtgaaggtggtagaacagtgggtgccggcgtagtaactaaaataaataattaa

SEQ ID NO: 27302 - protein, 394 aa, Rickettsia sibirica 246
MAKAKFERTKPHVNIGTIGHVDHGKTSLTAAITIVLAKTGGAQATAYDQIDAAPEEKERGITISTAHVEYETKNRHYAHVDCPGHADYVKNMITGAAQMDGAILVVSAADGPMPQTREHILLAKQVGVPAMVVFLNKIDMVDDPDLLELVEMEVRELLSKYGFPGDEIPIIKGSALQALEGKPEGEKAINELMDAVDSYIPQPVRATDKPFLMPIEDVFSISGRGTVVTGRVESGIIKVGEEIEIVGLKDTQKTTCTGVEMFRKLLDEGQAGDNVGILLRGTKREEVERGQVLAKPGSIKPHDKFEAEVYVLSKEEGGRHTPFTNDYRPQFYFRTTDVTGTIKLPADKQMVMPGDNATFTVELIKPIAMQEGLKFSIREGGRTVGAGVVTKINN

SEQ ID NO: 27303 - DNA, 1185 bp, Fusobacterium nucleatum subsp. vincentii ATCC 49256
  CDS (1)..(1185): transl_table=11
atggctaaagaaaaatatgaaagaagtaaaccacatgtaaacattggaacaattggacacgttgaccatggaaaaacaactacaactgctgctatatctaaagtattatctgataaaggattagctagtaaagtagattttgaccaaattgatgctgctcctgaagaaaaagaaagaggaataactatcaatacagctcatattgaatatgaaacagcaaatagacactatgctcacgttgactgtccaggacatgctgactatgttaaaaatatgataactggtgctgcacaaatggatggagctatacttgttgtatcagctgctgatggtcctatgcctcaaacaagagaacatatcttactttctagacaagttggagtaccatatattattgtttatttaaacaaagctgatatggttgatgatgaagaattactagaattagtagaaatggaagttagagaattattaactgaatatggattcccaggagatgaaattcctgtaatcagaggttcatcattaggagctttaaatggtgaagaaaaatggattgaaaaaataatggaacttatggatgcagtagatagctatattcctactccagaaagagcaatagatcaaccattcttgatgccaatagaagatgttttcactatcacaggaagaggaacagttgttactggaagagttgaaagaggagttatcaaagttggagaagaaattgaaatagttggaattaaacctacaactaaaacaacttgtacaggtgttgaaatgtttagaaaacttcttgatcaaggtcaagcaggagataacattggagtattattaagaggaactaagaaagaagaagttgaaagaggacaagttcttgctaaaccaggaagtatccaccctcatacaaactttaaaggtgaagtttatgtattaactaaggatgaaggaggaagacatactccattcttcacaggatacagacctcaattctattttagaactactgacatcactggtgcagtaactttaccagatggagtagaaatggttatgccaggagataatatcactatgactgttgaattaatccacccaatcgctatggaacaaggattaagattcgctatcagagaaggtggaagaactgttgcttctggagttgtttctgaaataattaaatag

SEQ ID NO: 27304 - protein, 394 aa, Fusobacterium nucleatum subsp. vincentii ATCC 49256
MAKEKYERSKPHVNIGTIGHVDHGKTTTTAAISKVLSDKGLASKVDFDQIDAAPEEKERGITINTAHIEYETANRHYAHVDCPGHADYVKNMITGAAQMDGAILVVSAADGPMPQTREHILLSRQVGVPYIIVYLNKADMVDDEELLELVEMEVRELLTEYGFPGDEIPVIRGSSLGALNGEEKWIEKIMELMDAVDSYIPTPERAIDQPFLMPIEDVFTITGRGTVVTGRVERGVIKVGEEIEIVGIKPTTKTTCTGVEMFRKLLDQGQAGDNIGVLLRGTKKEEVERGQVLAKPGSIHPHTNFKGEVYVLTKDEGGRHTPFFTGYRPQFYFRTTDITGAVTLPDGVEMVMPGDNITMTVELIHPIAMEQGLRFAIREGGRTVASGVVSEIIK

SEQ ID NO: 27305 - DNA, 1230 bp, Crocosphaera watsonii WH 8501
  CDS (1)..(1230): transl_table=11
atggcacgcgaaaaatttgaacggactaaaccccacgttaacatcggtactgttggtcacgttgaccacggtaaaacaaccttaaccgctgctattaccatgacattagcggcggcaggtaaagcaaaagcccgtaattacgaagatattgatgcagcccccgaagaaaaagcacggggtatcaccatcaacactgctcacgttgagtacgaaacagataaccgtcactatgctcacgttgactgtccgggtcacgctgactatgtgaaaaacatgatcaccggagcagcacagatggacggtggaatcttagtagtatctgctgctgatggtcccatgccccaaacccgtgaacacatcctcttagctaaacaggttggggttcctggtcttgtggttttcttgaacaaaaaagaccaagtggatgatgaagaactgctcgaactcgtagaactcgaagtaagagaacttctcagtgagtatgattttcctggggatgatattcctatcgtttctggatctgctttaatggcagtggaagctctcaaagagaatcctaacatcggtccaggagagaatgaatggacagatcaaatcctcaaactgatggaaaatgttgattcctatattgcagaacctccacgagaagttgatgaacctttattaatggcagtggaagacgtattctccattactggacggggaactgttgccaccggacggattgaacggggtaaagtgaaagtgggcgaaaccgtcgagattgttggagttagagaaactcgtagtaccactgtaactggggtggaaatgttccaaaaatccctagacgaaggattagcaggggataacgttggtttactcttacggggtattcaaaaagaagacatcgaacggggaatggttatcgctaaacccggttctattactcctcataccaagtttgaaggagaggtttacgttctgactaaggaagaagggggtcgtcacacacctttcttcaagaactatcgccctcagttctatgtacgaaccaccgacgtaaccggaaccattgaagactacactgctgacgatggtagtgccgtagaaatggttatgcctggcgatcgcattaaaatgactgtacagttaattaatgctattgctgttgaacaaggaatgcgttttgcgattcgtgaaggtggccgtactatcggtgcaggtgttgtttctaagattcttgagtag

SEQ ID NO: 27306 - protein, 409 aa, Crocosphaera watsonii WH 8501
MAREKFERTKPHVNIGTVGHVDHGKTTLTAAITMTLAAAGKAKARNYEDIDAAPEEKARGITINTAHVEYETDNRHYAHVDCPGHADYVKNMITGAAQMDGGILVVSAADGPMPQTREHILLAKQVGVPGLVVFLNKKDQVDDEELLELVELEVRELLSEYDFPGDDIPIVSGSALMAVEALKENPNIGPGENEWTDQILKLMENVDSYIAEPPREVDEPLLMAVEDVFSITGRGTVATGRIERGKVKVGETVEIVGVRETRSTTVTGVEMFQKSLDEGLAGDNVGLLLRGIQKEDIERGMVIAKPGSITPHTKFEGEVYVLTKEEGGRHTPFFKNYRPQFYVRTTDVTGTIEDYTADDGSAVEMVMPGDRIKMTVQLINAIAVEQGMRFAIREGGRTIGAGVVSKILE

SEQ ID NO: 27307 - DNA, 1176 bp, Sulfitobacter sp. EE-36
  CDS (1)..(1176): transl_table=11
atggctaaggcaaagtttgaacgtaataaaccacacgttaacatcggtaccattggtcacgttgaccacggcaaaaccacgttgaccgcggcgatcaccaagtacttcggcgacttccgcgcctatgaccagattgacggcgcgcccgaagaaaaagcacgtggcatcaccatctcgaccgcacacgttgagtatgagaccgaaggtcgtcactacgcccacgtcgactgcccaggccacgctgactatgtgaaaaacatgatcaccggtgcggcgcagatggacggcgcgatcctggttgtgaacgctgctgatggccccatgccacagacccgcgagcacatcctgctgggccgtcaggtcggcattcccgccatggttgtctacatgaacaaagtagaccaggtggacgatgaagagctgctggaactggttgaaatggaaatccgcgaactgctgtcttcctacgactacccaggcgacgacatccctgtgatcccaggttccgctctggcggcgatggaaggccgtgacgagaacatcggcgagaactccatccgcaagctgatggaagaagtcgacaactacatcccgacaccagagcgcgctgttgaccagccgttcctgatgcctgtggaagacgtcttctcgatctccggtcgtggtacagttgtgaccggccgtgttgagcgtggcgtgatcaacgttggcgacgaaatcgaaatcgtcggcatccgcgacacaaagaaaaccacatgtaccggcgttgaaatgttccgcaaactgctggaccgtggggaagctggcgacaacatcggcgccctgctgcgcggtatcgaccgtgaaggcgttgagcgtggtcaggttctgtgtaagccaggttcggttaagccgcacaccaagttcacagccgaagcctatatcctcaccaaggaagagggtggccgtcacacgccgttcttcgcgaactaccgtccacagttctacttccggaccacagacgtcaccggtaccgttcagctgccagaaggcactgaaatggttatgcctggcgacaacctgcagttcgacgtcgagctgatcgcccccatcgcgatggaagacggtctgcgcttcgcgatccgcgaaggcggtcgtaccgttggcgcgggcgtggtttccaaaatcaccgagtaa

SEQ ID NO: 27308 - protein, 391 aa, Sulfitobacter sp. EE-36
MAKAKFERNKPHVNIGTIGHVDHGKTTLTAAITKYFGDFRAYDQIDGAPEEKARGITISTAHVEYETEGRHYAHVDCPGHADYVKNMITGAAQMDGAILVVNAADGPMPQTREHILLGRQVGIPAMVVYMNKVDQVDDEELLELVEMEIRELLSSYDYPGDDIPVIPGSALAAMEGRDENIGENSIRKLMEEVDNYIPTPERAVDQPFLMPVEDVFSISGRGTVVTGRVERGVINVGDEIEIVGIRDTKKTTCTGVEMFRKLLDRGEAGDNIGALLRGIDREGVERGQVLCKPGSVKPHTKFTAEAYILTKEEGGRHTPFFANYRPQFYFRTTDVTGTVQLPEGTEMVMPGDNLQFDVELIAPIAMEDGLRFAIREGGRTVGAGVVSKITE

SEQ ID NO: 27309 - DNA, 1176 bp, Oceanicola batsensis HTCC2597
  CDS (1)..(1176): transl_table=11
atggcaaaggaaaagttcgaacgcggcaagccgcactgcaacatcggcacgatcggtcacgtcgaccacggcaagacgacgctgacggcggcgatcacgaagtacttcggcgacttccgcgcctatgaccagatcgacggcgcgccggaagagaaggcccgcgggatcaccatctcgaccgcgcatgtggaatacgagacggacaaccgtcactatgcgcatgtcgactgccccggccacgccgactacgtcaagaacatgatcaccggtgccgcccagatggacggcgcgatcctggtggtgaacgcggccgacggcccgatgccgcagacgcgcgagcacatcctgctcggccgtcaggtcggcattccggccatggtcgtcttcctgaacaaggtcgaccaggtggatgacgaggagcttctcgagctcgtcgagatggaagtgcgcgagcttctgtcggaatacgacttcccgggcgacgacgttccgatcatcgcgggctcggcgcttgcggcgatgaacggcgacaatgccgagatcggcgagaacaagatccgcgagctgatggcggccgtggacgagtacatcccgcagcccgagcgggccgtcgaccagccgttcctgatgccgatcgaggacgtgttctcgatctcgggccgcggcaccgtggtcaccggccgcgtcgagcgtggcgtggtgaacgtgggcgacgaactcgagatcgtcgggatcaaggacaccaagaagacgacctgcaccggcgtcgagatgttccgcaagctgctggaccgcggcgaggcgggcgacaacatcggcgcgctgctgcgcggcatcgaccgtgacggcgtggagcggggccaggttctctgcaagcccggctcggtcaagccgcacaccaagttcgaggccgaggtctacatcctgaccaaggacgagggcggccgtcacacgccgttcttcgcgaactaccgtccgcagttctacttccgcacgacggatgtgaccggcaccgtgacgctgcccgagggcaccgagatggtgatgccgggcgacaacctgaagttctcggtcgagctgatcgcgccgatcgcgatggaagacgggctgcgcttcgccatccgcgaaggcggccggaccgtcggttcgggcgtggtctcgaagatcgtcgagtga

SEQ ID NO: 27310 - protein, 391 aa, Oceanicola batsensis HTCC2597
MAKEKFERGKPHCNIGTIGHVDHGKTTLTAAITKYFGDFRAYDQIDGAPEEKARGITISTAHVEYETDNRHYAHVDCPGHADYVKNMITGAAQMDGAILVVNAADGPMPQTREHILLGRQVGIPAMVVFLNKVDQVDDEELLELVEMEVRELLSEYDFPGDDVPIIAGSALAAMNGDNAEIGENKIRELMAAVDEYIPQPERAVDQPFLMPIEDVFSISGRGTVVTGRVERGVVNVGDELEIVGIKDTKKTTCTGVEMFRKLLDRGEAGDNIGALLRGIDRDGVERGQVLCKPGSVKPHTKFEAEVYILTKDEGGRHTPFFANYRPQFYFRTTDVTGTVTLPEGTEMVMPGDNLKFSVELIAPIAMEDGLRFAIREGGRTVGSGVVSKIVE

SEQ ID NO: 27311 - DNA, 1230 bp, Synechococcus sp. WH 5701
  CDS (1)..(1230): transl_table=11
atggctcgcgagaagtttcagaggaacaaacctcacgtcaacatcggcaccatcgggcacgtcgaccacggcaagaccaccctcactgccgccatcaccaacgtgctggcttcccttggccaggccaaggcccaggcctacgacgacatcgatggtgctcctgaagagaaggagcggggcatcacgatcaacacggcccacgtcgagtacgaaacagaaaaccgtcactacgcccacgtcgactgcccgggtcacgcggactacgtcaagaacatgatcaccggtgccgcccagatggacggcgccatcctggtggtggccgccaccgacggcccgatggcccagaccaaggaacacatcctgctggccaagcaggtgggcgttcccgccctggtggtgttcctcaacaagaaggacatggtcgacgacgaggaaatcctcgagctcgtcgaactggaaatgcgtgagctgctcagcagctacgacttccctggtgatgacatccccatcatcgccggttccgccctcaaggccctcgagcacatccagggcggcggcaagggcatccgtggagagaacgagtgggtcgacaagatcctcgatctgatggatgcggtcgacgagtcgatccccgagcctgagcgtgagatcgacaagcccttcctgatggctgtcgaagacgtcttctcgatcaccggtcgtggcaccgtggccaccggccggatcgagcgtggcaaggtgaaagtgggcgaaaccgtccagatcgtgggcatcaaggacacccgcgaaaccaccgtcaccggcgtggaaatgttccgcaagctgctcgacgagggcatggccggagacaacgtcggcctgctcctgcgcggtgtgcagaaggaagacatcgagcgcggcatggtgctggtcaagccgaactcgatcaagccccacaccaagttcgaaggtgaggtctacgtcctcaagaaagaagaaggcggtcgccacactcccttcttcgctggctaccggccccagttctacatccgcaccacggatgtgaccggtcagatcaccgccttcaccgccgacgacggcaccaacgtggagatggtgatgcccggtgaccgcatcaagatgtctgccgagctgatctgcccggtggccattgagcagggcatgcgcttcgccattcgcgaaggcggccgcaccatcggtgccggcgtggtctccaagatcgtcgcctga

SEQ ID NO: 27312 - protein, 409 aa, Synechococcus sp. WH 5701
MAREKFQRNKPHVNIGTIGHVDHGKTTLTAAITNVLASLGQAKAQAYDDIDGAPEEKERGITINTAHVEYETENRHYAHVDCPGHADYVKNMITGAAQMDGAILVVAATDGPMAQTKEHILLAKQVGVPALVVFLNKKDMVDDEEILELVELEMRELLSSYDFPGDDIPIIAGSALKALEHIQGGGKGIRGENEWVDKILDLMDAVDESIPEPEREIDKPFLMAVEDVFSITGRGTVATGRIERGKVKVGETVQIVGIKDTRETTVTGVEMFRKLLDEGMAGDNVGLLLRGVQKEDIERGMVLVKPNSIKPHTKFEGEVYVLKKEEGGRHTPFFAGYRPQFYIRTTDVTGQITAFTADDGTNVEMVMPGDRIKMSAELICPVAIEQGMRFAIREGGRTIGAGVVSKIVA

SEQ ID NO: 27313 - DNA, 1185 bp, Pseudoalteromonas tunicata D2
  CDS (1)..(1185): transl_table=11
atggcaaaagaaaagtttcaacgtacaaaaccgcacgtaaacgtaggtacaatcggccacgttgaccacggtaaaacaactctaactgcagcaatcacaaacgtattagcgaagcattacggtggtcaagcaaaagatttcgcctcaatcgataacgctccagaagagcgcgagcgcggtatcacaatcaatacatcacacgttgagtatgatacaccatcacgtcactacgcacacgtagactgcccaggccatgctgactatgttaaaaacatgatcactggtgctgcacaaatggacggcgctatcctagttgtagctgcaacagatggtccaatgccacaaacacgtgagcacatccttttatctcgccaagtaggcgtaccttacatcatcgtattcatgaacaaatgtgacatggttgatgatgaagagttactagaattagtagagatggaagtacgtgaattattgtctgagtatgatttcccaggtgatgatttaccactaatccaaggttctgcattaagagcgttagaaggcgatgcggcatgggaagagaaaattcttgagttggcagcagctttagattcttacattccagagccagagcgtgcaattgataagccattcatcatgcctatcgaagacgtattctcaatccaaggccgtggtacagtagtaacaggtcgtgtagaagcgggtatcgtaaacgtaggtaacgaagtagcaatcatcggtatcaaagatacagtaattactacttgtactggtgtagaaatgttccgtaaattactagacgaaggtcgtgctggtgagaacattggtgcattgttacgtggaactaaacgtgaagacgtagaacgtggtcaagtattagcaaaaccaggttcaatcacgccacacacaaaattcgtatcagaagtatacgtattaagcaaaaacgaaggtggtcgtcatacaccattcttcaaaggttaccgtccacagttctacttccgtacaacagacgtaacaggtaatgtagagttaccagaaggcgtagaaatggtaatgccaggcgacaacatcaagatgacagtagagttaatctgcccaatcgcgatgaacgaaggcttacgtttcgcaatccgtgagggtggccgtacagtaggtgctggtgtagtagcacaaatcatcgagtaa

SEQ ID NO: 27314 - protein, 394 aa, Pseudoalteromonas tunicata D2
MAKEKFQRTKPHVNVGTIGHVDHGKTTLTAAITNVLAKHYGGQAKDFASIDNAPEERERGITINTSHVEYDTPSRHYAHVDCPGHADYVKNMITGAAQMDGAILVVAATDGPMPQTREHILLSRQVGVPYIIVFMNKCDMVDDEELLELVEMEVRELLSEYDFPGDDLPLIQGSALRALEGDAAWEEKILELAAALDSYIPEPERAIDKPFIMPIEDVFSIQGRGTVVTGRVEAGIVNVGNEVAIIGIKDTVITTCTGVEMFRKLLDEGRAGENIGALLRGTKREDVERGQVLAKPGSITPHTKFVSEVYVLSKNEGGRHTPFFKGYRPQFYFRTTDVTGNVELPEGVEMVMPGDNIKMTVELICPIAMNEGLRFAIREGGRTVGAGVVAQIIE

SEQ ID NO: 27315 - DNA, 1224 bp, Oceanospirillum sp. MED92
  CDS (1)..(1224): transl_table=11
atggctaaagaacaatttgaacgctcaaaaccgcacgttaacgttggtacaatcggccacgttgaccacggtaaaactacactgactgcagctctgacacgcgtatgtgcagaagtatggggcggcgacgctgttgcattcgacggtatcgataacgcaccggaagagcgtgagcgtggtatcacgatcgcgacttctcacgttgagtacgattctccagatcgccactacgcacacgtagactgcccaggacacgctgactacgttaagaacatgatcactggtgctgcacagatggacggcgcgattctggtatgtggtgctacagacggcccaatgccacagactcgtgagcacatcctgctgtctcgtcaggtaggtgtaccttacatcgtagtattcctgaacaaagcagatcttctggctgaagactgtggaggtgcagactctgaagaatatgcagagatgctagagctggtagaaatggaactgcgtgagctgctggatcagtacgaattcccaggtgatgacactccaatcatcccaggttctgctctgatggcgctgaacggccaggacgacaacgaactgggtactacagctgttaagactctggttgagactcttgactcttacatccctgagccagagcgtgctatcgacggtgcattcatcatgcctatcgaggacgtattctctatccagggtcgtggtactgtggtaacaggtcgtgtagagcgtggtatcgttaacgttggtgacgacgttgagatcgtaggtatcaaagaaactacaacgactacttgtactggtgttgagatgttccgtaagctgcttgacgaaggtcgtgcaggtgagaacattggtgcgctgctgcgtggtactaagcgtgaagacgttgagcgtggtcaggtactggctgctccaggttctatcactcctcacactcgtttcgagggtgaagtatacgtactgtccaaagaagaaggtggtcgtcacactccattcttcaaaggctaccgtccacagttctacttccgtacaactgacatcactggtgcttgtgagctgccagagggtgtagaaatggtaatgccaggtgataacgtacagatggacgttaccctgatcaacccagttgcgatggaagaaggtctgcgttttgcgatccgtgaaggcggtcgtacagtaggtgcaggcgttgtatctaaaattgttgaataa

SEQ ID NO: 27316 - protein, 407 aa, Oceanospirillum sp. MED92
MAKEQFERSKPHVNVGTIGHVDHGKTTLTAALTRVCAEVWGGDAVAFDGIDNAPEERERGITIATSHVEYDSPDRHYAHVDCPGHADYVKNMITGAAQMDGAILVCGATDGPMPQTREHILLSRQVGVPYIVVFLNKADLLAEDCGGADSEEYAEMLELVEMELRELLDQYEFPGDDTPIIPGSALMALNGQDDNELGTTAVKTLVETLDSYIPEPERAIDGAFIMPIEDVFSIQGRGTVVTGRVERGIVNVGDDVEIVGIKETTTTTCTGVEMFRKLLDEGRAGENIGALLRGTKREDVERGQVLAAPGSITPHTRFEGEVYVLSKEEGGRHTPFFKGYRPQFYFRTTDITGACELPEGVEMVMPGDNVQMDVTLINPVAMEEGLRFAIREGGRTVGAGVVSKIVE

SEQ ID NO: 27317 - DNA, 1191 bp, delta proteobacterium MLMS-1
  CDS (1)..(1191): transl_table=11
atggccaaggagaaattcgaacggacaaagccgcatgtcaatgtgggcaccatcggtcatattgaccatggcaagacgaccttgacggcggcgatcacgcgggtgttgtcaaacaagggttacgccagtgcgacggcctttgaccagattgacaaggctccggaggagaaggagcgcggggtgacgatttcgacggcgcatgtggagtacgagtcggacaatcgccattacgcgcatgtggactgcccgggccatgccgactatatcaagaacatgatcaccggggcggcccagatggacggggcgattctggtggtgggggccgatgacggtcccatgccgcagacccgtgagcatatcctgctggcccgccaggtgggggtaccctccattgtggtctttttaaacaagtgcgacatggtggacgatccggagctgatcgagctggtggagatggagctgcgggagttgctgagcaagtatgattttcccggcgacgacaccccgatcatccacggcagcgccctgcaggccctggagaaccccgacgatgaagcggcggccaaaccgatctgggatttgatggccgccctggacgattttattccggcgcccgagcgtgatgtggacaagccctttttgatgccggtggaggatgtcttttcgatttccggtcgtggcacggtggccaccggtcgtatcgagcggggcattgtcaaggtgggcgatgagattgagatagtggggatccgtgatacccagaagacgacggtaaccggggtggagatgttccgcaagatcctggacgagggtcaggccggcgacaacgtgggtatcctgttgcgtggcaccaagcgtgaagagattgagcgcggtcaggtcctggccaagcccaagagcatcacgccgcataccaagttcaaggcggagtgctatattctgagtaaggaagagggaggccgtcataccccgtttttcaatggttaccggccgcagttttattttcggaccaccgacgtcaccggggtagtgaccctgggtgagggggtggagatggtaatgcccggtgacaacgtgaccgttgacgcggagttgatcacgcccatagccatggatgagggtctgcgtttcgcgatccgggaaggcggccggacggtgggcgccggggttatcaataagattatttcgtaa

SEQ ID NO: 27318 - protein, 396 aa, delta proteobacterium MLMS-1
MAKEKFERTKPHVNVGTIGHIDHGKTTLTAAITRVLSNKGYASATAFDQIDKAPEEKERGVTISTAHVEYESDNRHYAHVDCPGHADYIKNMITGAAQMDGAILVVGADDGPMPQTREHILLARQVGVPSIVVFLNKCDMVDDPELIELVEMELRELLSKYDFPGDDTPIIHGSALQALENPDDEAAAKPIWDLMAALDDFIPAPERDVDKPFLMPVEDVFSISGRGTVATGRIERGIVKVGDEIEIVGIRDTQKTTVTGVEMFRKILDEGQAGDNVGILLRGTKREEIERGQVLAKPKSITPHTKFKAECYILSKEEGGRHTPFFNGYRPQFYFRTTDVTGVVTLGEGVEMVMPGDNVTVDAELITPIAMDEGLRFAIREGGRTVGAGVINKIIS

SEQ ID NO: 27319 - DNA, 1224 bp, Oceanobacter sp. RED65
  CDS (1)..(1224): transl_table=11
atggctaagggttcttttgaacgtagcaaaccccatgtaaacgtgggcaccatcggtcacgttgaccacggtaaaactacactaacagcagcgctaactcgcgtatgtgctgaagtattcggcggtgaagcggtagcgttcgacggtatcgacaacgcaccagaagagcgtgatcgtggtattaccatcgcgacgtctcacgttgagtatgaatcaacagatcgtcactacgcacacgtagactgcccagggcacgccgactatgttaaaaacatgatcactggtgctgcacagatggacggtgcgatcctagtatgtggcgcgactgacggcccaatgcctcagactcgtgagcacatcctactatctcgtcaggtaggtgtaccttacatcgtagtattcctaaacaaagcagaccttctagcagaagactgtggtggtttcggtactgaagaatacgaagaaatgctagagctagtagacatggaactacgtgacctactatctgagtacgacttcccaggcgacgacacgccaatcgttccaggttcagcgctaatggctctaaacggtcaagacgacaacgaactaggtacaactgcggttaagaaactagtagaaactctagactcttacatcccagaaccagagcgtgcagtagacggtgcattcatcatgccgatcgaagacgtattctctatccaaggtcgtggtactgtagtaacaggccgtgtagagcgtggtatcgttaagactggtgaagaagtagaaatcgtaggtatcaaagaaactacgaagactaccgtaactggtgttgagatgttccgtaagatgcttgacgaaggtcgtgcaggcgagaactgtggtgtactactacgtggtactaagcgtgatgaagtacagcgtggtcaagtattggctcagcctggttcaatcactccacacaccaagttcgaagcagaagtatacgtactaggtaaagatgaaggtggtcgtcacactccattcttcaaaggttaccgtccacagttctacttccgtacaacagacgtaacaggtgagtgtatcctacctgaaggcgtagaaatggtaatgcctggtgacaacgtacagctaactgctgaattgatcgctccaatcgcgatggacgaaggtctacgtttcgcgatccgtgaaggtggtcgtacagtaggtgcgggtgttgttgctaagatcgttgagtaa

SEQ ID NO: 27320 - protein, 407 aa, Oceanobacter sp. RED65
MAKGSFERSKPHVNVGTIGHVDHGKTTLTAALTRVCAEVFGGEAVAFDGIDNAPEERDRGITIATSHVEYESTDRHYAHVDCPGHADYVKNMITGAAQMDGAILVCGATDGPMPQTREHILLSRQVGVPYIVVFLNKADLLAEDCGGFGTEEYEEMLELVDMELRDLLSEYDFPGDDTPIVPGSALMALNGQDDNELGTTAVKKLVETLDSYIPEPERAVDGAFIMPIEDVFSIQGRGTVVTGRVERGIVKTGEEVEIVGIKETTKTTVTGVEMFRKMLDEGRAGENCGVLLRGTKRDEVQRGQVLAQPGSITPHTKFEAEVYVLGKDEGGRHTPFFKGYRPQFYFRTTDVTGECILPEGVEMVMPGDNVQLTAELIAPIAMDEGLRFAIREGGRTVGAGVVAKIVE

SEQ ID NO: 27321 - DNA, 1185 bp, Alteromonadales bacterium TW-7
  CDS (1)..(1185): transl_table=11
atggcaaaagaaaagtttgaacgcgtaaaaccgcacgtaaacgttggtacaatcggccacgttgaccacggtaaaactacactaactgcagcaatcactaacgtacttgcaaaagtatacggcggtgttgctaaagatttcgcatcaatcgataacgctccagaagagcgcgagcgtggtatcactatctcaacttcacacgttgagtacgacacaccaactcgtcactacgcacacgtagattgtcctggtcacgccgattatgttaaaaacatgatcactggtgctgcacaaatggacggcgctatcttagtagtagctgcgactgatggcccaatgccacaaacgcgtgagcacatccttctttctcgtcaggttggcgtaccttacatcatcgtattcatgaacaaatgtgacatggttgatgacgaagagctacttgaactagtagaaatggaagttcgtgaacttctttctgagtacgatttcccaggtgacgacttaccactaattcaaggttctgcacttaaagcacttgaaggcgagaagcaatgggaagacaagattgtagagcttgcagaagcactagattcttacattccagagccagagcgtgacatcgataagccattcatcatgcctatcgaagacgttttctcaatccaaggtcgtggtactgttgtaactggtcgtgttgaagccggtatcatcaacgtgaatgacgaagttgaaatcgttggtatcaaagagactactaagtctacttgtactggtgttgaaatgttccgtaagcttcttgacgaaggtcgtgctggtgagaacattggtgcactactacgtggtactaagcgtgaagacgttgaacgtggtcaagtactagctaagcctggttcaatcaacccacacactacattcacttcagaagtatacgtactttctaaagatgaaggtggtcgtcatactccattcttcaaaggttaccgtccacagttctacttccgtacaactgacgtaactggtgacgtacagttaccagaaggcgtagaaatggtaatgcctggtgataacatcaagatgacagtaactctaatcgcaccaatcgcgatggatgaaggtcttcgttttgctatccgtgaaggtggccgtactgtaggtgctggtgttgtagcaactatcgtagagtaa

SEQ ID NO: 27322 - protein, 394 aa, Alteromonadales bacterium TW-7
MAKEKFERVKPHVNVGTIGHVDHGKTTLTAAITNVLAKVYGGVAKDFASIDNAPEERERGITISTSHVEYDTPTRHYAHVDCPGHADYVKNMITGAAQMDGAILVVAATDGPMPQTREHILLSRQVGVPYIIVFMNKCDMVDDEELLELVEMEVRELLSEYDFPGDDLPLIQGSALKALEGEKQWEDKIVELAEALDSYIPEPERDIDKPFIMPIEDVFSIQGRGTVVTGRVEAGIINVNDEVEIVGIKETTKSTCTGVEMFRKLLDEGRAGENIGALLRGTKREDVERGQVLAKPGSINPHTTFTSEVYVLSKDEGGRHTPFFKGYRPQFYFRTTDVTGDVQLPEGVEMVMPGDNIKMTVTLIAPIAMDEGLRFAIREGGRTVGAGVVATIVE

SEQ ID NO: 27323 - DNA, 1224 bp, marine gamma proteobacterium HTCC2143
  CDS (1)..(1224): transl_table=11
gtggctaaggaaaaatttgaacgcaccaaaccacacgtcaacgttggtactatcggacacgttgaccacggtaaaacaactttaacagcggcactgacgcgcgtagcggcagaggcttctggcggtacggcggttgatttcgccaatatcgataatgcgcctgaagagcgggaacgtggtatcacgatcgctacgtcacacgtagagtatgacactgcagctcgtcactacgctcacgttgattgcccgggacacgctgattatgtcaagaacatgatcactggtgcggcgcaaatggacggagctattttggtctgtggcgcaactgacggccctatgccgcaaacgcgtgagcacattctgttgtcacgacaggttggcgtgccttacgttgttgtctttctgaataaagctgacctgctggctgaagattgtggcggcgctggttctgaagaatataatgaaatgttggaattggttgaaatggagctgcgtgagctgctcgatacttacgagttccctggtgacgatacgccaatcattcctggttctgcgctaatggcgttgaatggggaagatgaaaacgaattgggtactaccgccgttaagaagttgctggatacgctggacacctacatccctgagccagagcgcgcgattgatggtgatttcatcatgccaatcgaagacgtattttctatctctggtcgcggtacggttgttactggtcgtgttgagcgcggtattgttaatacgggtgacgaagtagagattatcggtattcgcgaaacaacatcaacaacctgtacgggtgttgagatgttccgcaagctgcttgacgaaggtcgtgctggtgagaacattggtgcgctgttgcgtggaactaagcgtgaagacgtggagcgtggtcaggtactggctaagccgggttcaattaagccgcacacaacgtttgaagctgaagtgtatgtgttgggtaaagatgaaggtggtcgtcacacgccattctttaagggataccgtccacagttctacttccgtactacggatatcacaggtgcttgtgagttacctgaaggcactgaaatggttatgcctggtgataacgtgcagatgacagtaacgctgatcaatccaattgcgatggatgagggtttacgcttcgcgattcgtgaaggtggtcgtactgttggtgcaggtgttgttgctaagattatcgaataa

SEQ ID NO: 27324 - protein, 407 aa, marine gamma proteobacterium HTCC2143
MAKEKFERTKPHVNVGTIGHVDHGKTTLTAALTRVAAEASGGTAVDFANIDNAPEERERGITIATSHVEYDTAARHYAHVDCPGHADYVKNMITGAAQMDGAILVCGATDGPMPQTREHILLSRQVGVPYVVVFLNKADLLAEDCGGAGSEEYNEMLELVEMELRELLDTYEFPGDDTPIIPGSALMALNGEDENELGTTAVKKLLDTLDTYIPEPERAIDGDFIMPIEDVFSISGRGTVVTGRVERGIVNTGDEVEIIGIRETTSTTCTGVEMFRKLLDEGRAGENIGALLRGTKREDVERGQVLAKPGSIKPHTTFEAEVYVLGKDEGGRHTPFFKGYRPQFYFRTTDITGACELPEGTEMVMPGDNVQMTVTLINPIAMDEGLRFAIREGGRTVGAGVVAKIIE

SEQ ID NO: 27325 - DNA, 1224 bp, marine gamma proteobacterium HTCC2080
  CDS (1)..(1224): transl_table=11
atggcgaaggaagcatttgagcgttcgaagccccacgtaaacgtgggcacgattggacacgtagaccacggtaaaacgacgctaacggcggcgctgacacgtgtgtgttcagaggtatttggtggtgaggcggtagcgtttgacggtattgataacgctccggaagagcgcgagcgtggtatcacgattgcgacttcgcacgtggagtacgagtcgctagaccgtcactacgcgcacgttgactgtcccggacacgcggattatgtgaagaacatgatcacgggtgcggcgcagatggatggtgctattttggtatgcggcgcgaccgatggtcctatgccccagacgcgtgagcacatcttgctgtcacgtcaggttggcgtaccgtacattgtcgttttcctgaacaaagccgatttgttggcggaagactgcggtggcgttgagtcggaagaatttgaagagatgaaagagctggtagagatggagctgcgcgagctgctcgacacctacgagttccccggtgatgacacgccgatcatttgtggttcagcgctgatggcactgaatggcgaagatgcgaacggtttgggtacgacagcggttaagaccttggttgagacgctggatgcgtatattcctgagcctgagcgtgcgattgaccagcctttcttgatgccagttgaggacgtgttctcaatttcaggtcgtggcacggttgtcacgggtcgtgttgagcgtggcattgttaaggtcggagacgagatcgagattatcggcattaaagatactcagaagtcgacgtgtaccggtgtagagatgttccgtaagctgcttgacgaaggccgtgcgggcgagaacgttggcgttttgttgcgtggtactaagcgtgacgacgttgagcgtggtcaggtactggcgattccaggatcagtaaacccccacaccaagtttgaggcagaggtttatgttttgggcaaggatgaaggcgggcgtcacacgccattcttcaagggctaccgtccgcagttttacttccgtaccaccgatgtaacgggtgcgtgtgagttgcctgaaggtattgagatggtaatgccgggtgacaacatccagatggttgtgacgttgattgcaccgattgcgatggaagatggcctgcgttttgcgatccgcgagggtggccgaacggttggcgctggcgtcgtcgctaaaattatcgagtaa

SEQ ID NO: 27326 - protein, 407 aa, marine gamma proteobacterium HTCC2080
MAKEAFERSKPHVNVGTIGHVDHGKTTLTAALTRVCSEVFGGEAVAFDGIDNAPEERERGITIATSHVEYESLDRHYAHVDCPGHADYVKNMITGAAQMDGAILVCGATDGPMPQTREHILLSRQVGVPYIVVFLNKADLLAEDCGGVESEEFEEMKELVEMELRELLDTYEFPGDDTPIICGSALMALNGEDANGLGTTAVKTLVETLDAYIPEPERAIDQPFLMPVEDVFSISGRGTVVTGRVERGIVKVGDEIEIIGIKDTQKSTCTGVEMFRKLLDEGRAGENVGVLLRGTKRDDVERGQVLAIPGSVNPHTKFEAEVYVLGKDEGGRHTPFFKGYRPQFYFRTTDVTGACELPEGIEMVMPGDNIQMVVTLIAPIAMEDGLRFAIREGGRTVGAGVVAKIIE

SEQ ID NO: 27327 - DNA, 1194 bp, Candidatus Desulfococcus oleovorans Hxd3
  CDS (1)..(1194): transl_table=11
atggcaaaggcaaagtttgagcgaaaaaagccgcatgtaaacgtaggtacgatcggccatatcgaccacggcaagacgacgctgaccgcggcgatcacgaagcactgcagcctgaagggctggggcgagtacgtggcgtttgacaagatcgacaaggcgccggaagagcgcgagcgcggtatcaccattgcgacggcccacgtggagtacgagtcggatacgcgacattacgcgcatgtggactgcccgggccacgcggactacattaagaacatgatcaccggcgcggcccagatggacggggcgatcctggtggtgggcgcggacgacggtcccatgccccagacccgtgagcacattctgctggcgcgtcaggtgggtgtgcccaagatcgtggtgtttttgaacaagtgcgacatggtggacgacgaggagctgatcgagctggtggagctggagcttcgggagcttctggataagtatgattttccgggggacgacaccccgatcattcggggcagcgcgttgaaggccctggagagcgacgatccggccagcgacgaggccaagtgcatatttgagctgctggcggccctggactcttacattccggttccggagcgggatacggacaagcccttcctgatgcccattgaggacgtgttcagcatttccggccgtggcacggtggtgacgggccgtatcgagcgcggtatcgtgaaggtgggtgaagagatcgagctggtgggtattcgggatacggccaagacggtgtgcacgggcgttgagatgttccggaagcttctggacgaaggccgcgccggcgataacgtgggcctgctgctgcggggcaccaagcgcgacgaagtggagcggggccaggtagtggcggcgcccaagagcattacgccgcacaccaagttcaaggccgaggtatacattctgagcaaagaggaaggcgggcgtcatacgccgtttttcaccgggtaccgtccgcagttttattttcgtacaacggacgtgacgggcattctgagcctgccggagaacgtggagatggtgatgccgggcgacaacgtgacgattaccggtgagctgatcacccccatcgccatggaaaaggaactgcggtttgccgtccgtgagggcgggcgtaccgtgggcgccggcgttgtcagtgaaattatcgaataa

SEQ ID NO: 27328 - protein, 397 aa, Candidatus Desulfococcus oleovorans Hxd3
MAKAKFERKKPHVNVGTIGHIDHGKTTLTAAITKHCSLKGWGEYVAFDKIDKAPEERERGITIATAHVEYESDTRHYAHVDCPGHADYIKNMITGAAQMDGAILVVGADDGPMPQTREHILLARQVGVPKIVVFLNKCDMVDDEELIELVELELRELLDKYDFPGDDTPIIRGSALKALESDDPASDEAKCIFELLAALDSYIPVPERDTDKPFLMPIEDVFSISGRGTVVTGRIERGIVKVGEEIELVGIRDTAKTVCTGVEMFRKLLDEGRAGDNVGLLLRGTKRDEVERGQVVAAPKSITPHTKFKAEVYILSKEEGGRHTPFFTGYRPQFYFRTTDVTGILSLPENVEMVMPGDNVTITGELITPIAMEKELRFAVREGGRTVGAGVVSEIIE

SEQ ID NO: 27329 - DNA, 1197 bp, Marinobacter sp. ELB17
  CDS (1)..(1197): transl_table=11
gtgtctaaatctaaattcgaacgtaagaagccacacttgaacgtgggcaccattggtcacgttgaccatggtaagaccactctgacagctgccctgactcgtgtatgccacgatgtatggggaacaggttccgcaagtgcttttgaccagatcgacaatgctcctgaagagcgtgcgcgtggtattaccattgctacgtctcacgttgagtacgattccccgaaccgtcactacgcacacgtagattgcccgggccacgctgactatgtgaaaaacatgatcaccggtgcggcgcagatggacggcgctatcctggtttgctccgctgctgacggccctatgccgcagacccgcgagcacatcctgctgtcacgtcaggtaggcgttccttacatcgttgtgttcctgaacaaagcggacatggttgacgatgaagagctgcttgagctggtagaaatggaagtacgcgatctgctggaaatgtacgacttcccggctgacgacactccgatcatcaccggttctgcgttgatggctctggaaggtcgtgatgacaacgaaatgggcactaccgctgttcgtaagctggtagaagcgctggattcgtacatccctgagcctgagcgtgcgattaatctgccgttcctgatgcctatcgaagacgtattctctatctctggccgtggtacagttgtaaccggtcgtatagagcgtggtattgtcaagattggtgaagaagtggaaatcgttggtctcaaagacacggtcaaaacggtttgcaccggcgttgaaatgttccgtaagctgctggacgaaggtcgtgccggcgagaacgttggtgtattgttgcgcggcaccaagcgtgacgacgttgagcgtggtcaggttctgtgtaagccaggcagcatgaagccgcacaccaagtttgagtgcgaagtgtacgtgctgagcaaaaacgaaggcggccgtcatactccgttcttcaagggctatcgcccgcagttctacttccgtaccaccgatgtcaccggtgcttgtgagttgccagaaggcgtagaaatggttatgccgggtgataacgtgaagatggaagtgacgttgattgctccgatcgccatggaagatggtctgcgcttcgcgattcgcgaaggcggccgtaccgtaggcgccggtgttgttgccaagattctcgagtaa

SEQ ID NO: 27330 - protein, 398 aa, Marinobacter sp. ELB17
MSKSKFERKKPHLNVGTIGHVDHGKTTLTAALTRVCHDVWGTGSASAFDQIDNAPEERARGITIATSHVEYDSPNRHYAHVDCPGHADYVKNMITGAAQMDGAILVCSAADGPMPQTREHILLSRQVGVPYIVVFLNKADMVDDEELLELVEMEVRDLLEMYDFPADDTPIITGSALMALEGRDDNEMGTTAVRKLVEALDSYIPEPERAINLPFLMPIEDVFSISGRGTVVTGRIERGIVKIGEEVEIVGLKDTVKTVCTGVEMFRKLLDEGRAGENVGVLLRGTKRDDVERGQVLCKPGSMKPHTKFECEVYVLSKNEGGRHTPFFKGYRPQFYFRTTDVTGACELPEGVEMVMPGDNVKMEVTLIAPIAMEDGLRFAIREGGRTVGAGVVAKILE

SEQ ID NO: 27331 - DNA, 1176 bp, Erythrobacter sp. SD-21
  CDS (1)..(1176): transl_table=11
atggcgaaggaaaaattcgagcgtaacaagccgcacgtcaacgttggcaccatcggccacgtcgaccacggcaagaccacgctgaccgcagcaatcaccaaggttctcggctcggccgtcgatttcgcaaacatcgacaaggctcccgaagagcgtgagcgcggcatcaccatctcgaccgcgcacgtcgaatacgaaaccgacgcgcgtcactacgcacacgtcgactgcccgggtcacgccgactacgtgaagaacatgatcaccggtgcagcccagatggacggcgccatcctggtcgtgaacgcagctgacggcccgatgccgcagacccgcgagcacatcctgcttgcccgccaggtcggcgttccggctctggtcgtgtacatgaacaaggtcgaccaggtcgacgacgaggagatcctcgagctcgtcgaactcgaagttcgtgaactcctcagctcgtacgacttcgacggcgacaacatcgccatcgtcaagggttcggctctggccgctctcgaaggtcgtgatccggaaatcggcgaaaactcgatcaaggaactgatggacgccgttgacgcgaacatcccgacccccgaccgtccggtcgacaaggacttcctgatgccgatcgaagacgtgttctcgatctcgggtcgcggtacggttgtcaccggccgcgtcgaaaccggcgttgtgaacgttggcgacgaagtcgaaatcgtcggcatcaaggacaccaccaagacgaccgtcaccggcgtcgaaatgttccgcaagctgcttgaccgcggtgaagctggcgacaacatcggtgccctgatccgcggcgttggccgtgaagaagtcgagcgtggccaggttctcgcgaagccgggttcggttacgccgcacaccgagttcagcgcagaagtctacgtcctttcgaaggacgaaggtggccgtcacacgccgttcttcgcgaactaccgtccgcagttctacttccgcaccaccgacgtcaccggcgaagtgatccttcccgaaggcaccgaaatggtgatgccgggcgacaacgtgacgatcgacgtcaagctgatcgctccgatcgccatggaccagggcctgcgcttcgcaattcgcgaaggcggcggtacggtcggctcgggcgtcgttggctcgatcaagaagtaa

SEQ ID NO: 27332 - protein, 391 aa, Erythrobacter sp. SD-21
MAKEKFERNKPHVNVGTIGHVDHGKTTLTAAITKVLGSAVDFANIDKAPEERERGITISTAHVEYETDARHYAHVDCPGHADYVKNMITGAAQMDGAILVVNAADGPMPQTREHILLARQVGVPALVVYMNKVDQVDDEEILELVELEVRELLSSYDFDGDNIAIVKGSALAALEGRDPEIGENSIKELMDAVDANIPTPDRPVDKDFLMPIEDVFSISGRGTVVTGRVETGVVNVGDEVEIVGIKDTTKTTVTGVEMFRKLLDRGEAGDNIGALIRGVGREEVERGQVLAKPGSVTPHTEFSAEVYVLSKDEGGRHTPFFANYRPQFYFRTTDVTGEVILPEGTEMVMPGDNVTIDVKLIAPIAMDQGLRFAIREGGGTVGSGVVGSIKK

SEQ ID NO: 27333 - DNA, 1185 bp, Moritella sp. PE36
  CDS (1)..(1185): transl_table=11
gtgtctaaagaaaaatttgtacgtaataaaacccacgtaaacgtaggtacaattggtcacgttgatcatggtaaaacaactctaacagccgctatcacaaatgtacttgcaaaagcattcggtggtgaagctcaagatttcgcatcaatcgataatgctcctgaagaaagagaacgtggtatcacgatcaatacttcacacgtagagtatgatacagaaaaacgtcattatgcacacgtggattgcccaggccatgccgattatgttaaaaacatgatcactggtgctgctcaaatggacggcgctatcttagttgttgctgcaactgatggtcctatgccacaaacacgtgagcacatcctactttctcgtcaggttggcgttccttacatcatcgtattcatgaacaaatgtgatatggttgatgatgaagaactacttgaactagtagaaatggaagttcgtgaacttctttctgaatatgacttcccaggtgatgacctaccagttatccaaggttctgctcttaaagctcttgaaggcgaagctgaatatgaagctaagattcttgaactagctgaagcgttagattcatacatccctgatccagaacgtgctatcgatatgcctttcattatgcctatcgaagacgttttctcaatctctggccgtggtactgttgtaactggtcgtgttgagcaaggtatcgttaacgttggtgattcagtagaaattattggtatccgtgatactcaaactactacttgtactggtgttgaaatgttccgtaaactgcttgacgaaggtcgtgctggtgagaacattggtgcacttctacgtggtactaaacgtgaagatgttgaacgtggtcaagtactagctaagcctggttcaatcactccacatactaagtttgaatctgaagtatacgtactttctaaagaagagggtggtcgtcacactcctttctttaaaggttaccgtccacagttctacttccgtacaactgacatcactggtgctgtagagcttccagaaggtgttgaaatggttatgcctggtgacaaccttaagtttgttgttgagctaatcaacccaatcgcgatggaagaaggtctacgcttcgctatccgtgaaggtggccgtactgttggtgctggtgttgtttctaaagtaatcgcttaa

SEQ ID NO: 27334 - protein, 394 aa, Moritella sp. PE36
MSKEKFVRNKTHVNVGTIGHVDHGKTTLTAAITNVLAKAFGGEAQDFASIDNAPEERERGITINTSHVEYDTEKRHYAHVDCPGHADYVKNMITGAAQMDGAILVVAATDGPMPQTREHILLSRQVGVPYIIVFMNKCDMVDDEELLELVEMEVRELLSEYDFPGDDLPVIQGSALKALEGEAEYEAKILELAEALDSYIPDPERAIDMPFIMPIEDVFSISGRGTVVTGRVEQGIVNVGDSVEIIGIRDTQTTTCTGVEMFRKLLDEGRAGENIGALLRGTKREDVERGQVLAKPGSITPHTKFESEVYVLSKEEGGRHTPFFKGYRPQFYFRTTDITGAVELPEGVEMVMPGDNLKFVVELINPIAMEEGLRFAIREGGRTVGAGVVSKVIA

SEQ ID NO: 27335 - DNA, 1380 bp, Pichia pastoris
  CDS (1)..(1380)
atgggtaaggaaaagttgcacgttaacgtcgttgttattggacacgtcgatgctggtaaatctaccaccaccggtcacttgatctacaagtgtggtggtattgacaagcgtaccatcgagaagtttgaaaaagaggctgaagagctcggtaagggatctttcaagtacgcctgggttttggacaagcttaaggctgagagagagagaggtatcaccatcgacatcgctttgtggaagttcgagactccaaagtaccacgttaccgtcattgacgctccaggtcacagagatttcattaagaacatgattaccggtacttcccaagccgactgtgccattttggtcattgcttccagtattggtgagttcgaggctggtatctccaaggatggtcaaaccagagagcacgctcttttggctttcaccctgggtgtcaagcaattgattgttgccatcaacaagatggactccgtcaaatggtctcaaaagagatacgaggagattgtcaaggaaacttccaacttcatcaagaaggttggttacaaccctaagactgtcccattcgtcccaatttccggatggaacggtgacaacatgattgagccatcttccaactgtgactggtacaagggatgggagaaggagaccaaggctggtggtgctaccaagggtaagaccttgttggaggctattgactccattgacccaccatccagaccaactgacaagcctctgagattgcctttgcaggatgtctacaagattggtggtatcggaactgtgccagtcggtagagttgagaccggtgtcatcaaggctggtatggtcgtcactttcgccccagctggtgtcactaccgaagtcaagtcggtcgagatgcaccacgagcaattggagcaaggtgtcccaggtgacaacgttggattcaacgtcaagaacgtttccgtcaaggaaatcagaagaggtaacgtctgtggtgactccaagaacgacccaccaaaggccgctgaatctttcaacgcccaggtcattatcttgaaccacccaggtcaaatctctgctggttacgctccagttttggactgtcacaccgctcacattgcttgtaagttcgacgagttgattgagaagattgacagaagaaccggtaagaagactgaggagaaccctaagttcatcaagtccggtgacgccgctatcgtcaagttggtcccatctaagccaatgtgtgttgaggccttcactgactacccacctttaggaagattcgctgtcagagacatgagaacaaatgttgctgtcggtgttatcaagtccgttgtcaagactgacaaggctggtaaggtcaccaaggctgctcaaaaggccgctaagaaatag

SEQ ID NO: 27336 - protein, 459 aa, Pichia pastoris
MGKEKLHVNVVVIGHVDAGKSTTTGHLIYKCGGIDKRTIEKFEKEAEELGKGSFKYAWVLDKLKAERERGITIDIALWKFETPKYHVTVIDAPGHRDFIKNMITGTSQADCAILVIASSIGEFEAGISKDGQTREHALLAFTLGVKQLIVAINKMDSVKWSQKRYEEIVKETSNFIKKVGYNPKTVPFVPISGWNGDNMIEPSSNCDWYKGWEKETKAGGATKGKTLLEAIDSIDPPSRPTDKPLRLPLQDVYKIGGIGTVPVGRVETGVIKAGMVVTFAPAGVTTEVKSVEMHHEQLEQGVPGDNVGFNVKNVSVKEIRRGNVCGDSKNDPPKAAESFNAQVIILNHPGQISAGYAPVLDCHTAHIACKFDELIEKIDRRTGKKTEENPKFIKSGDAAIVKLVPSKPMCVEAFTDYPPLGRFAVRDMRTNVAVGVIKSVVKTDKAGKVTKAAQKAAKK

SEQ ID NO: 27337 - DNA, 1191 bp, Herbaspirillum seropedicae
  CDS (1)..(1191): transl_table=11
atggcaaaaggcaagtttgaacggaccaagccgcacgtgaacgtcggcaccatcggtcacgttgaccacggcaagaccaccctgaccgctgcaatcgcaaccgttctgtcgaagaagttcggcggcgaagcgaaggcctacgaccagatcgacgcagcgcctgaagaaaaggcccgcggcatcaccatcaacaccgcgcacgtcgaatacgaaaccgcaaaccgtcactacgcacacgttgactgcccaggccacgccgactatgtgaagaacatgatcaccggcgcagcgcagatggacggcgcgatcctggtgtgctcggccgctgacggcccgatgccccagacccgtgaacacatcctgctgtcccgccaggttggcgtgccttacatcatcgtcttcctgaacaaggctgacatggtggacgacgctgaactgctggaactggtggaaatggaagtccgtgaactgctgtcgaagtacgagttccctggcgacgacctgcccatcgtgaagggttcggccaagctggcgctggaaggcgacaccggtcccctgggcgagcaagccatcatggccctggccgaagcgctggacacctacatcccgaccccggaacgtgccgttgacggtaccttcctgatgccggtggaagacgtgttctcgatctccggccgtggcaccgtggtgaccggtcgcgttgagcgcggcatcatcaaggtcggcgaagaaatcgaaatcgtcggtatcgctgacacccagaagaccacctgcaccggcgtggaaatgttccgcaagctgctggaccaaggtcaagctggcgacaacgttggcgtgctgctgcgcggcaccaagcgtgaagacgtgcagcgtggccaggttctggccaagccgggttcgatcaagccgcacaagcacttcaccggcgagatctatgttctgtcgaaggatgaaggcggccgtcacaccccgttcttcaacaactaccgtccgcagttctacttccgtaccaccgacgtgaccggtgcgatcgaactgccgaaggacaaggaaatggtcatgccgggcgacaacgtgtcgatcaccgtgcaactgatcaacccgatcgctatggaagaaggtctgcgcttcgctatccgtgaaggcggtcgtaccgtcggcgccggcgtggttgccaagatcttcgactaa

SEQ ID NO: 27338 - protein, 396 aa, Herbaspirillum seropedicae
MAKGKFERTKPHVNVGTIGHVDHGKTTLTAAIATVLSKKFGGEAKAYDQIDAAPEEKARGITINTAHVEYETANRHYAHVDCPGHADYVKNMITGAAQMDGAILVCSAADGPMPQTREHILLSRQVGVPYIIVFLNKADMVDDAELLELVEMEVRELLSKYEFPGDDLPIVKGSAKLALEGDTGPLGEQAIMALAEALDTYIPTPERAVDGTFLMPVEDVFSISGRGTVVTGRVERGIIKVGEEIEIVGIADTQKTTCTGVEMFRKLLDQGQAGDNVGVLLRGTKREDVQRGQVLAKPGSIKPHKHFTGEIYVLSKDEGGRHTPFFNNYRPQFYFRTTDVTGAIELPKDKEMVMPGDNVSITVQLINPIAMEEGLRFAIREGGRTVGAGVVAKIFD

SEQ ID NO: 27339 - DNA, 1344 bp, Unknown
  Unidentified
  CDS (1)..(1344)
  misc_feature (48)..(48): y is t or c
  misc_feature (582)..(582): y is t or c
  misc_feature (831)..(831): s is g or c
atgggtaaggagaaggttcacatcaacattgtcgtcattggccatgtygactctggcaagtcgaccaccactggtcacttgatctacaagcttggaggtattgacaagcgtgttatcgagaggtttgaaaaggaggcagctgaaatgaacaagcggtccttcaagtatgcctgggtgttggacaaactgaaggctgagcgtgaacgtggtatcaccattgatattgccttgtggaagtttgagaccaccaggtactactgcactgttattgatgctcctggtcatcgggacttcatcaagaacatgattactggtacctcacaggcagactgtgctgttctcattattgattccaccactggtggttttgaagccggtatctccaaggatggacaaacccgtgagcatgcactgcttgctttcacccttggtgtgaagcagatgatttgctgctgtaacaagatggatgccacaacaccaaagtactccaaggcaaggtacgatgaaatcgtgaaggaagtttcttcctacctgaagaaggttggatacaaccctgataagattccatttgtccccatctcyggctttgagggcgacaatatgatagagaggtctaccaaccttgactggtacaagggcccaactcttcttgaggccctggacatgatcaatgagcccaagaggcccacagacaagccactgcgactccctcttcaggacgtgtacaagattggtgggattggaactgtcccagtgggacgtgtggagactggtgtcctgaagcccggtatggtggtgacctttggcccctctggactgacaactgaagtsaagtctgttgagatgcaccatgagtctctcccagaggctttgcctggtgacaatgttggcttcaacgtgaagaacgttgctgtgaaggatctcaagcgtgggtttgttgcctcaaactccaaggatgaccctgctaaggaggcagccaacttcacctcccaggtcatcatcatgaaccacccgggtcagatcggaaatggctatgcccctgttctggactgccacacctcccacattgctgttaagtttgctgagatactgaccaagattgacaggcgatctggcaaggagcttgagaaagagcccaagttcttgaagaatggtgatgcagggtttgttaagatgattcccaccaagcccatggtggtggagactttctccgagtatcccccacttggtcgttttgctgttcgtgacatgcgtcaaactgttgctgttggagtcatcaagagcgtggagaagaaggatccatctggagccaaggtcaccaagtctgcagcaaagaagaagtga

SEQ ID NO: 27340 - protein, 447 aa, Unknown
  Unidentified
MGKEKVHINIVVIGHVDSGKSTTTGHLIYKLGGIDKRVIERFEKEAAEMNKRSFKYAWVLDKLKAERERGITIDIALWKFETTRYYCTVIDAPGHRDFIKNMITGTSQADCAVLIIDSTTGGFEAGISKDGQTREHALLAFTLGVKQMICCCNKMDATTPKYSKARYDEIVKEVSSYLKKVGYNPDKIPFVPISGFEGDNMIERSTNLDWYKGPTLLEALDMINEPKRPTDKPLRLPLQDVYKIGGIGTVPVGRVETGVLKPGMVVTFGPSGLTTEVKSVEMHHESLPEALPGDNVGFNVKNVAVKDLKRGFVASNSKDDPAKEAANFTSQVIIMNHPGQIGNGYAPVLDCHTSHIAVKFAEILTKIDRRSGKELEKEPKFLKNGDAGFVKMIPTKPMVVETFSEYPPLGRFAVRDMRQTVAVGVIKSVEKKDPSGAKVTKSAAKKK

SEQ ID NO: 27341 - DNA, 1344 bp, Vitis vinifera
  CDS (1)..(1344)
  misc_feature (123)..(123): r is g or a
  misc_feature (348)..(348): y is t or c
  misc_feature (837)..(837): r is g or a
atgggtaaggagaaggtccacattaacattgtggtcattggccatgttgattctggtaagtcaaccacaactggccatctgatctacaagcttggaggaattgacaagcgtgtcattgagcgrtttgaaaaggaggctgctgagatgaataagcggtcattcaagtatgcctgggtgcttgacaagctcaaggctgagcgggagcgtggtatcactattgacattgcattgtggaagtttgagaccaccaaatactactgcacagtcattgatgctcctggacatcgtgacttcatcaagaatatgattactggaacctcccaagctgactgtgctgtccttatcatygactctactactggaggctttgaagctggcatttccaaggatgggcagactcgtgagcatgctctccttgctttcacccttggtgtcaggcagatgatctgctgctgcaacaagatggatgctacaacccctaagtactcaaaggcgagatatgatgaaattgttaaggaagtctcttcctacttgaagaaggttggctacaaccccgacaagattccttttgttcccatctctggtttcgaaggagacaacatgatagagaggtcaaccaaccttgactggtacaagggccccacccttcttgaggcccttgacatggttcaagagccaaagagaccctcagacaagcccctccgactcccacttcaggatgtctacaagattggtggcattggcactgtcccagtgggacgggttgagactggtatcctcaagcctggtatggttgtgacttttggtcccactggactgaccactgaagtaaagtcrgtggagatgcaccatgagtctctcgtggaggctctccccggtgacaatgttgggttcaatgtgaagaatgtggctgtcaaggatctcaagcgtggctttgttgcatcaaactccaaggatgatcctgccaaggaggcagcaaacttcatatcccaggttattatcatgaaccaccctggccagattggcaatggctatgcccctgttctggattgccacacatcccatattgctgtcaagtttgctgagatcatgaccaagattgacagacggtctggtaaggaacttgagaaggagcccaagttcttgaagaatggtgatgcaggtttggttaagatgattcccaccaagcccatggtggttgagaccttctctgagtatccccctctagggcgattcgctgtgagggacatgcgtcagacagtggctgtaggagtcatcaagaacgtggaaaagaaggatccttccggagccaaggtcacaaagtctgctgccaagaagaagtga

SEQ ID NO: 27342 - protein, 447 aa, Vitis vinifera
MGKEKVHINIVVIGHVDSGKSTTTGHLIYKLGGIDKRVIERFEKEAAEMNKRSFKYAWVLDKLKAERERGITIDIALWKFETTKYYCTVIDAPGHRDFIKNMITGTSQADCAVLIIDSTTGGFEAGISKDGQTREHALLAFTLGVRQMICCCNKMDATTPKYSKARYDEIVKEVSSYLKKVGYNPDKIPFVPISGFEGDNMIERSTNLDWYKGPTLLEALDMVQEPKRPSDKPLRLPLQDVYKIGGIGTVPVGRVETGILKPGMVVTFGPTGLTTEVKSVEMHHESLVEALPGDNVGFNVKNVAVKDLKRGFVASNSKDDPAKEAANFISQVIIMNHPGQIGNGYAPVLDCHTSHIAVKFAEIMTKIDRRSGKELEKEPKFLKNGDAGLVKMIPTKPMVVETFSEYPPLGRFAVRDMRQTVAVGVIKNVEKKDPSGAKVTKSAAKKK

SEQ ID NO: 27343 - DNA, 1350 bp, Vitis vinifera
  CDS (1)..(1350)
atggcttccgttgctctcagaaaccctaattctaggcgctttcttccactttcctctaaaatctactcttcctgtcggggatccatctccactcagttctccatctctccaaatgactcaacctcgtctcctccccccactattccatggtggcgatctatgggcaccttcactcgcacaaagcctcatgttaatgtgggaactattgggcatgttgatcatgggaagactacattgactgctgctattacaaaggtgcttgcagaggaaggaaaagcaaaggcagttgccttcgatgaaattgacaaggctcctgaagagaagaagagaggaattacaattgcaacggcccatgtcgagtatgagactgctaagcggcactatgcccatgtggactgtccaggacatgcggattatgtgaagaatatgattactggagctgcccaaatggatggtggtattctggttgtttctgctcctgatgggcccatgccacagacaaaggaacacattctacttgcacgccaggtcggtgtgccatcattggtctgtttcttaaataaagttgatgctactgatgatccagagttagtggaccttgtagaaatggaactccgtgagcttcttagcttctacaagttccctggggatgaaattcccatcattcggggctcggctttgtgcgctttacagggaactaatgaagaaataggaaaacaggctattttgaagttaatggatgctgttgatgagtatattcctgaccctgtgcgacagcttgacaagccttttctaatgccaattgaagatgttttctcaattcagggacgtggaacagtagctactggtcgtgttgaacaaggaacaattaaagttggagaggaagttgagattttggggttaacacagagtggtcctttgaaatccacagtcacaggtgttgagatgtttaagaaaatcttagatcaaggacaagctggtgacaacgtaggtcttcttcttcgtggcctgaaacgggaagacatccagcgtggacaggtcattgccaagcctggtacttgcaaaacatacaagaggtttgaagcggagatatatgtcctgacaaaagatgaaggtggaagacatactgccttcgtcacaaactacagacctcagttttatatgaggactgcagatgtcactgggaaggttcaattgcctgaagaagttaagatggttatgcctggggacaatgttacagcagttttcgagttgatatctgctgttcctcttgaagctggacaaagatttgctttgagagagggaggtaggacagtcggcgcaggtgtagtttccaaagtaataagttga

SEQ ID NO: 27344 - protein, 449 aa, Vitis vinifera
MASVALRNPNSRRFLPLSSKIYSSCRGSISTQFSISPNDSTSSPPPTIPWWRSMGTFTRTKPHVNVGTIGHVDHGKTTLTAAITKVLAEEGKAKAVAFDEIDKAPEEKKRGITIATAHVEYETAKRHYAHVDCPGHADYVKNMITGAAQMDGGILVVSAPDGPMPQTKEHILLARQVGVPSLVCFLNKVDATDDPELVDLVEMELRELLSFYKFPGDEIPIIRGSALCALQGTNEEIGKQAILKLMDAVDEYIPDPVRQLDKPFLMPIEDVFSIQGRGTVATGRVEQGTIKVGEEVEILGLTQSGPLKSTVTGVEMFKKILDQGQAGDNVGLLLRGLKREDIQRGQVIAKPGTCKTYKRFEAEIYVLTKDEGGRHTAFVTNYRPQFYMRTADVTGKVQLPEEVKMVMPGDNVTAVFELISAVPLEAGQRFALREGGRTVGAGVVSKVIS

SEQ ID NO: 27345 - DNA, 1344 bp, Vitis vinifera
  CDS (1)..(1344)
  misc_feature (267)..(267): s is g or c
atgggtaaggagaaggttcacattaatattgtggtcattggtcatgttgactctggaaagtcgaccaccactggtcatttgatatacaagcttggaggtattgacaagcgtgttattgagcggtttgaaaaagaagccgctgaaatgaataaaagatcattcaagtatgcttgggtcttggacaagctcaaggctgagcgtgagcgcggtattaccattgatattgctttgtggaagtttgagaccactaaatattattgcactgtsattgatgctcctgggcatcgtgacttcatcaagaacatgatcactggtacctcacaggctgattgtgctgtgcttatcattgattctaccactggtggttttgaagctggtatttccaaggatggtcagacccgtgagcatgctttgcttgccttcacccttggtgtcaggcaaatgatctgctgttgcaataagatggatgcgacaacaccgaagtactccaagtccaggtatgatgaaattgtgaaggaagtttcttcctatcttaagaaggtcggttacaaccctgataagatcccctttgttccaatctctggatttgagggtgacaacatgattgagcggtcaacaaaccttgactggtacaagggccctaccctccttgaggctcttgacatgattcacgagcccaagaggccctcggacaagccccttcgtctcccactacaggacgtttacaagattggtggcattggcactgttcctgttggtcgtgttgaaactggtattattaaacccggtatggttgtcacctttgggccaagtggactcactactgaagtcaagtcagttgaaatgcaccatgagtctttggtagagggtctgcctggtgacaatgttggtttcaatgtgaagaatgttgctgtcaaggatctaaaacgtggctttgttgcatctaactccaaagatgatcctgcaaaggaagctgccaacttcacagcccaggtcattatcatgaaccatcctggccaaattggaaatggttatgccccagtccttgactgtcacacctcccacattgcggtgaagtttgctgagattacgaccaagattgacaggcggtctggcaaggagcttgagaaggagcccaagttcttgaagaatggtgatgctggatttgttaagatgattccaaccaagcccatggttgtggaaactttctccgagtaccctccacttggccgttttgctgttagggacatgcgtcaaactgttgctgtcggtgttatcaagagtgttgagaagaaggatccaagtggtgccaaggttaccaagtccgctgccaagaagaaatga

SEQ ID NO: 27346 - protein, 447 aa, Vitis vinifera
MGKEKVHINIVVIGHVDSGKSTTTGHLIYKLGGIDKRVIERFEKEAAEMNKRSFKYAWVLDKLKAERERGITIDIALWKFETTKYYCTVIDAPGHRDFIKNMITGTSQADCAVLIIDSTTGGFEAGISKDGQTREHALLAFTLGVRQMICCCNKMDATTPKYSKSRYDEIVKEVSSYLKKVGYNPDKIPFVPISGFEGDNMIERSTNLDWYKGPTLLEALDMIHEPKRPSDKPLRLPLQDVYKIGGIGTVPVGRVETGIIKPGMVVTFGPSGLTTEVKSVEMHHESLVEGLPGDNVGFNVKNVAVKDLKRGFVASNSKDDPAKEAANFTAQVIIMNHPGQIGNGYAPVLDCHTSHIAVKFAEITTKIDRRSGKELEKEPKFLKNGDAGFVKMIPTKPMVVETFSEYPPLGRFAVRDMRQTVAVGVIKSVEKKDPSGAKVTKSAAKKK

SEQ ID NO: 27347 - DNA, 1341 bp, Litchi chinensis
  CDS (1)..(1341)
atgggaaaggaaaaggttcacatcaacattgttgttattggacatgtcgactctgggaagtcgaccactactggtcacttgatctacaagcttggtggtattgacaagcgtgtgattgagaggtttgagaaggaggctgctgagatgaacaagaggtctttcaagtatgcctgggtgcttgacaagcttaaggctgagcgtgagcgtggtattactattgatattgccttgtggaagtttgagaccaataggtactactgcactgttattgatgctcctggacatcgtgacttcattaagaacatgattacgggtacctcacaggctgactgtgctgttcttatcattgactccaccactggtggtttcgaagccggtatttccaaggatggtcagacccgtgagcatgctttgcttgcttttaccctcggtgtcaagcagatgatttgctgctgtaacaagatggacgctactacccccaagtactccaggctaggtacgatgaaattgaaggaagtctcgtcttacttgaagaaggttggatacaaccctgagaaaatcccctttgtccccatctctggatttgagggtgataacatgattgagaggtccaccaacctcgactggtacaagggtccaactctccttgaggctcttgaccagatcaatgaacccaagaggccctcagacaagcccctccgtctcccacttcaggatgtgtacaagattggaggtattggaactgtcccagtgggtcgtgttgagactggtatcatcaagcccggtatagttgtgactttcggcccatctggactgaccactgaggttaagtctgttgagatgcaccatgaagctcttcaggaggctcttccaggtgacaatgttggattcaacgtgaagaatgatgctgtcaaggatctcaagcgtggattcgtcgcatctaactccaaggacgatcctgccaaggaggctgccaacttcacatcacaggtcatcatcatgaaccaccccggacagatcggaaacggatatgccccagtgctcgactgccacacctcccacattgctgtcaagttcgctgaaatcatgaccaagattgacaggcggtcaggtaaggagcttgagaaggagcccaaattcttgaagaacggtgatgctggttacgtgaagatgattcccaccaagcccatggttgttgagacattctcagagtacccaccacttggacgatttgctgtgagagacatgcgacaaaccgttgcagttggtgtgatcaagagtgttgagaagaaggacccaaccggtgccaaggtcaccaaggctgctgccaagaagaagtga

SEQ ID NO: 27348 - protein, 446 aa, Litchi chinensis
MGKEKVHINIVVIGHVDSGKSTTTGHLIYKLGGIDKRVIERFEKEAAEMNKRSFKYAWVLDKLKAERERGITIDIALWKFETNRYYCTVIDAPGHRDFIKNMITGTSQADCAVLIIDSTTGGFEAGISKDGQTREHALLAFTLGVKQMICCCNKMDATTPKYSRLGTMKLKEVSSYLKKVGYNPEKIPFVPISGFEGDNMIERSTNLDWYKGPTLLEALDQINEPKRPSDKPLRLPLQDVYKIGGIGTVPVGRVETGIIKPGIVVTFGPSGLTTEVKSVEMHHEALQEALPGDNVGFNVKNDAVKDLKRGFVASNSKDDPAKEAANFTSQVIIMNHPGQIGNGYAPVLDCHTSHIAVKFAEIMTKIDRRSGKELEKEPKFLKNGDAGYVKMIPTKPMVVETFSEYPPLGRFAVRDMRQTVAVGVIKSVEKKDPTGAKVTKAAAKKK

SEQ ID NO: 27349 - DNA, 1344 bp, Zea mays
  CDS (1)..(1344)
atgggtaaggagaagactcacatcaacattgtggtcattggccatgtcgactctggcaagtcgaccaccactggccacctgatctacaagcttggaggtattgacaagcgagtgattgagaggttcgagaaagaggctgccgagatgaacaagcggtcattcaagtatgcgtgggtgcttgacaagctcaaggctgagcgtgagagaggtattacaattgatattgccctgtggaagttcgagaccaccaagtactactgcactgttattgatgccccgggacaccgtgacttcatcaagaatatgatcactggcacttcccaagctgactgtgctgttcttatcattgactcaaccactggtggttttgaggctggtatctccaaggatggccagacccgtgagcatgctctccttgctttcacacttggtgtgaagcagatgatttgctgctgcaacaagatggatgctactacacccaagtattcaaaggcccgttatgatgagattgtgaaggaagtctcttcctacctgaagaaggttggatacaaccctgataagatccacttcgttccaatctctggttttgaaggtgacaacatgattgagaggtccaccaaccttgactggtacaagggcccaaccctacttgaggctctggacttgatcaatgagccaaagaggccttcagacaagcccctgcgtctcccccttcaggatgtgtacaagattggtggtattggaactgtccctgttggacgtgttgagactggtgtcattaagcctggtatggttgttacttttgggcctactggtcttactactgaggttaagtccgttgagatgcaccatgaggctctccaggaggcccttcccggtgacaatgttggcttcaacgtgaagaatgttgctgtgaaggatctgaagcgtgggtatgtggcctccaactccaaggatgaccctgccaaggaggctgctagctttacctcccaggtcatcatcatgaaccaccctggccagattggcaatggctatgccccagttctggactgccacacctcacacattgctgtcaagtttgctgagctcgttaccaagattgataggcgatccggcaaggagctggagaaggagcccaaatttctcaagaacggtgatgctggtatggtgaagatggttcccactaagcccatggtggtggagaccttttctcagtatcctcctcttggtcgatttgctgtccgtgacatgaggcaaacggtggctgtcggagtcatcaagagtgtggagaagaaggacccaactggagccaaggtgacgaaggctgctgccaagaagaaatga

SEQ ID NO: 27350 - protein, 447 aa, Zea mays
MGKEKTHINIVVIGHVDSGKSTTTGHLIYKLGGIDKRVIERFEKEAAEMNKRSFKYAWVLDKLKAERERGITIDIALWKFETTKYYCTVIDAPGHRDFIKNMITGTSQADCAVLIIDSTTGGFEAGISKDGQTREHALLAFTLGVKQMICCCNKMDATTPKYSKARYDEIVKEVSSYLKKVGYNPDKIHFVPISGFEGDNMIERSTNLDWYKGPTLLEALDLINEPKRPSDKPLRLPLQDVYKIGGIGTVPVGRVETGVIKPGMVVTFGPTGLTTEVKSVEMHHEALQEALPGDNVGFNVKNVAVKDLKRGYVASNSKDDPAKEAASFTSQVIIMNHPGQIGNGYAPVLDCHTSHIAVKFAELVTKIDRRSGKELEKEPKFLKNGDAGMVKMVPTKPMVVETFSQYPPLGRFAVRDMRQTVAVGVIKSVEKKDPTGAKVTKAAAKKK

SEQ ID NO: 27351 - DNA, 1344 bp, Nicotiana tabacum
  CDS (1)..(1344)
atgggtaaagagaaatttcacatcaacattgtggtcattggccacgtcgactctggtaagtccactaccactggtcacttgatctacaagcttggtggtattgacaagcgtgtcattgagaggtttgagaaagaagctgctgagatgaacaagaggtcattcaagtatgcctgggtgcttgacaagctcaaggctgagcgtgagcgtggtatcaccattgatattgccttgtggaagtttgagaccaccaagtactactgcactgtgattgatgctcctggacacagggacttcatcaagaatatgattactggtacctcccaagctgactgtgctgtcctgattattgactccaccactggtggttttgaagctggtatctctaaggatggacagacccgtgaacatgcattgcttgctttcacccttggtgtcaagcaaatgatttgctgctgtaacaagatggatgctaccacccccaagtactccaaggctaggtatgatgaaatcgtgaaggaggtttcttcctacctcaagaaggtaggatacaaccctgataaaatcccctttgtccccatctctggtttcgagggtgataacatgatcgaaagatcaaccaaccttgactggtacaagggcccaactcttcttgaggctcttgaccagatcaatgagcccaagaggccctcagacaagcccctcaggctcccacttcaggatgtgtacaagattggtggtattggtactgtccctgttggtcgtgtggaaaccggtgtgctcaagcctggtatggttgtgacttttggtcccactggtctgaccactgaagttaaatctgttgagatgcaccacgaagctcttcaggaggcacttcctggtgacaatgttggattcaacgtcaagaacgttgcagttaaggatctcaagcgtgggtttgttgcttcaaactccaaggatgacccagctaagggtgctgccagctttacctcccaagtcatcatcatgaaccatccaggacagattggaaatggatatgctccagtgcttgactgccacacctcccacattgctgtcaagtttgcagaaattttgaccaagatcgacaggcgttctggtaaggagattgagaaggagcccaagttcttgaagaatggtgatgctggtatggttaagatgattcccaccaagcccatggttgttgagaccttctctgagtacccaccattgggacgttttgctgtgagggacatgcgtcaaactgttgctgttggtgttatcaagaacgttgacaagaaggacccaactggtgccaaggtcaccaaggctgctcagaagaagaaatga

SEQ ID NO: 27352 - protein, 447 aa, Nicotiana tabacum
MGKEKFHINIVVIGHVDSGKSTTTGHLIYKLGGIDKRVIERFEKEAAEMNKRSFKYAWVLDKLKAERERGITIDIALWKFETTKYYCTVIDAPGHRDFIKNMITGTSQADCAVLIIDSTTGGFEAGISKDGQTREHALLAFTLGVKQMICCCNKMDATTPKYSKARYDEIVKEVSSYLKKVGYNPDKIPFVPISGFEGDNMIERSTNLDWYKGPTLLEALDQINEPKRPSDKPLRLPLQDVYKIGGIGTVPVGRVETGVLKPGMVVTFGPTGLTTEVKSVEMHHEALQEALPGDNVGFNVKNVAVKDLKRGFVASNSKDDPAKGAASFTSQVIIMNHPGQIGNGYAPVLDCHTSHIAVKFAEILTKIDRRSGKEIEKEPKFLKNGDAGMVKMIPTKPMVVETFSEYPPLGRFAVRDMRQTVAVGVIKNVDKKDPTGAKVTKAAQKKK

SEQ ID NO: 27353 - DNA, 1266 bp, Ostreococcus tauri
  CDS (1)..(1266)
atgacggcgacgacgccggggacgacgacgacgacgacgacgcgcggcatcgcgacgtcgtcggcgcgaacgcgcgcggcgtacgatatcaacacgcgaacgaaaccgcacttacacgtgggaacgatcggacacgtcgatcacgggaagacgacgctgacggcggcgatcacgaaggtcatggcggaggctggcggggcgaaggagatcgcgttcgacgcgatcgataaagctccggaggagaaggcgagaggaatcacgatctctacctcgcacgtggagtacgagacggaaaagagacactacgcgcacgttgattgcccgggacacgcggattacgtgaagaacatgatcacgggggcggcgcaaatggatggagggatcctcgtcgtgagcgcggcggatggaccgatgccgcagacgcgagaacacattttgctcgcgcgacaagtcggcgttccgtctctcgtggtgttcatgaacaaggtggacatggtggacgacgaggagctggtggagttggtcgagatggagcttcgcgagttgttgagcttttaccagtttccgggcgacgacattcccatcatcaagggatcggctttgcacgcgttaaagggaacggaagacaagattgggaaggaaaagatcttcgaactcatgaaggccatcgatgagtacattcccgagcccaagcgggcgttggataagcccttctccatgccggtcgaggacgtgtttagcattcaaggtcgcggcaccgtcgccacgggtcgcgtggaacaaggcatcgttcgtacgggtgacgaagtcgacgtcgtcggtatcacggcgacaaagaagaccaccgtcactggcgtcgaaatgttcaagaagacgctcaacgagggtcaagccggagacaactgtggattgctcctccgcggcttgaagcgagaagacgtcttgcgcggtcaagtgctgtgcaagccgggatcgatcaagccccacagtaagttcgaggccgagatttacgttcttaagaaggaagaaggcggtcgtcacacgccgttcttctccaactaccgcccgcaattctttatgcgaaccgcggatattacagggaacatcacccttccggagggtaccgagatggtcatgccgggcgacaacgtcaccgccgtattcgagctcatcaccccgatcgcgatggaacccggtcttcgcttcgcccttcgtgaaggtggtcgtaccgtcggcgccggcgtcgtgtccaaggttctcaactag

SEQ ID NO: 27354 - protein, 421 aa, Ostreococcus tauri
MTATTPGTTTTTTTRGIATSSARTRAAYDINTRTKPHLHVGTIGHVDHGKTTLTAAITKVMAEAGGAKEIAFDAIDKAPEEKARGITISTSHVEYETEKRHYAHVDCPGHADYVKNMITGAAQMDGGILVVSAADGPMPQTREHILLARQVGVPSLVVFMNKVDMVDDEELVELVEMELRELLSFYQFPGDDIPIIKGSALHALKGTEDKIGKEKIFELMKAIDEYIPEPKRALDKPFSMPVEDVFSIQGRGTVATGRVEQGIVRTGDEVDVVGITATKKTTVTGVEMFKKTLNEGQAGDNCGLLLRGLKREDVLRGQVLCKPGSIKPHSKFEAEIYVLKKEEGGRHTPFFSNYRPQFFMRTADITGNITLPEGTEMVMPGDNVTAVFELITPIAMEPGLRFALREGGRTVGAGVVSKVLN

SEQ ID NO: 27355 - DNA, 1629 bp, Ostreococcus tauri
  CDS (1)..(1629)
atgaagacggcgccgacgcaccggacggtgggaaaggaagagatcgcggcgcggcgacgggcggaggagaacgcgaggcatccgggggggggcaagacgagcgcgcgcgggacgttcgcgttcgacgcgccgtctccggacgcggcggcgaaggcggcgaggaagagaggaacgacgagcgcggagacgacgcagacgcgagcggaggggttgacgagagagttcgatgttaaggcgcgcgttggggggggcgatggcgcgttcgatgggtacgaaccgtcgagcgcggaacgcgcggcgtacgcctcggaggacggcgacgtgcacgtggtggtgatgggacacgtcgacgccgggaaatcgacgctgagcggacgcgtcctctacgcgctcaaggctgtggacgatcgcgcggtgcataagaatttaagggacgccaaggcgagcggcaaatcgtccttcgcctgggcgtgggtcatggactctcgaccagaggagcgcgagcgcggggtgacgatcgacgtgagcgtcaaacgatgcacgttagacgaacgtcgacagctcgttgttttggacgcaccaggacacagggatttcgtgccgagcgccatctccggcatggcccaggcggacgccggaattttagtcatcgacggcgccgtgggtggatttgaaaacggattcgaggtcaccaccggtcacactggacaaacacgtgagcacgcgcgcttggcgaaatatcttggtctgcactctctcatcgtagtggtgaacaagatggactgcgtcgagtactcgctcgagcgttttcaacacatcgtcgacgcgctcacgagatttctggtcggcgacgtcggcttcggcgccgagcagttgacgttcgtcccagcttcgggcatggagggagtgaatatatcgccggacgatttcgccttaccggaagtcttgaaggcgtggtaccgaggaccgacgctcgtggacgctcttcggtcgatcaagattccgtcgcgcggcgagcccaagccgcttcgcctaccgatcgcggacgttgtcacggaggttcgttctctcggtgcgaccgcctgtgggggtaagattgagtcgggaagcgtattcaaaggtcaaaaggtgtcgataatgccagcgaacattacagcgacgatcaagtgcatcgagattgacggattacccgtggacttcgccggcgtcggcgcctccgtcgacgtcggattgagtgatgtcgatccgttgcacttgcaagtggggagtgttttgtgccatacggcgtatccgatgacttccacgaacgagatcgagattagtgttctcaccaccgaagttcttcgcgttccgcttctgaagggctccaaggtggtgttgcactcgcacatgctgtcgtgcgacgcgacggtggatcaactcatcgcgcaagtggacgcgctcacaggtgccgtgataaagccgaaccctaggtgtattacgcgcgaacagagcgcaattttgagattgaagacgtcccaaaacgtgtgcgtcgagcccgtcgaagtttctccgacgttgagccgcgttactttgcgaatgggcggtaaaacgatggcagtcggcgtcgttcgcgcgatttggcgatga

SEQ ID NO: 27356 - protein, 542 aa, Ostreococcus tauri
MKTAPTHRTVGKEEIAARRRAEENARHPGGGKTSARGTFAFDAPSPDAAAKAARKRGTTSAETTQTRAEGLTREFDVKARVGGGDGAFDGYEPSSAERAAYASEDGDVHVVVMGHVDAGKSTLSGRVLYALKAVDDRAVHKNLRDAKASGKSSFAWAWVMDSRPEERERGVTIDVSVKRCTLDERRQLVVLDAPGHRDFVPSAISGMAQADAGILVIDGAVGGFENGFEVTTGHTGQTREHARLAKYLGLHSLIVVVNKMDCVEYSLERFQHIVDALTRFLVGDVGFGAEQLTFVPASGMEGVNISPDDFALPEVLKAWYRGPTLVDALRSIKIPSRGEPKPLRLPIADVVTEVRSLGATACGGKIESGSVFKGQKVSIMPANITATIKCIEIDGLPVDFAGVGASVDVGLSDVDPLHLQVGSVLCHTAYPMTSTNEIEISVLTTEVLRVPLLKGSKVVLHSHMLSCDATVDQLIAQVDALTGAVIKPNPRCITREQSAILRLKTSQNVCVEPVEVSPTLSRVTLRMGGKTMAVGVVRAIWR

SEQ ID NO: 27357 - DNA, 1350 bp, Arabidopsis thaliana
  CDS (1)..(1350)
atgggtaaagagaagtttcacatcaacattgtggtcattggccacgtcggttctggaaagtcgaccaccactggacacttgatctacaagttgggtggtattgacaagcgtgtcattgagaggttcgagaaggaggctgctgagatgaacaagaggtccttcaagtacgcatgggttttggacaaacttaaggctgagcgtgagcgtggtatcaccattgacattgctctctggaagttcgagaccaccaagtactactgcactgtcattgatgctcctggccatcgtgatttcatcaagaacatgatcactggtacctcccaggctgattgtgctgtccttatcattgactccaccactggtggttttgaggctggtatctccaaggatggtcagacccgtgagcacgctctacttgctttcacccttggtgtcaagcagatgatctgctgttgtaacaagatggatgccactacccccaagtactccaaggccaggtacgatgaaatcatcaaggaggtgtcttcctacttgaagaaggttggttacaaccccgacaaaatcccatttgtgcccatctctggatttgagggtgacaacatgattgagaggtccaccaaccttgactggtacaagggaccaactctccttgaggctcttgaccagatcaacgagcccaagaggccgtcagacaagccccttcgtctcccacttcaggatgtctacaagattggtggtattggaacggtgccagtgggacgtgttgagactggtatgatcaagcctggtatggttgtgacctttgctcccacaggattgaccactgaggtcaagtctgttgagatgcaccacgagtctcttcttgaggcacttccaggtgacaacgttgggttcaatgttaagaatgttgctgtcaaggatcttaagagagggtacgtcgcatccaactccaaggatgaccctgccaagggtgctgctaacttcacctcccaggtcatcatcatgaaccaccctggtcagattggtaacggttacgccccagtcctggattgccacacctctcacattgcagtcaagttctctgagatcttgaccaagattgacaggcgttctggtaaggagattgagaaggagcccaagttcttgaagaatggtgatgctggtatggtgaagatgactccaaccaagcccatggttgtggagaccttctctgagtacccaccacttggacgtttcgctgtgagggacatgaggcagactgttgcagtcggtgttatcaagagtgttgacaagaaggacccaaccggagccaaggttaccaaggctgccgtcaagaagggtgcgaagtga

SEQ ID NO: 27358 - protein, 449 aa, Arabidopsis thaliana
MGKEKFHINIVVIGHVGSGKSTTTGHLIYKLGGIDKRVIERFEKEAAEMNKRSFKYAWVLDKLKAERERGITIDIALWKFETTKYYCTVIDAPGHRDFIKNMITGTSQADCAVLIIDSTTGGFEAGISKDGQTREHALLAFTLGVKQMICCCNKMDATTPKYSKARYDEIIKEVSSYLKKVGYNPDKIPFVPISGFEGDNMIERSTNLDWYKGPTLLEALDQINEPKRPSDKPLRLPLQDVYKIGGIGTVPVGRVETGMIKPGMVVTFAPTGLTTEVKSVEMHHESLLEALPGDNVGFNVKNVAVKDLKRGYVASNSKDDPAKGAANFTSQVIIMNHPGQIGNGYAPVLDCHTSHIAVKFSEILTKIDRRSGKEIEKEPKFLKNGDAGMVKMTPTKPMVVETFSEYPPLGRFAVRDMRQTVAVGVIKSVDKKDPTGAKVTKAAVKKGAK

SEQ ID NO: 27359 - DNA, 1185 bp, Candidatus Phytoplasma australiense
  CDS (1)..(1185): transl_table=11
atggctaatgaaaaatttataagaaataaacctcatttaaatgttggaactattggacacgtagaccacggaaaaactactttaacagctgcaataactcaagttttatctactcaaggattggctaaaagtaaagcttatgaccaaattgataacgctcctgaagaaagagaacgtggaatcaccatcaaaacttctcacgttgaatatgaaacttctaaaagacattacgctcacgttgactgccctgggcacgctgactatgttaaaaacatgattactggagccgctcaaatggacgctgccattctagttgtttctggtgcagatagtgtaatgcctcaaactagagaacatattttattggctcgccaagttggagttcctaaaattgttgttttcttaaataaatgtgatctttgccctgatgaagaaattttagaattagtggaaatggaagttcgtgaattattatctaaatacgattttccgggtgatgacacaccaattatcagaggatctgctttaaaagctttagaaggtgacgctcattacgttgctcaagttaatgaattaattcaaactttagatacttatattgaagacccagctcgtgaagttgacaaacctttcttaatgccagttgaagatgttttcactattactggtagaggaacagttgttactggtagagttgaaagaggtcaagtagaagctggtgatgagattgaaatcgtaggtttgaaagaaactaaaaaaacaattgtaacagcagtggaaatgtttaaaaaagacctagattttgctcaagcaggtgataacattggtgctttattacgtgggattaaccgagaagacgttcaacgtggacaagttttggctaaaccaggatctgttaaacctcattctaaattcgttgctcaagtttatgttttgaccaaagaagaaggcggccgtcatactgcatttttctcccaatatcgtcctcaattttatttccgtactactgatattacaggggtggttgaattacaaggtgatgttaaaatggttatgccaggagacaacactgaattagttgttactttaaacaaccctattgcaattgaagaaggaactaaattttctattcgtgaaggcggaaaaacagttggcgctggatcagtttctaagattttaaaataa

SEQ ID NO: 27360 - protein, 394 aa, Candidatus Phytoplasma australiense
MANEKFIRNKPHLNVGTIGHVDHGKTTLTAAITQVLSTQGLAKSKAYDQIDNAPEERERGITIKTSHVEYETSKRHYAHVDCPGHADYVKNMITGAAQMDAAILVVSGADSVMPQTREHILLARQVGVPKIVVFLNKCDLCPDEEILELVEMEVRELLSKYDFPGDDTPIIRGSALKALEGDAHYVAQVNELIQTLDTYIEDPAREVDKPFLMPVEDVFTITGRGTVVTGRVERGQVEAGDEIEIVGLKETKKTIVTAVEMFKKDLDFAQAGDNIGALLRGINREDVQRGQVLAKPGSVKPHSKFVAQVYVLTKEEGGRHTAFFSQYRPQFYFRTTDITGVVELQGDVKMVMPGDNTELVVTLNNPIAIEEGTKFSIREGGKTVGAGSVSKILK

SEQ ID NO: 27361 - DNA, 1344 bp, Gymnadenia conopsea
  CDS (1)..(1344)
atgggcaaggaaaaggtacacataagcattgtggtcatcggccatgttgactcaggcaagtcgactaccactgggcatctcatatacaagcttggtgggatcgacaagcgtgtcattgaaagattcgagaaagaggcggctgagatgaacaagaggtcattcaagtacgcctgggttctcgacaagctgaaggccgagcgcgagcgcggcatcaccatcgacatcgccctctggaagttcgagaccaccaagtactactgcacggttattgatgcacccggtcatcgcgattttatcaagaacatgatcaccggcacctcgcgggcggactgcgccgtcctcatcatcgactccacaactggaggcttcgaagccggcatctctaaggatgggcagacgcgtgagcatgctttgctcgccttcactcttggagtcaagcagatgatctgttgctgcaacaagatggatgcaaccacacccaagtactccaaggcaaggtatgaggaaattgtgaaggaagtctcttcttatctgaagaaggttggctacaacccggacaagattgcctttgtgcccatctctggtttcgagggcgacaacatgatcgagagatccgcgaacctcgattggtacaagggtcccacccttctcgatgccctcgacctcatcctggagccgaagaggcccacagacaagcctcttcgcctccctctccaggacgtctacaaaatcggcggcattgggaccgtccccgtcggccgcgtcgagactggtgtcctcaagcccggcatggtcgtcaccttcggccccaccggcctgtctactgaagtaaagtccgtagagatgcaccacgaagccctcctggaagccctcccgggggacaacgtcgggttcaacgtgaagaatattgccgtgaaagatctgaagcggggtttcgtcgcctcgaactcgaaggatgacccggctaaggaggctgcaaacttcacttcccaggtcatcatcatgaaccaccccgggcagatcggcaacggctacgcgccggtgctcgactgccacacctcgcacatcgctgtcaagttcgctgagatcctcaccaagatcgaccggcggtctggcaaggagctcgagaaggagcccaagttcctgaagaacggcgacgcaggtttcgtgaagatgattccgtcgaagcccatggtggtggaaaccttctccgagtatcctccgctcggccgcttcgccgtgagggacatgaggcagacggtggccgtcggcgttatcaagagtgtggagaagaaggagcccagcggcgccaaggtcaccaagtccgccgccaagaagaagtga

SEQ ID NO: 27362 - protein, 447 aa, Gymnadenia conopsea
MGKEKVHISIVVIGHVDSGKSTTTGHLIYKLGGIDKRVIERFEKEAAEMNKRSFKYAWVLDKLKAERERGITIDIALWKFETTKYYCTVIDAPGHRDFIKNMITGTSRADCAVLIIDSTTGGFEAGISKDGQTREHALLAFTLGVKQMICCCNKMDATTPKYSKARYEEIVKEVSSYLKKVGYNPDKIAFVPISGFEGDNMIERSANLDWYKGPTLLDALDLILEPKRPTDKPLRLPLQDVYKIGGIGTVPVGRVETGVLKPGMVVTFGPTGLSTEVKSVEMHHEALLEALPGDNVGFNVKNIAVKDLKRGFVASNSKDDPAKEAANFTSQVIIMNHPGQIGNGYAPVLDCHTSHIAVKFAEILTKIDRRSGKELEKEPKFLKNGDAGFVKMIPSKPMVVETFSEYPPLGRFAVRDMRQTVAVGVIKSVEKKEPSGAKVTKSAAKKK

SEQ ID NO: 27363 - DNA, 1398 bp, Glugea plecoglossi
  CDS (1)..(1398)
atggcagaagaaaaaccaattcttaacgtttgcttcattggacacgtagatagtggaaaaagtaccacagttggtaacttggctttccaactcggtgcaattgacgcacgtaaaatggataagttgaagaaagaagccgaagaacgtggacgtggtacttttagttacgcatatgtaatggatatgtcagctgcagaaagagagagaggtattaccatcacaacatcactcatgaaattggaaacatcaaaacatatgctcaatgtaattgattgcccggggcatcaagatttcatcaagaacatggtaactggtgcagcacaggctgatgttggtgtagtacttgtaccatgcgcaactggtgaattcgaaagttgtatctcaggaggaacactcaaagatcatatcatgatcagtggtgttcttggatgcagaaaattaattgtatgtgtcaacaaagtcgatacaatcgatgaaaagaatagaatttcaagattcgatgaagtcgcaaaagaaatgaaaggtatcattgcaaaatcacatccagataaggatcctataataatccctatttcagggtatctcggaatcaatatcgtcgaaaaaggagacaaatttgagtggttcaaaggatggaaaccagtatctggtgcaggtgattccattttcactcttgaaggagctcttaactcacaaatacctccaccaagaccaattgataaaccacttcgtatgccaattgattcaatccataagattccaggaatcggaatggtctacactggtagagtcagtacaggtgcaatcaagccaggtatggttgtctcatctcaacctacaggtgtagttgctgaagtcaaaacacttgaaattcacaagcaatccagagcagcagtagtatcaggtgaaaattgcggtgtggcattaaaagcagcatcccaaggaaatccagctctaatcaagcctggtcatgttttttcaaatacaaaagattcaccagttgaaattttcgaagcagcaagagcaaaaatagtcgtagttgcacatccaaaaggtatcaaaccaggatattgcccaacaatggatttaggtacacatcacgttccatgccaaataaccaaattcatcagcaagagaatgccaggtatcaaggaagaaatcccatcaccagatgtagtccagaaaggtgagaatgtcacatgcatcattcatcctcagaaacaagttgtcatggaaacattgaaggaagtcccatcactcgcaagatttgctctcagagatgcaggaagaattgtcggaatcggtgcaattgaagcacgatacaccaaggctgaatatgaaacagaagttccatctacaacaggtaagggaagaaaggcaacacgtggtcccggataa

SEQ ID NO: 27364 - protein, 465 aa, Glugea plecoglossi
MAEEKPILNVCFIGHVDSGKSTTVGNLAFQLGAIDARKMDKLKKEAEERGRGTFSYAYVMDMSAAERERGITITTSLMKLETSKHMLNVIDCPGHQDFIKNMVTGAAQADVGVVLVPCATGEFESCISGGTLKDHIMISGVLGCRKLIVCVNKVDTIDEKNRISRFDEVAKEMKGIIAKSHPDKDPIIIPISGYLGINIVEKGDKFEWFKGWKPVSGAGDSIFTLEGALNSQIPPPRPIDKPLRMPIDSIHKIPGIGMVYTGRVSTGAIKPGMVVSSQPTGVVAEVKTLEIHKQSRAAVVSGENCGVALKAASQGNPALIKPGHVFSNTKDSPVEIFEAARAKIVVVAHPKGIKPGYCPTMDLGTHHVPCQITKFISKRMPGIKEEIPSPDVVQKGENVTCIIHPQKQVVMETLKEVPSLARFALRDAGRIVGIGAIEARYTKAEYETEVPSTTGKGRKATRGPG

SEQ ID NO: 27365 - DNA, 1386 bp, Athalia rosae
  CDS (1)..(1386)
atgggaaaggaaaaggtccacattaacatcgtcgtcattggacacgtcgactccggcaagtcaacaaccacaggacatctcatctacaaatgtggtggtatcgacaagcgtactattgagaagtttgagaaggaagcccaggagatgggaaaaggttccttcaagtatgcgtgggttttggacaagctgaaggcagagcgtgaacgtggtatcacgatcgatattgctctgtggaagtttgagactgctaaatactacgttacgatcattgatgcgcccggacacagagatttcattaagaacatgatcactggtacgtcgcaggccgattgtgcggtgctgatcgttgctgccggtactggagaattcgaagctggtatttccaagagcggacaaacccgtgagcatgcgctccttgccttcactcttggtgtcaagcagctcatcgtaggagtcaacaaaatggactccactgaaccacctttctctgaaagtcgatttgaggaaattaagaaggaagtttcttcctacatcaaaaagatcggttacaatccagctgctgtggcattcgtaccaatctctggatggcatggagacaacatgcttgagccatccagcaaaatgccatggttcaaaggatgggctgttgagcgcaaggaaggcaaggctgacggcaagtgcctcatcgaagctcttgacgccattctgccacccagcagacccactgacaaggctctccgtcttcctcttcaggatgtttacaagattggtggtattggaacggtaccagtcggtcgtgttgaaactggtgtccttaaaccaggtactgtcgtcacctttgccccagctggactcacgactgaagtcaagtccgtcgaaatgcaccacgaagctctccttgaagccgttcccggtgacaatgttggtttcaacgtaaagaacgtctccgttaaggaactccgacgtggatacgtcgctggtgatacaaagaacaacccacccaagggagcagctgactttactgctcaggtcatcgtactgaaccaccccggtcagatcagcaacggatacacgcctgtgttggattgccacacagctcacatcgcttgcaagtttgcagagattaaggagaaggttgacagacgtacgggtaaaacaactgaggagaatcctaaggcgatcaaatctggagatgctgctatcgtcaacctggttcccagcaagccaatgtgcgttgaggctttccaggaattcccacctcttggacgtttcgcagttcgtgacatgcgtcaaacagttgctgttggtgtcatcaaggctgtcaacttcaaggatgcctctggcaaggttaccaaggccgccgagaaggcacagaagaagaaataa

SEQ ID NO: 27366 - protein, 461 aa, Athalia rosae
MGKEKVHINIVVIGHVDSGKSTTTGHLIYKCGGIDKRTIEKFEKEAQEMGKGSFKYAWVLDKLKAERERGITIDIALWKFETAKYYVTIIDAPGHRDFIKNMITGTSQADCAVLIVAAGTGEFEAGISKSGQTREHALLAFTLGVKQLIVGVNKMDSTEPPFSESRFEEIKKEVSSYIKKIGYNPAAVAFVPISGWHGDNMLEPSSKMPWFKGWAVERKEGKADGKCLIEALDAILPPSRPTDKALRLPLQDVYKIGGIGTVPVGRVETGVLKPGTVVTFAPAGLTTEVKSVEMHHEALLEAVPGDNVGFNVKNVSVKELRRGYVAGDTKNNPPKGAADFTAQVIVLNHPGQISNGYTPVLDCHTAHIACKFAEIKEKVDRRTGKTTEENPKAIKSGDAAIVNLVPSKPMCVEAFQEFPPLGRFAVRDMRQTVAVGVIKAVNFKDASGKVTKAAEKAQKKK

SEQ ID NO: 27367 - DNA, 1347 bp, Solanum tuberosum
  CDS (1)..(1347)
atgggtaaagagaagattcatatcagcattgttgtcattgggcatgtcgactctggaaagtcgaccactactggtcacttgatctacaagcttggtggcattgacaagcgtgtcatcgagaggtttgagaaagaagcagctgagatgaacaagaggtccttcaagtatgcgtgggtgcttgacaagcttaaggctgagcgtgaacgtggtattactattgatattgccttgtggaagtttgagaccacaaagtactactgcactgtgattgatgcccctggacacagggatttcatcaagaatatgattactggtacctctcaggctgactgtgctgtcctcatcattgactccacaactggtggttttgaagctggtatttccaaggatggacagacccgtgagcacgcattgcttgctttcacccttggtgtcaagcaaatgatttgctgctgtaacaagatggatgctaccactcctaagtactccaaggctaggtatgatgaaattgtgaaggaagtttcttcctacctcaagaaggtaggatacaaccctgacaaaatcccctttgtccccatctctggttttgaaggagacaacatgattgagcgatcaaccaaccttgactggtacaagggcccaaccctacttgatgctcttgaccagattaacgagcccaagaggccctcagacaagcccctccgtcttccacttcaggatgtctacaagattggtggtattggaactgtgcccgtcggtcgtgttgaaactggtgtcattaagcctggtatggtcgtcacttttggtccaactggtctgaccactgaggttaaatctgttgagatgcaccaccacgaggctcttcaggaggcacttcctggtgacaatgttgggttcaacgtcaagaacgttgcagttaaggatcttaagagaggtttcgttgcctccaactccaaagatgacccagcaaagggtgctgcaagcttcactgcccaagttatcatcatgaaccaccctggtcagattggaaacggatatgccccagtgctcgactgccacacctcccacattgctgtcaagttcgctgagatcttgaccaagattgacagacgttctggtaaggaacttgagaaggagcccaagtttttgaagaacggtgatgccggtatggttaagatgattcccaccaagcccatggttgttgagacctttgctgagtacccaccattgggacgttttgctgtgagggacatgcgtcaaactgttgctgttggtgttgtcaagaacgtcgacaagaaagaccctactggtgccaaagtcaccaaggctgcccaaaagaagaagtga

SEQ ID NO: 27368 - protein, 448 aa, Solanum tuberosum
MGKEKIHISIVVIGHVDSGKSTTTGHLIYKLGGIDKRVIERFEKEAAEMNKRSFKYAWVLDKLKAERERGITIDIALWKFETTKYYCTVIDAPGHRDFIKNMITGTSQADCAVLIIDSTTGGFEAGISKDGQTREHALLAFTLGVKQMICCCNKMDATTPKYSKARYDEIVKEVSSYLKKVGYNPDKIPFVPISGFEGDNMIERSTNLDWYKGPTLLDALDQINEPKRPSDKPLRLPLQDVYKIGGIGTVPVGRVETGVIKPGMVVTFGPTGLTTEVKSVEMHHHEALQEALPGDNVGFNVKNVAVKDLKRGFVASNSKDDPAKGAASFTAQVIIMNHPGQIGNGYAPVLDCHTSHIAVKFAEILTKIDRRSGKELEKEPKFLKNGDAGMVKMIPTKPMVVETFAEYPPLGRFAVRDMRQTVAVGVVKNVDKKDPTGAKVTKAAQKKK

SEQ ID NO: 27369 - DNA, 1281 bp, Aspergillus oryzae
  CDS (1)..(1281)
atgtctagcatctccagaaccgccaacctcctcttccgcgctagcagggcctccctgctgcgccctcgcgctgtcaaccctgtgcagcatgttttgggtaaagacagactggctgcccgtggtaccattggtcacgtcgatcacggcaagaccaccttgactgccgctatcaccaagcaccaggcttccaagggcctcgctcagttcctcgagtatggtgctattgataaggcccctgaggagcgtaagcgtggtatcaccatctcgactgctcacattgagttctccaccgaggacaggcactatgcccacgtcgactgccccggtcacgccgattacatcaagaacatgatcactggtgctgctaacatggacggtgctattgttgtcgttgctgcttcggatggtcagatgccccagacccgggagcacttgctgcttgcccgtcaggtcggtgtccagaagatcgtcgttttcgtcaacaagattgatgccgttgaggaccctgagatgttggagcttgtcgagttggaaatgcgcgagctccttagcagctacggcttcgagggcgaagagactcccatcatcttcggttctgctctgtgtgctttggaggaccgtcgccccgacattggtgccgagcgtatcgacgagctcatgaaggctgttgacacctggatccctacccctcagcgtgatcttgacaagcctttcctcatgtctgtcgaggaagtcttctccatcgccggtcgtggtaccgttgcctccggccgtgtcgaacgtggtatcctgaagaaggacagcgaagtcgagatcatcggaggtagcttcgatgctaccaagaccaaggtcaccgacattgagacctttaagaagtcttgtgacgagtctcgcgctggtgacaactctggcttgcttctccgtggtatccgtcgtgaagacgtccgccgcggaatgatcattgctgctcctggcagcaccaaggcccacgaccagttcttggtgtccatgtacgttctcactgaggctgagggtggtcgtcgtactggcttcggctccaactaccgcccccaggtgttcgttcgcactgctgatgaggctgctgacctcagcttccccgacggtgatgagtcccggagggtgatgcctggtgacaacgtcgagatggtcctcaagactcaccgccccattgctgctgaggctggccagcgcttcaacatccgtgagggtggccgtactgttgccactggtctcgttacccgtgtcatggacggaaaataa

SEQ ID NO: 27370 - protein, 426 aa, Aspergillus oryzae
MSSISRTANLLFRASRASLLRPRAVNPVQHVLGKDRLAARGTIGHVDHGKTTLTAAITKHQASKGLAQFLEYGAIDKAPEERKRGITISTAHIEFSTEDRHYAHVDCPGHADYIKNMITGAANMDGAIVVVAASDGQMPQTREHLLLARQVGVQKIVVFVNKIDAVEDPEMLELVELEMRELLSSYGFEGEETPIIFGSALCALEDRRPDIGAERIDELMKAVDTWIPTPQRDLDKPFLMSVEEVFSIAGRGTVASGRVERGILKKDSEVEIIGGSFDATKTKVTDIETFKKSCDESRAGDNSGLLLRGIRREDVRRGMIIAAPGSTKAHDQFLVSMYVLTEAEGGRRTGFGSNYRPQVFVRTADEAADLSFPDGDESRRVMPGDNVEMVLKTHRPIAAEAGQRFNIREGGRTVATGLVTRVMDGK

SEQ ID NO: 27371 - DNA, 1344 bp, Solanum tuberosum
  CDS (1)..(1344)
atgggtaaagagaagattcatatcagcattgttgtcattggacatgtcgactctggaaagtcgaccactactggtcacttgatctacaagcttggtggtattgacaagcgtgtcatcgagaggtttgagaaggaagcggctgagatgaacaagaggtccttcaagtatgcgtgggtgcttgacaagcttaaggctgagcgtgaacgtggtattactattgatattgccttgtggaagtttgagaccacaaagtactactgcactgtgattgatgcccctggacacagggatttcatcaagaacatgattactggtacctctcaggctgactgtgctgtcctcatcattgactccacaactggtggttttgaagctggtatttcgaaggatgggcagacccgtgagcatgcattgcttgctttcacccttggtgtcaagcaaatgatttgctgctgtaacaagatggatgctaccactcctaagtactccaaggctaggtatgatgaaatcgtgaaggaagtttcttcctacctcaagaaggtaggatacaaccctgacaaaatcccctttgtccccatctctggttttgaaggagacaatatgattgagcgatcaaccaaccttgactggtacaagggcccaaccctacttgatgctcttgaccagattaacgagcccaagaggccctcagacaagcccctccgtcttccacttcaggatgtctacaagattggtggtattggaactgtgcccgtcggtcgtgttgaaactggtgtcattaagcctggtatggttgtcacttttggtccaactggtctgaccactgaagttaaatctgttgagatgcaccacgaggctcttctggaggcacttcctggtgacaatgttgggttcaacgtcaagaacgttgcagttaaggatcttaagagaggtttcgttgcctctaactccaaagatgacccagcaaagggtgctgccagcttcactgcccaagttatcatcatgaaccaccctggtcagattggaaacggatatgccccagtgctggactgccacacctcccacatcgctgtcaagtttgctgagatcttgaccaagattgacagacgttctggtaaggaacttgagaaggagcccaagtttttgaagaatggtgatgccggtatggttaagatgattcccaccaagcccatggttgttgagacctttgccgagtacccaccattgggacgttttgctgtgagggacatgcgtcaaactgttgctgttggtgtggtcaagaacgtcgacaagaaagaccctactggtgccaaagtcaccaaggctgcccaaaagaagaagtga

SEQ ID NO: 27372 - protein, 447 aa, Solanum tuberosum
MGKEKIHISIVVIGHVDSGKSTTTGHLIYKLGGIDKRVIERFEKEAAEMNKRSFKYAWVLDKLKAERERGITIDIALWKFETTKYYCTVIDAPGHRDFIKNMITGTSQADCAVLIIDSTTGGFEAGISKDGQTREHALLAFTLGVKQMICCCNKMDATTPKYSKARYDEIVKEVSSYLKKVGYNPDKIPFVPISGFEGDNMIERSTNLDWYKGPTLLDALDQINEPKRPSDKPLRLPLQDVYKIGGIGTVPVGRVETGVIKPGMVVTFGPTGLTTEVKSVEMHHEALLEALPGDNVGFNVKNVAVKDLKRGFVASNSKDDPAKGAASFTAQVIIMNHPGQIGNGYAPVLDCHTSHIAVKFAEILTKIDRRSGKELEKEPKFLKNGDAGMVKMIPTKPMVVETFAEYPPLGRFAVRDMRQTVAVGVVKNVDKKDPTGAKVTKAAQKKK

SEQ ID NO: 27373 - DNA, 1347 bp, Solanum tuberosum
  CDS (1)..(1347)
atgggtaaagagaagattcacatcagtattgtggtcattggtcatgtcgactctggtaagtcgaccacaactggtcacttgatctacaagcttggtggtattgacaagcgtgttattgagaggtttgagaaggaagctgctgagatgaacaagaggtcattcaagtatgcctgggtgcttgacaaacttaaggctgaacgtgagcgtggtatcactattgatattgccttgtggaagtttgagaccactaagtactactgcactgtgattgatgcccccggacacagggactttatcaagaacatgatcactggtacctcccaggccgactgtgctgtcctcattattgactccaccactggtggttttgaagctggtatctctaaagatggtcagacccgtgaacatgcattgcttgctttcacccttggtgtcaagcaaatgatttgctgctgcaacaagatggatgctaccacccccaagtactccaaggctaggtacgatgaaattgtaaaggaagtttcttcgtacctcaagaaggttggttacaaccctgacaaaatcccatttgtccccatctctggttttgaaggagataatatgattgagaggtctaccaacctcgactggtacaagggaccaaccctccttgatgctctcgaccagattaatgagcccaagaggccatcagacaagccactccgtctcccacttcaggatgtttacaagattggtggtattggaactgtcccagttggtcgtgtagagactggtgtgatcaagcctggtatggttgtgacctttggccctactggtttgccaactgaagtcaagtctgttgagatgcaccacgaagctcttcaggaggcgctccctggtgataatgttgggttcaatgttaagaatgttgctgttaaggatctgaagcgtggttttgttgcctcaaactccaaggatgacccagctaagggtgcagccagtttcactgcccaggtcatcatcatgaaccatcctggccagattggaaatggatatgcaccagtgctcgactgcacactttcccacattgctgtcaagtttgctgagatcttgaccaagattgacaggcgttcaggtaaggaacttgagaaggaagctaagttcttgaagaatggtgatgctggtatggttaagatgattcccactaagcccatggttgttgagacctttgccgaatacccaccattgggtcgtttcgctgttcgagacatgaggcaaactgttgctgttggtgttgtcaagaatgttgacaagaaggacccaactggtgccaaggtcaccaaggctgcccagaagaagggaaagtga

SEQ ID NO: 27374 - protein, 448 aa, Solanum tuberosum
MGKEKIHISIVVIGHVDSGKSTTTGHLIYKLGGIDKRVIERFEKEAAEMNKRSFKYAWVLDKLKAERERGITIDIALWKFETTKYYCTVIDAPGHRDFIKNMITGTSQADCAVLIIDSTTGGFEAGISKDGQTREHALLAFTLGVKQMICCCNKMDATTPKYSKARYDEIVKEVSSYLKKVGYNPDKIPFVPISGFEGDNMIERSTNLDWYKGPTLLDALDQINEPKRPSDKPLRLPLQDVYKIGGIGTVPVGRVETGVIKPGMVVTFGPTGLPTEVKSVEMHHEALQEALPGDNVGFNVKNVAVKDLKRGFVASNSKDDPAKGAASFTAQVIIMNHPGQIGNGYAPVLDCTLSHIAVKFAEILTKIDRRSGKELEKEAKFLKNGDAGMVKMIPTKPMVVETFAEYPPLGRFAVRDMRQTVAVGVVKNVDKKDPTGAKVTKAAQKKGK

SEQ ID NO: 27375 - DNA, 1350 bp, Arabidopsis thaliana
  CDS (1)..(1350)
atgggtaaagagaagtttcacattaacattgtggtcattggtcatgttgattctggaaaatcgaccacaactggtcacttgatctataagcttggtggtattgacaagcgtgtcatcgagaggttcgagaaggaggctgctgagatgaacaagaggtccttcaagtacgcatgggtgttggacaaacttaaggccgagcgtgaccgtggtattaccatcgatattgctctatggaagttcgagaccaccaagtactactgcacagtcattgatgccccaggacatcgtgatttcatcaagaacatgattactggtacctcccaggctgattgtgctgttcttatcattgactccaccactggaggttttgaggctggtatctctaaggatggtcagacccgtgagcacgctcttcttgctttcacccttggtgtcaagcagatgatttgctgttgtaacaagatggatgccaccacccccaaatactccaaggctaggtacgatgaaatcatcaaggaggtgtcttcatacctgaagaaggtcggatacaaccctgacaaaatcccatttgtgccaatctctggattcgagggagacaacatgattgagaggtcaaccaaccttgactggtacaagggaccaactcttcttgaggctcttgaccagatcaacgagcccaagaggccatcagacaagccccttcgtcttccacttcaggatgtctacaagattggtggtattggaacggtgccagtgggacgtgttgagactggtatgatcaagcctggtatggttgttacctttgctcccacagggttgaccactgaggttaagtctgttgagatgcaccacgagtctcttcttgaggcacttcccggtgacaatgttggattcaatgtcaagaatgttgctgtcaaggatcttaagagaggatacgttgcctctaactccaaggatgatccagctaagggtgccgccaacttcacctcccaggtcatcatcatgaaccaccctggtcagattggtaacggttacgccccagttctcgattgccacacctctcacattgcagtaaagttctctgagatcttgaccaagattgacagacgttctggtaaggagattgagaaggagcccaagtttttgaagaatggtgacgctggtatggttaagatgaccccaaccaagcccatggttgttgagactttctccgagtacccacctttgggacgtttcgctgttagggacatgaggcagaccgttgctgttggtgttattaagagcgtggacaagaaggacccaactggagccaaggtcaccaaggctgcagtgaagaagggtgccaaatga

SEQ ID NO: 27376 - protein, 449 aa, Arabidopsis thaliana
MGKEKFHINIVVIGHVDSGKSTTTGHLIYKLGGIDKRVIERFEKEAAEMNKRSFKYAWVLDKLKAERDRGITIDIALWKFETTKYYCTVIDAPGHRDFIKNMITGTSQADCAVLIIDSTTGGFEAGISKDGQTREHALLAFTLGVKQMICCCNKMDATTPKYSKARYDEIIKEVSSYLKKVGYNPDKIPFVPISGFEGDNMIERSTNLDWYKGPTLLEALDQINEPKRPSDKPLRLPLQDVYKIGGIGTVPVGRVETGMIKPGMVVTFAPTGLTTEVKSVEMHHESLLEALPGDNVGFNVKNVAVKDLKRGYVASNSKDDPAKGAANFTSQVIIMNHPGQIGNGYAPVLDCHTSHIAVKFSEILTKIDRRSGKEIEKEPKFLKNGDAGMVKMTPTKPMVVETFSEYPPLGRFAVRDMRQTVAVGVIKSVDKKDPTGAKVTKAAVKKGAK

SEQ ID NO: 27377 - DNA, 1347 bp, Gossypium hirsutum
  CDS (1)..(1347)
atgggtaaggagaaggttcacatcaacattgttgtcattggccatgttgactctggaaagtcaaccacaacaggtcacttgatctacaagcttggaggtattgacaagcgtgtgatcgagaggttcgagaaggaagctgctgagatgaacaaaaggtcattcaagtatgcctgggtgctcgacaaattgaaggctgagcgtgagcgtggtatcaccattgatattgccttgtggaagtttgagacgaccaagtactactgcactgtcattgatgctcctggacatcgcgactttattaagaatatgattacgggtacttctcaagctgactgtgctgtccttatcattgactccacaactggaggttttgaagctggtatttccaaggatgggcagacccgtgagcatgctctccttgccttcacccttggtgtcaaacaaatgatttgctgctgcaacaagatggatgccacaacccccaagtactcaaaggcaaggtatgatgaaattgttaaggaagtttcttcttacctgaagaaggttggctacaaccctgagaagattccattcgtccccatctctggttttgagggtgacaacatgattgagaggtccaccaacctcgattggtacaagggtccaaccctccttgaggctcttgaccagatcaatgagcccaagagaccctctgacaagcccctccgtctcccacttcaggatgtctacaagattggtggtattggaactgtcccagtgggtcgtgttgaaactggaatcctcaagcctggaatggttgttacattcggaccttctggattgaccactgaagttaagtctgttgagatgcatcatgaagctcttcaagaggctcttcctggtgacaatgttgggttcaatgtgaagaatgttgctgtcaaggatctcaagcgtggatatgttgcctccaactccaaggatgatcctgccaaggaggcagccaacttcacctcccaagttatcatcatgaaccacccaggacagattggaaatggctatgcaccggtcctcgattgccacacctcccatattgctgtcaagtttgcagagctcttgaccaagattgacaggcgatctggtaaggagcttgagaaggagcctaagttcttgaagaatggtgatgctggtatgattaagatggttccgaccaagcccatgcttgtggaaactttctccgagtaccctccacttggacgttttgccgttagggacatgagacagactgttgctgttggtgtgatcaagagtgtggagaagaaggacccaactggagccaaggtgacgaagtctgctgccaagaagggcaagtga

SEQ ID NO: 27378 - protein, 448 aa, Gossypium hirsutum
MGKEKVHINIVVIGHVDSGKSTTTGHLIYKLGGIDKRVIERFEKEAAEMNKRSFKYAWVLDKLKAERERGITIDIALWKFETTKYYCTVIDAPGHRDFIKNMITGTSQADCAVLIIDSTTGGFEAGISKDGQTREHALLAFTLGVKQMICCCNKMDATTPKYSKARYDEIVKEVSSYLKKVGYNPEKIPFVPISGFEGDNMIERSTNLDWYKGPTLLEALDQINEPKRPSDKPLRLPLQDVYKIGGIGTVPVGRVETGILKPGMVVTFGPSGLTTEVKSVEMHHEALQEALPGDNVGFNVKNVAVKDLKRGYVASNSKDDPAKEAANFTSQVIIMNHPGQIGNGYAPVLDCHTSHIAVKFAELLTKIDRRSGKELEKEPKFLKNGDAGMIKMVPTKPMLVETFSEYPPLGRFAVRDMRQTVAVGVIKSVEKKDPTGAKVTKSAAKKGK

SEQ ID NO: 27379 - DNA, 1350 bp, Gossypium hirsutum
  CDS (1)..(1350)
atgggtaaggagaaggttcacatcaacattgttgtcattggccatgtcgactctgggaagtcaaccacaacgggtcacttgatctacaagcttggaggtattgacaagcgtgtgattgagaggttcgagaaggaagctgctgagatgaacaaaaggtcattcaagtatgcctgggtgcttgataagttgaaggctgagcgtgagcgtggtatcaccattgatattgccttgtggaagtttgagacaaccaagtactactgcactgtcattgatgctcctggacatcgcgacttcattaagaatatgattacgggtacttctcaagctgactgtgctgtccttatcattgactccacaactggaggttttgaagctggtatttccaaggatgggcagacccgtgagcatgctctccttgccttcactcttggtgtcaagcaaatgatttgctgctgcaacaagatggatgccacaacccccaagtactcaaaggcaaggtatgatgaaattgttaaggaagtttattcctacctgaagaaggttggttacaaccctgagaagattccattcgtccccatctctggttttgagggtgacaacatgattgagaggtccaccaacctcgattggtacaagggtccaaccctccttgaggctcttgaccagatcaatgagcccaagagaccctctgacaagcccctccgtctcccacttcaggatgtctacaagatcggtggtattggaactgtccctgtgggtcgtgttgaaaccggtacccttaagcctggaatggttgttacattcggaccttctggattgaccactgaagttaagtctgttgagatgcatcatgaagctcttcaagaggctcttcctggtgacaatgttgggttcaacgtgaagaatgttgctgtcaaggatctcaagcgtggatttgttgcctccaactccaaggatgatcctgccaaggaggcagccaacttcacctcccaagttatcatcatgaaccacccagggcagattggaaatggctatgcaccggtcctagattgccacacctcccatattgctgtcaagtttgcagagctcttgaccaagattgacaggcgatctggtaaggagcttgagaaggagcctaagttcttgaagaatggtgatgctggtatgattaagatggttccgaccaagcccatggttgtcgaaaccttctccgcgtaccctccacttggacgttttgccgttagggacatgagacagactgttgctgttggtgtgatcaagagtgtggagaagaaggacccatctggagccaaggtgaccaagtctgccgccaagaagggtggcaagtga

SEQ ID NO: 27380 - protein, 449 aa, Gossypium hirsutum
MGKEKVHINIVVIGHVDSGKSTTTGHLIYKLGGIDKRVIERFEKEAAEMNKRSFKYAWVLDKLKAERERGITIDIALWKFETTKYYCTVIDAPGHRDFIKNMITGTSQADCAVLIIDSTTGGFEAGISKDGQTREHALLAFTLGVKQMICCCNKMDATTPKYSKARYDEIVKEVYSYLKKVGYNPEKIPFVPISGFEGDNMIERSTNLDWYKGPTLLEALDQINEPKRPSDKPLRLPLQDVYKIGGIGTVPVGRVETGTLKPGMVVTFGPSGLTTEVKSVEMHHEALQEALPGDNVGFNVKNVAVKDLKRGFVASNSKDDPAKEAANFTSQVIIMNHPGQIGNGYAPVLDCHTSHIAVKFAELLTKIDRRSGKELEKEPKFLKNGDAGMIKMVPTKPMVVETFSAYPPLGRFAVRDMRQTVAVGVIKSVEKKDPSGAKVTKSAAKKGGK

SEQ ID NO: 27381 - DNA, 1347 bp, Gossypium hirsutum
  CDS (1)..(1347)
atgggtaaggagaaggttcacatcaacattgttgtcattggccatgttgactctgggaagtcaaccacaacgggtcacttgatctacaagcttggaggtattgacaagcgtgtgattgagaggtttgagaaggaagctgctgagatgaacaaaaggtcattcaagtatgcctgggtgctcgacaagttgaaggctgagcgtgagcgtggtatcaccattgatattgccttgtggaagtttgagacaaccaagtactactgcactgtcattgatgctcctggacatcgtgacttcattaagaatatgattacgggtacttctcaagctgactgtgctgtccttatcattgactccacaactggaggttttgaagctggtatttccaaggatgggcagacccgtgagcatgctctccttgccttcactcttggtgtcaagcaaatgatttgctgctgcaacaagatggatgccacaacccccaagtactcaaaggcaaggtatgatgaaattgttaaggaagtttcttcctacctgaagaaggttggttacaaccctgagaagattccattcgtccccatatctggttttgagggtgacaacatgattgagaggtccaccaacctcgattggtacaagggtccaaccctccttgaggctcttgaccagatcaatgagcccaagagaccctctgacaagcccctccgtctcccacttcaggatgtctacaagatcgggggtattggaactgtcccggtgggtcgtgttgaaaccggtacccttaagcctggaatggttgttacattcggaccttctggattgaccactgaagttaagtctgttgagatgcatcatgaagctcttcaagaagctcttcctggtgacaatgttgggttcaatgtgaaaaatgttgctgtcaaggatctcaagcgtggatttgttgcctccaactccaaggatgatcctgccaaggaggctgccaacttcacctcccaaggtatcatcatgaaccacccaggccagattggaaatggctatgcaccggtcctcgattgccacacctcccacattgctgtcaagtttgcagagctcttgaccaagattgacaggcgatctggtaaggagcttgagaaggagcctaagttcttgaagaatggtgatgctggtatgattaagatggttccgaccaagcccatggttgtggaaaccttctccgagtaccctccacttggacgttttgccgttagggacatgagacagactgttgctgttggtgtaatcaagagtgtggagaagaaggacccaactggagccaaggtgaccaagtctgctgccaagaagggcaagtga

SEQ ID NO: 27382 - protein, 448 aa, Gossypium hirsutum
MGKEKVHINIVVIGHVDSGKSTTTGHLIYKLGGIDKRVIERFEKEAAEMNKRSFKYAWVLDKLKAERERGITIDIALWKFETTKYYCTVIDAPGHRDFIKNMITGTSQADCAVLIIDSTTGGFEAGISKDGQTREHALLAFTLGVKQMICCCNKMDATTPKYSKARYDEIVKEVSSYLKKVGYNPEKIPFVPISGFEGDNMIERSTNLDWYKGPTLLEALDQINEPKRPSDKPLRLPLQDVYKIGGIGTVPVGRVETGTLKPGMVVTFGPSGLTTEVKSVEMHHEALQEALPGDNVGFNVKNVAVKDLKRGFVASNSKDDPAKEAANFTSQGIIMNHPGQIGNGYAPVLDCHTSHIAVKFAELLTKIDRRSGKELEKEPKFLKNGDAGMIKMVPTKPMVVETFSEYPPLGRFAVRDMRQTVAVGVIKSVEKKDPTGAKVTKSAAKKGK

SEQ ID NO: 27383 - DNA, 1344 bp, Gossypium hirsutum
  CDS (1)..(1344)
atgggtaaggagaaggttcacatcaaccttgttgtcattggccatgtcgactctggcaagtcgaccactaccggtcatttgatctacaagcttggtggtattgacaagcgtgtgattgagaggttcgagaaggaggctgctgaaatgaacaaaaggtcattcaagtatgcttgggtgcttgacaagcttaaggctgagcgtgaacgtggtatcaccattgatattgccctgtggaagtttgagaccaccaaatactattgcaccgttattgatgcacctggacaccgtgactttatcaagaacatgattaccggtacctcacaggctgactgtgctgttctcattattgactcgaccactggtggttttgaagctggtatctctaaagatggtcagactcgtgagcatgctttgcttgcttttaccctcggtgttaggcagatgatttgctgctgcaacaagatggatgcaacaaccccaaagtactcaaaggcaaggtttgatgaaattgtcaaggaagtctcttcttatcttaagaaagttggttacaaccctgagaagatcccatttgtcccaatctctggttttgagggtgacaacatgatcgagagatctacaaacctcgattggtacaagggtcctactctccttgaggctcttgaccagatcaccgagcccaagaggccctcggataagccactccgtcttccacttcaggatgtctacaagattggtggtattggaactgtccctgttggtcgtgttgaaactggtgtcctcaaacccggtatggttgttacttttggtcctactggtctgaccactgaagttaagtctgttgagatgcaccatgaatccctcccggaagctttccctggtgacaatgttgggttcaacgttaaaaacgttgctgttaaggatcttaaacgtggttttgttgcttcaaactccaaggatgatccggccaaggaagctgccaacttcacctctcaggttatcatcatgaaccaccctggccaaattggaaatggttatgccccagtcctcgactgccacacctctcacattgctgtcaaattttccgaactgttgaccaagattgacagacgatctggcaaggaactcgagaaggaacccaagttcttgaagaacggtgatgcaggtatggtaaagatgattcccaccaaacccatggttgttgagactttctctgaatacccaccacttggacgttttgctgtccgtgacatgcgccagactgttgccgtcggtgtcatcaagagtgttgagaagaaggacccaactggtgctaaggtcaccaaatctgctgccaagaagaaatga

SEQ ID NO: 27384 - protein, 447 aa, Gossypium hirsutum
MGKEKVHINLVVIGHVDSGKSTTTGHLIYKLGGIDKRVIERFEKEAAEMNKRSFKYAWVLDKLKAERERGITIDIALWKFETTKYYCTVIDAPGHRDFIKNMITGTSQADCAVLIIDSTTGGFEAGISKDGQTREHALLAFTLGVRQMICCCNKMDATTPKYSKARFDEIVKEVSSYLKKVGYNPEKIPFVPISGFEGDNMIERSTNLDWYKGPTLLEALDQITEPKRPSDKPLRLPLQDVYKIGGIGTVPVGRVETGVLKPGMVVTFGPTGLTTEVKSVEMHHESLPEAFPGDNVGFNVKNVAVKDLKRGFVASNSKDDPAKEAANFTSQVIIMNHPGQIGNGYAPVLDCHTSHIAVKFSELLTKIDRRSGKELEKEPKFLKNGDAGMVKMIPTKPMVVETFSEYPPLGRFAVRDMRQTVAVGVIKSVEKKDPTGAKVTKSAAKKK

SEQ ID NO: 27385 - DNA, 1347 bp, Gossypium hirsutum
  CDS (1)..(1347)
atgggtaaggagaaggttcacatcaacattgttgtcattggccatgttgactctggaaagtcaaccacaacgggtcacttgatatacaagcttggaggtattgacaagcgtgtgatcgagaggttcgagaaggaagctgctgagatgaacaaaaggtcattcaagtatgcctgggtgctcgacaagttgaaggctgagcgtgagcgtggtatcaccattgatattgccttgtggaagtttgagacaaccaagtactactgcactgtcattgatgctcctggacatcgcgactttattaagaatatgattacgggtacttctcaagctgactgtgctgtccttatcattgactccacaactggaggttttgaagctggtatttccaaggatgggcagacccgtgagcatgctctccttgccttcacccttggtgtcaagcaaatgatttgctgctgcaacaagatggatgccacaacccccaagtactcaaaggcaaggtatgatgaaattgttaaggaagtttcttcttacctgaagaaggttggttacaaccctgagaagattccattcgtccccatctctggttttgagggtgacaacatgattgagaggtccaccaacctcgattggtacaagggtccaaccctccttgaggctcttgaccagatcaatgagcccaagagaccctctgacaagcccctccgtctcccacttcaggatgtctacaagattggtggtattggaactgtcccagtgggtcgtgttgaaactggaatcctcaagcctggaatggttgttacattcggaccttctggattgaccactgaagttaagtctgttgagatgcatcatgaagctcttcaagaggctcttcctggtgacaatgttgggttcaatgtgaagaatgttgctgtcaaggatctcaagcgtggatttgttgcctccaactccaaggatgatcctgccaaggaggcagccaacttcacctcccaagttatcatcatgaaccacccaggacagattggaaatggctatgcaccggtcctcgattgccacacctcccatattgctgtcaagtttgcagagctcttgaccaagattgacaggcgatctggtaaggagcttgagaaggagcctaagttcttgaagaatggtgatgctggtatgattaagatggttccgaccaagcccatggttgtggaaactttctccgagtaccctccacttggacgttttgccgttagggacatgagacagactgttgctgttggtgtgatcaagagtgtggagaagaaggacccaactggagccaaggtgacgaagtctgctgccaagaagggcaagtga

SEQ ID NO: 27386 - protein, 448 aa, Gossypium hirsutum
MGKEKVHINIVVIGHVDSGKSTTTGHLIYKLGGIDKRVIERFEKEAAEMNKRSFKYAWVLDKLKAERERGITIDIALWKFETTKYYCTVIDAPGHRDFIKNMITGTSQADCAVLIIDSTTGGFEAGISKDGQTREHALLAFTLGVKQMICCCNKMDATTPKYSKARYDEIVKEVSSYLKKVGYNPEKIPFVPISGFEGDNMIERSTNLDWYKGPTLLEALDQINEPKRPSDKPLRLPLQDVYKIGGIGTVPVGRVETGILKPGMVVTFGPSGLTTEVKSVEMHHEALQEALPGDNVGFNVKNVAVKDLKRGFVASNSKDDPAKEAANFTSQVIIMNHPGQIGNGYAPVLDCHTSHIAVKFAELLTKIDRRSGKELEKEPKFLKNGDAGMIKMVPTKPMVVETFSEYPPLGRFAVRDMRQTVAVGVIKSVEKKDPTGAKVTKSAAKKGK

SEQ ID NO: 27387 - DNA, 1344 bp, Gossypium hirsutum
  CDS (1)..(1344)
atgggtaaggagaaggttcacatcaacattgtggtcatcggccatgtcgactctgggaagtctacaaccactggtcatttgatctacaagcttggtggtattgacaagcgtgtgattgagaggtttgagaaggaggctgctgagatgaacaaaaggtcatttaagtatgcatgggtgcttgacaagcttaaggccgaacgtgaacgtggtattaccatcgatattgccctctggaagtttgaaactaccaaatactactgcactgtcattgatgcccctggacaccgtgacttcatcaagaacatgattactggtacctcacaggctgactgtgctgttctcattatcgactcgaccactggtggtttcgaagctggtatctcaaaggatggtcagacacgtgagcatgctttgcttgcgtttacccttggtgtcaagcagatgatttgctgctgcaacaagatggatgcaacaactccaaaatactccaaggcaaggtatgatgaaattgtgaaggaagtctcctcatatcttaagaaagttggttacaaccctgacaagatcccatttgtcccaatctctggatttgagggtgataacatgattgagaggtctaccaaccttgactggtacaagggtcccactctccttgaggctcttgaccagatcaatgagcccaagaggccttcagacaagccacttcggctcccacttcaggatgtctacaagattggtggcattggaactgtccctgttggtcgtgttgagactggtgtccttaagcctggaatggttgtgacctttggcccctctggtctgaccactgaagttaagtctgttgagatgcaccatgaagccctctctgaggctctccccggtgacaatgttggattcaacgtcaagaacgttgctgttaaggatctcaagcgtggtttcgttgcttcaaactctaaggatgatcctgcaaaggaggctgccagcttcacctctcaggtcatcatcatgaaccaccctgggcagattggaaacggatatgccccagtccttgactgccatacctcccacattgctgtgaagttttctgaattgctgaccaagatcgacaggcgatctggaaaggagcttgagaaggagcccaagttcttgaagaatggtgatgcagggatgataaagatggttcccaccaagcctatggttgtggagactttctctgagtacccaccccttggacggtttgctgtcagggacatgcgtcagactgtggctgttggtgtcatcaagagcgttgagaagaaggatccaaccggtgctaaggtcaccaaatctgctgccaagaagaaatga

SEQ ID NO: 27388 - protein, 447 aa, Gossypium hirsutum
MGKEKVHINIVVIGHVDSGKSTTTGHLIYKLGGIDKRVIERFEKEAAEMNKRSFKYAWVLDKLKAERERGITIDIALWKFETTKYYCTVIDAPGHRDFIKNMITGTSQADCAVLIIDSTTGGFEAGISKDGQTREHALLAFTLGVKQMICCCNKMDATTPKYSKARYDEIVKEVSSYLKKVGYNPDKIPFVPISGFEGDNMIERSTNLDWYKGPTLLEALDQINEPKRPSDKPLRLPLQDVYKIGGIGTVPVGRVETGVLKPGMVVTFGPSGLTTEVKSVEMHHEALSEALPGDNVGFNVKNVAVKDLKRGFVASNSKDDPAKEAASFTSQVIIMNHPGQIGNGYAPVLDCHTSHIAVKFSELLTKIDRRSGKELEKEPKFLKNGDAGMIKMVPTKPMVVETFSEYPPLGRFAVRDMRQTVAVGVIKSVEKKDPTGAKVTKSAAKKK

SEQ ID NO: 27389 - DNA, 1347 bp, Gossypium hirsutum
  CDS (1)..(1347)
atgggtaaggagaaggttcacatcaacattgttgtcattggccatgttgactctgggaagtcaaccacaacgggtcacttgatctacaagcttggaggtattgacaagcgtgtgatcgagagattcgagaaggaagctgctgagatgaacaaaaggtcattcaagtatgcctgggtgctcgacaagttgaaggctgagcgtgagcgcggtataaccattgatattgccttgtggaagtttgagacaaccaagtactactgcactgtcattgatgctcctggacatcgcgacttcattaagaatatgattacgggtacttctcaagctgactgtgctgtccttatcattgactccacaactggaggttttgaagctggtatttccaaggatgggcagacccgtgagcatgctctccttgccttcactcttggtgtcaagcaaatgatttgctgctgcaacaagatggatgccacaacccccaagtactcaaaggcaaggtatgatgaaattgttaaggaagtttcttcctacctgaagaaggttggttacaaccctgagaagattccattcgtccccatctctggttttgagggtgacaacatgattgagaggtccaccaacctcgattggtacaagggtccaaccctccttgaggctcttgaccagatcaatgagcccaagagaccctccgacaagcccctccgtctcccacttcaggatgtctacaagatcggtggtattggaactgtcccggtgggtcgtgttgaaactggtacccttaagcctggaatggttgttacattcggaccttctggattgaccactgaagttaagtctgttgagatgcatcatgaagctcttcaagaggctcttcctggtgacaatgttgggttcaacgtgaagaatgttgctgtcaaggatctcaagcgtggatttgttgcctccaactccaaggatgatcctgccaaggaggcagccaacttcacctcccaagttatcatcatgaaccacccagggcagattggaaatggctatgcaccggtcctagattgccacacctcccatattgctgtcaagtttgcagagctcttgaccaagattgacaggcgatctggtaaggagcttgagaaggagcctaagttcttgaagaatggtgatgctggtatgattaagatggttccgaccaagcccatggttgtagaaaccttctccgcgtaccctccacttggacgttttgccgttagggacatgagacagactgttgctgttggtgtgatcaagagtgtggagaagaaggacccaactggagccaaggtgaccaagtctgctgccaagaagggcaagtga

SEQ ID NO: 27390 - protein, 448 aa, Gossypium hirsutum
MGKEKVHINIVVIGHVDSGKSTTTGHLIYKLGGIDKRVIERFEKEAAEMNKRSFKYAWVLDKLKAERERGITIDIALWKFETTKYYCTVIDAPGHRDFIKNMITGTSQADCAVLIIDSTTGGFEAGISKDGQTREHALLAFTLGVKQMICCCNKMDATTPKYSKARYDEIVKEVSSYLKKVGYNPEKIPFVPISGFEGDNMIERSTNLDWYKGPTLLEALDQINEPKRPSDKPLRLPLQDVYKIGGIGTVPVGRVETGTLKPGMVVTFGPSGLTTEVKSVEMHHEALQEALPGDNVGFNVKNVAVKDLKRGFVASNSKDDPAKEAANFTSQVIIMNHPGQIGNGYAPVLDCHTSHIAVKFAELLTKIDRRSGKELEKEPKFLKNGDAGMIKMVPTKPMVVETFSAYPPLGRFAVRDMRQTVAVGVIKSVEKKDPTGAKVTKSAAKKGK

SEQ ID NO: 27391 - DNA, 1344 bp, Gossypium hirsutum
  CDS (1)..(1344)
atgggtaaggaaaagactcacattaacattgtggtcatcggccacgtcgattctgggaaatcaaccaccactggccacctgatttacaagcttggtggtattgacaagcgtgtgattgaaaggttcgagaaagaagctgctgagatgaacaagaggtcattcaagtatgcttgggtgcttgacaagctcaaggctgagcgtgagcgtggtatcaccattgatattgccttgtggaaatttgagaccaccaaatactactgcactgtgattgatgcacctggacaccgtgactttatcaagaatatgattactggtacgtcacaggctgactgtgctgttttgattattgattccaccactggtggttttgaggctggtatctcaaaggatggtcagactcgtgagcacgcattgcttgcttttacccttggtgtcaagcaaatgatttgctgttgcaacaagatggatgccactacccctaaatactcgaaggctaggtatgatgaaattgtgaaggaagtctcttcctacttgaagaaggtgggatacaaccctgacaagattccatttgttcccatttctggttttgagggtgacaacatgattgagaggtctaccaacttggactggtacaagggccctactcttcttgaggctcttgaccagatcaacgagcccaagaggccttcagacaagcctctccgtctcccacttcaggatgtgtacaagattggtggtattggaactgttccagtcggccgtgttgaaaccggtgtcttgaagcctggtatggttgtgacctttggcccgtctggtctgacaactgaagttaagtcagttgagatgcaccatgaagctcttacagaagcacttcccggtgataatgttgggttcaatgttaaaaacgttgctgttaaggatctcaagcgtggttttgttgcatccaactccaaggatgaccctgctaaggaggctgccaacttcacttctcaggtcatcattatgaaccaccctggacaaattggaaatggatatgccccagtccttgactgccacacgtcacacattgctgttaagtttgctgagcttttgaccaagattgacaggcgatctggtaaggagcttgagaaggaacccaagttcttgaagaacggtgatgctggtatgattaagatgattcctaccaagcccatggttgtggagaccttctctgagtacccacccctgggtcgttttgctgtgagggacatgcgtcagaccgtggctgttggtgttatcaagagtgtcgagaagaaggacccaaccggtgccaaggtcaccaagtctgctgctaagaagaagtga

SEQ ID NO: 27392 - protein, 447 aa, Gossypium hirsutum
MGKEKTHINIVVIGHVDSGKSTTTGHLIYKLGGIDKRVIERFEKEAAEMNKRSFKYAWVLDKLKAERERGITIDIALWKFETTKYYCTVIDAPGHRDFIKNMITGTSQADCAVLIIDSTTGGFEAGISKDGQTREHALLAFTLGVKQMICCCNKMDATTPKYSKARYDEIVKEVSSYLKKVGYNPDKIPFVPISGFEGDNMIERSTNLDWYKGPTLLEALDQINEPKRPSDKPLRLPLQDVYKIGGIGTVPVGRVETGVLKPGMVVTFGPSGLTTEVKSVEMHHEALTEALPGDNVGFNVKNVAVKDLKRGFVASNSKDDPAKEAANFTSQVIIMNHPGQIGNGYAPVLDCHTSHIAVKFAELLTKIDRRSGKELEKEPKFLKNGDAGMIKMIPTKPMVVETFSEYPPLGRFAVRDMRQTVAVGVIKSVEKKDPTGAKVTKSAAKKK

SEQ ID NO: 27393 - DNA, 1344 bp, Gossypium hirsutum
  CDS (1)..(1344)
atgggtaaggagaaggttcacatcaacattgtggtcatcggccatgtcgactctgggaagtctacaaccactggtcatttgatctacaagcttggtggtattgacaagcgtgtgattgagaggtttgagaaggaggctgctgagatgaacaaaaggtcatttaagtatgcatgggtgcttgacaagcttaaggccgaacgtgaacgtggtattaccatcgatattgccctctggaagtttgaaactaccaaatactactgcactgtcattgatgcccctggacaccgtgacttcatcaagaacatgattactggtacctcacaggctgactgtgctgttctcattatcgactcgaccactggtggtttcgaagctggtatctcaaaggatggtcagacacgtgagcatgctttgcttgcgtttacccttggtgtcaagcagatgatttgctgctgcaacaagatggatgcaacaactccaaaatactccaaggcaaggtatgatgaaattgtgaaggaagtctcctcatatcttaagaaagttggttacaaccctgacaagatcccatttgtcccaatctctggatttgagggtgataacatgattgagaggtctaccaaccttgactggcacaagggtcccactctccttgaggctcttgaccagatcaatgagcccaagaggccttcagacaagccacttcggctcccacttcaggatgtctacaagattggtggcattggaactgtccctgttggtcgtgttgagactggtgtccttaagcctggaatggttgtgacctttggcccctctggtctgaccactgaagttaagtctgttgagatgcaccatgaagccctctctgaggctctccccggtgacaatgttggattcaacgtcaagaacgttgctgttaaggatctcaagcgtggtttcgttgcttcaaactctaaggatgatcctgcaaaggaggctgccagcttcacctctcaggtcatcatcatgaaccaccctgggcagattggaaacggatatgccccagtccttgactgccatacctcccacattgctgtgaagttttctgaattgctgaccaagatcgacaggcgatctggaaaggagcttgagaaggagcccaagttcttgaagaatggtgatgcagggatgataaagatggttcccaccaagcctatggttgtggagactttctctgagtacccaccccttggacggtttgctgtcagggacatgcgtcagactgtggctgttggtgtcatcaagagcgttgagaagaaggatccaaccggtgctaaggtcaccaaatctgctgccaagaagaaatga

SEQ ID NO: 27394 - protein, 447 aa, Gossypium hirsutum
MGKEKVHINIVVIGHVDSGKSTTTGHLIYKLGGIDKRVIERFEKEAAEMNKRSFKYAWVLDKLKAERERGITIDIALWKFETTKYYCTVIDAPGHRDFIKNMITGTSQADCAVLIIDSTTGGFEAGISKDGQTREHALLAFTLGVKQMICCCNKMDATTPKYSKARYDEIVKEVSSYLKKVGYNPDKIPFVPISGFEGDNMIERSTNLDWHKGPTLLEALDQINEPKRPSDKPLRLPLQDVYKIGGIGTVPVGRVETGVLKPGMVVTFGPSGLTTEVKSVEMHHEALSEALPGDNVGFNVKNVAVKDLKRGFVASNSKDDPAKEAASFTSQVIIMNHPGQIGNGYAPVLDCHTSHIAVKFSELLTKIDRRSGKELEKEPKFLKNGDAGMIKMVPTKPMVVETFSEYPPLGRFAVRDMRQTVAVGVIKSVEKKDPTGAKVTKSAAKKK

SEQ ID NO: 27395 - DNA, 1344 bp, Musa acuminata
  CDS (1)..(1344)
atgggaaaggagaaggttcacatcaacattgtggttattggccatgtcgattctggtaaatcgacaacaactggacatctgatttacaaactcggggggattgacaagcgtgttatcgagaggtttgagaaggaagctgctgagatgaacaagaggtcattcaagtatgcgtgggtgcttgacaagctgaaggctgagcgtgaacgtggtatcactatcgatatcgctctgtggaagtttgagaccacaaagtactattgcactgtcattgatgctcctggacatcgtgatttcatcaagaacatgattactggaacctctcaggccgattgtgctgtcctcattattgattcgacagctggtggttttgaagctggaatttctaaggatgggcagactcgagagcatgcacttctcgctttcactcttggtgtcagacaaatgatttgctgctgtaacaagatggatgccacaacccccaaatattccaaggcaaggtatgatgaaatcatcaaggaggtttcgtcctatcttaagaaggttggttacaatccggagaagattcctttcgtgccaatctctggttttgaaggcgataacatgattgagagatccaccaaccttgactggtacaaaggcccaactctactggaagcccttgacttgatccaagagcccaagcgacccttggacaagccccttcgtctccccctgcagaacgtgtacaagattggaggaattggaactgtgcctgtaggccgtgttgagactggaatcctgaagcctggtatggttgttacctttggtcctacaggtctcacaactgaagttaagtctgtggagatgcaccatgaggcccttcaggaggcctttcccggtgacaatgttggtttcaatgtcaagaatgttgctgtaaaggacctgaagcgtggtttcgttgcctcgaattccaaggatgacccagcaaaggaggctgccaacttcacctcgcaagtcatcattatgaatcatcccggtcaaattgggaatggctatgctcccgttcttgattgtcacacttctcacatagctgtcaagtttgcggagcttctgaccaagattgacaggcgatccggcaaggagctggagaaggaacccaagttcctcaagaatggagatgcaggtttggtgaagatgattccgacaaagccgatggtggtcgagactttcgccgagtactcgcccctgggtaggtttgctgttagagacatgagacagacggttgccgtgggtgttatcaaaagcgtggagaagaaggatcccaccggagccaaggttaccaaagcagcccaaaagaaaaaatga

SEQ ID NO: 27396 - protein, 447 aa, Musa acuminata
MGKEKVHINIVVIGHVDSGKSTTTGHLIYKLGGIDKRVIERFEKEAAEMNKRSFKYAWVLDKLKAERERGITIDIALWKFETTKYYCTVIDAPGHRDFIKNMITGTSQADCAVLIIDSTAGGFEAGISKDGQTREHALLAFTLGVRQMICCCNKMDATTPKYSKARYDEIIKEVSSYLKKVGYNPEKIPFVPISGFEGDNMIERSTNLDWYKGPTLLEALDLIQEPKRPLDKPLRLPLQNVYKIGGIGTVPVGRVETGILKPGMVVTFGPTGLTTEVKSVEMHHEALQEAFPGDNVGFNVKNVAVKDLKRGFVASNSKDDPAKEAANFTSQVIIMNHPGQIGNGYAPVLDCHTSHIAVKFAELLTKIDRRSGKELEKEPKFLKNGDAGLVKMIPTKPMVVETFAEYSPLGRFAVRDMRQTVAVGVIKSVEKKDPTGAKVTKAAQKKK

SEQ ID NO: 27397 - DNA, 1344 bp, Actinidia deliciosa
  CDS (1)..(1344)
atgggtaaagagaaagttcacattaacattgtggtcattggccatgtcgactctgggaagtcaaccaccaccggtcacttgatctacaagcttggaggtattgacaagcgtgtgattgagaggttcgagaaggaggctgctgagatgaacaaacgttcattcaagtacgcctgggtcttggacaagctcaaggctgaacgtgagcgtggtattaccattgatattgcattgtggaagtttgagaccaccaaatactactgcacagtcattgatgctcctggccatcgcgactttatcaagaacatgatcacaggcacctcacaggctgactgtgcagtccttatcattgactccaccactggtgggtttgaagctggtatttccaaggatggtcagacacgtgagcatgctttgcttgccttcacccttggtgtcaagcaaatgatctgctgttgcaataagatggacgcaactaccccaaaatattcgaaggcaaggtatgatgaaattgttaaggaagtctcctcatatctcaagaaggtggggtacaaccctgataagatcccttttgtcccaatctctgggttcgagggtgacaacatgattgagaggtcaaccaaccttgactggtacaagggcccaaccctgcttgacgcccttgacttgattagtgaacccaagaggccgtcggacaagcctcttcgtctcccacttcaggatgtctacaagattggtgggattggcactgtccctgtgggccgtgttgagactggcgttatcaaacctggcatggttgtcacttttggcccaactggtctcaccactgaagtcaagtccgtagaaatgcaccacgaggctctcttggaggcctcgccaggcgacaatgttgggtttaacgtgaagaatgttgccgtcaaagatctcaagcgtgggtttgttgcctcaaattccaaggatgatcctgcaaaggaagctgccaacttcacttcccaggttattatcatgaaccatccaggtcaaattggaaatgggtatgccccggttttggattgccacacctcccacatcgcagttaagtttgctgagcttttgaccaagattgataggaggtctggcaaagagctcgagaaggagcccaagttcttgaagaatggtgactctgggatggtgaagatgattcccaccaaacccatggtggtggagactttctcggagtacccaccgctcggtcgttttgctgtgagagacatgcgtcaaactgtggcggttggtgtcatcaagagcgtggagaagaaggatccgaccggtgccaaggtcaccaaggctgctctgaagaagaagtga

SEQ ID NO: 27398 - protein, 447 aa, Actinidia deliciosa
MGKEKVHINIVVIGHVDSGKSTTTGHLIYKLGGIDKRVIERFEKEAAEMNKRSFKYAWVLDKLKAERERGITIDIALWKFETTKYYCTVIDAPGHRDFIKNMITGTSQADCAVLIIDSTTGGFEAGISKDGQTREHALLAFTLGVKQMICCCNKMDATTPKYSKARYDEIVKEVSSYLKKVGYNPDKIPFVPISGFEGDNMIERSTNLDWYKGPTLLDALDLISEPKRPSDKPLRLPLQDVYKIGGIGTVPVGRVETGVIKPGMVVTFGPTGLTTEVKSVEMHHEALLEASPGDNVGFNVKNVAVKDLKRGFVASNSKDDPAKEAANFTSQVIIMNHPGQIGNGYAPVLDCHTSHIAVKFAELLTKIDRRSGKELEKEPKFLKNGDSGMVKMIPTKPMVVETFSEYPPLGRFAVRDMRQTVAVGVIKSVEKKDPTGAKVTKAALKKK

SEQ ID NO: 27399 - DNA, 1344 bp, Elaeis guineensis var
  CDS (1)..(1344)
atgggtaaggagaaggtccatatcaacattgtcgtcattggtcatgttgactctggcaagtcgaccaccaccgggcatctcatttacaagcttggtggaattgataagcgtgtgattgagagatttgaaaaggaggctgcggaaatgaacaagaggtctttcaagtatgcatgggttttggacaagctgaaggctgagcgtgagcgtggtatcaccattgatattgctctgtggaagtttgagaccaccaagtactactgcacagtcattgatgcacctggtcatcgtgacttcattaagaacatgatcacaggaacctcccaggctgactgtgctgtccttattattgactccactactggtggttttgaggctggtatatcaaaggatgggcagacccgtgagcatgctttgcttgcctttacccttggtgtgaagcagatgatttgctgttgcaacaagatggatgcaactacaccaaagtactccaaggcaaggtatgatgaaattgttaaagaagtgtcctcctacctgaagaaggtaggttacaatcctgagaagattccttttgttcccatctccggttttgaaggtgacaacatgatcgagaggtccacaaacttagattggtacaagggcccaacacttcttgaggctcttgacatgatccaggagcccaagaggccctccgataagccccttcgcctcccacttcaggatgtctacaagattggtggcattggtactgtccccgttggacgtgttgagactggtatcctcaagcctggtatggttgtcacctttggcccaagtggactgactactgaagttaaatctgttgagatgcaccatgaagccttgcaagaggctctccctggtgacaatgtaggatttaacgttaagaatgttgctgtcaaagatctcaagcgtggttttgttgcctccaactcaaaggatgatcctgcaaaggaggctgccagcttcacttctcaggtcatcatcatgaatcacccgggtcagattggtaatggttatgcccctgtgcttgattgccacacctctcacattgctgtcaaattcgctgagatcctcaccaagattgacaggcgatctggcaaggagcttgagaaggagcctaagttccttaagaatggtgatgctggatttgtgaagatgattcccaccaagcctatggtggttgagactttctctcagtatcctcctcttggtcgttttgctgtcagagacatgagacagacggtggctgtgggagtcatcaagagtgttgagaagaaggaccctagtggtgccaaggtcaccaagtctgctgcaaagaagaagtaa

SEQ ID NO: 27400 - protein, 447 aa, Elaeis guineensis var
MGKEKVHINIVVIGHVDSGKSTTTGHLIYKLGGIDKRVIERFEKEAAEMNKRSFKYAWVLDKLKAERERGITIDIALWKFETTKYYCTVIDAPGHRDFIKNMITGTSQADCAVLIIDSTTGGFEAGISKDGQTREHALLAFTLGVKQMICCCNKMDATTPKYSKARYDEIVKEVSSYLKKVGYNPEKIPFVPISGFEGDNMIERSTNLDWYKGPTLLEALDMIQEPKRPSDKPLRLPLQDVYKIGGIGTVPVGRVETGILKPGMVVTFGPSGLTTEVKSVEMHHEALQEALPGDNVGFNVKNVAVKDLKRGFVASNSKDDPAKEAASFTSQVIIMNHPGQIGNGYAPVLDCHTSHIAVKFAEILTKIDRRSGKELEKEPKFLKNGDAGFVKMIPTKPMVVETFSQYPPLGRFAVRDMRQTVAVGVIKSVEKKDPSGAKVTKSAAKKK

SEQ ID NO: 27401 - DNA, 1347 bp, Cichorium intybus
  CDS (1)..(1347)
  misc_feature (756)..(756): n is a, g, c or t
  misc_feature (931)..(931): n is a, g, c or t
  misc_feature (956)..(956): n is a, g, c or t
  misc_feature (1083)..(1083): n is a, g, c or t
  misc_feature (1221)..(1221): n is a, g, c or t
atgggtaaggaaaagattcacattagcattgtcgtcatcggacatgtcgactccggcaagtctacaaccaccggtcacttgatctacaagcttggaggtatcgacaagcgtgtgatcgaacgtttcgagaaggaagccgctgagatgaacaaacgttcattcaagtacgcatgggtgctcgacaaacttaaggccgagcgtgaacgtggtatcaccatcgatatcgctctatggaagttcgaaacaaccaagtactactgcacagtcatcgatgcccccggacatcgtgatttcatcaagaacatgattactggtacctcccaggccgattgtgccgtcctcatcatcgactccaccactggtggtttcgaagctggtatctccaaggacggtcagacccgtgagcacgctcttcttgccttcacccttggtgtgaaacaaatgatctgctgttgtaacaagatggatgccactacccccaagtactccaagtccaggtacgaggaaatcgtgaaggaagtttcatcatacttgaagaaggtcggatacaacccagacaaaatcccattcgtcccaatctccggattcgaaggtgacaacatgattgagaggtcaaccaaccttgactggtacaagggaccaactctccttgacgctcttgaccagatcaacgagcccaagagaccatcagacaagcccctccgtctcccacttcaagacgtgtacaagatcggtggtattggaactgtgccagtncggcgtgttgaaactggtgtcatcaagccaggtatgtcgtcaccttcggtccatctggttgaccacgagtcaaagtccgttgagatgcaccacgaacgttgcttgaagcctcttcccggagacaatgtcggattcaatgtcaaagaacgttctgtgatggatctcaagcgtgggnatgttgcttccaactccagggacgnccctgctaaaggtgctgctagtttcacttcccaggtcatcatcatgaaccaccctggtcagatcggaaatggttatgctccggtgctcgattgccacacatcccacattgctgttaaattccaaganctgttgaccaagattgacagacgatctggaaaggagcttgagaaggagcctaagtttttgaagaacggagatgctggtatggttaagatgattccaaccaagcctatggtggtggagacttttgctgagtaccccccncttggaaggtttgccgtgagggacatgcgtcagacggttgctgttggtgttaccaagaatgttgacaagaaggacccgactggagctaaggtgaccaaggctgcagccaagaagggagtgaagtga

SEQ ID NO: 27402 - protein, 448 aa, Cichorium intybus
  misc_feature (311)..(311): The Xaa at location 311 stands for Asn, Asp, His, or Tyr.
  misc_feature (319)..(319): The Xaa at location 319 stands for Ala, Asp, Gly, or Val.
  misc_feature (361)..(361): The Xaa at location 361 stands for Asp, or Glu.
MGKEKIHISIVVIGHVDSGKSTTTGHLIYKLGGIDKRVIERFEKEAAEMNKRSFKYAWVLDKLKAERERGITIDIALWKFETTKYYCTVIDAPGHRDFIKNMITGTSQADCAVLIIDSTTGGFEAGISKDGQTREHALLAFTLGVKQMICCCNKMDATTPKYSKSRYEEIVKEVSSYLKKVGYNPDKIPFVPISGFEGDNMIERSTNLDWYKGPTLLDALDQINEPKRPSDKPLRLPLQDVYKIGGIGTVPVRRVETGVIKPGMSSPSVHLVDHESKSVEMHHERCLKPLPGDNVGFNVKERSVMDLKRGXVASNSRDXPAKGAASFTSQVIIMNHPGQIGNGYAPVLDCHTSHIAVKFQXLLTKIDRRSGKELEKEPKFLKNGDAGMVKMIPTKPMVVETFAEYPPLGRFAVRDMRQTVAVGVTKNVDKKDPTGAKVTKAAAKKGVK

SEQ ID NO: 27403 - DNA, 1389 bp, Mytilus galloprovincialis
  CDS (1)..(1389)
atggggaaggaaaagattcatatcaacattgtcgtcattggtcacgtcgactctggaaagtcaacatcaactggccatttgatttacaaatgtggtggaatcgacaaaagaaccattgaaaaattcgagaaggaagcagctgagatgggaaaaggctccttcaagtacgcctgggttttggacaaactgaaggctgagcgtgaacgtggtattaccattgacattgctttgtggaagtttgagaccaccaaatactatgttaccattattgatgccccaggacatagagatttcatcaagaacatgatcactggtacatctcaagctgattgtgctgtgttgattgttgcatctggtactggtgaatttgaagctggtatctcatctaacggtcagaccagagaacacgccctattggctttcactcttggtgtcaaacagatgattgtcggagtcaacaagatggacaacactgaaccaccatacagtgaagcccgattcatggaaatccagaaggaagtcagcagttacttgaaaaaaattggatataatccaaaatgtgtagcttttgttccaatttctggatggcacggagacaacatgattgagtcatctgaaaagatgggttggtacaaggggtgggccattgaaaggaaagaaggaaatgccagtggcaagaccttattcgaggctcttgattctatcctcccaccatcaagacccacagacaaagctctccgtctcccactccaggatgtttacaaaattggaggtattggaacagtgccagtaggtagagtagaaactggaatcatcaaaccaggtatggttgttacctttgctccagccaacatcagtactgaagtaaagtccgtagaaatgcaccacgagtctctcccagaagctttaccaggagacaatgttggtttcaacgtaaagaacgtctctgtcaaggaaattcgtagaggaatggtctgtggtgacagcaaaaatgacccacccaagggagccaaaagttttgttgcacaggtcatcatcttgaaccaccctggagaaattaagaatggatatgcgccagtcttggattgtcatacagctcatattgcctgtaaatttgttgaaatcaaagaaaagatcgacagaagaagtggaaagaaacttgaagaattcccaaaattcatcaaatctggggatgctggtatcgttgacatgacaccatcaaagcctatgtgtgttgaatccttccaaacatatgccccattaggacgttttgctgtccgagacatgagacagactgtcgccgtaggagtcatcaaagaagttacaaaggcagagcctgccagtggcaaggttaccaaatctgcagcaaaggccggtggcaagaaatga

SEQ ID NO: 27404 - protein, 462 aa, Mytilus galloprovincialis
MGKEKIHINIVVIGHVDSGKSTSTGHLIYKCGGIDKRTIEKFEKEAAEMGKGSFKYAWVLDKLKAERERGITIDIALWKFETTKYYVTIIDAPGHRDFIKNMITGTSQADCAVLIVASGTGEFEAGISSNGQTREHALLAFTLGVKQMIVGVNKMDNTEPPYSEARFMEIQKEVSSYLKKIGYNPKCVAFVPISGWHGDNMIESSEKMGWYKGWAIERKEGNASGKTLFEALDSILPPSRPTDKALRLPLQDVYKIGGIGTVPVGRVETGIIKPGMVVTFAPANISTEVKSVEMHHESLPEALPGDNVGFNVKNVSVKEIRRGMVCGDSKNDPPKGAKSFVAQVIILNHPGEIKNGYAPVLDCHTAHIACKFVEIKEKIDRRSGKKLEEFPKFIKSGDAGIVDMTPSKPMCVESFQTYAPLGRFAVRDMRQTVAVGVIKEVTKAEPASGKVTKSAAKAGGKK

SEQ ID NO: 27405 - DNA, 1437 bp, Antonospora locustae
  CDS (1)..(1437)
atggaaggaaaaaagccaaacttaaacgtctgcatcattggccatgtggatagtggaaagagcactaccatgggcaatttggcgtatcagcttggcgtatttgaccagaggcaacttaccaaactcaaagcagaggctgactctcatgggaagggaacgttcgcctatgcgtacttcttcgacaacacagctgcggagcgaaagcgtggaatcacgatcgacatcacgttgaaagaattcaaactgaagaagttcaatgcaaacatcattgattgccccgggcataaggatttcatcaagaacacggtgactggtgctgcgcaagcagatgttgctgttgctttggtgcctgcttcagattttgcagctgcgacatcaccaaaggccacgttgaaggaccacatcatgatttctggcgttatgggaatcaaacgccttataatttgcgtgaataagatggacgagttcccgccggaaaagcagaaggagaagtttgagtggatcaagaaggagatgcttttcatttcccaaagacttcacccggacaaggacccgataatcattccgatatctggtctaaaaggaatcaatattgctgatcatggagagaaatttgaatggttcgaaggatggcagaagaaggatgctaacaacaatttgattggggaaaaggtctttacgctcgagggagccctaaattactgtgatcttcccgaaaggccgattggaaagccattgagaatgccgattacagatattcatacaataacaggaattgggacaatttacacaggaagagttgacacaggtgtgataaggcctggaatgagcatctcaattcagccagcaaatgtatttggagaagtaaagtctctgcagattcaccgccaggaccagaaagaagttatttgtggagagaacattggtcttgcattaaaatcgggcgcaaagggaaatctcacgcaaatcaaaaagggaaacgttatttcggatacgaagacatctccttgtgtaattcaaccggcatgcaaggcacgtgtcatcgttgtggaacatccgaagggaataaaaaccggctactgtccggtgatggatcttggaagtcaccacgttcctgcaaagatagcaaagtttatcaacaagaaaggacccaaggacaaggagcctgtcacagagtttgattcaattcaaaacaaagacaacgcattgtgtgttatcgtcccccaaaagccaattgttatggaagtactcaaggactttccttctctctcacgctttgcattgagagatggcgggaagattgttgcaattggatctattgttgaggttttaacaaaggagcagtgcgaaaagcttggtgcggacgtttccattacacaaggaaaagcagctgctgcatcaaaacctgctgagacatctaaaaagagcaagaaataa

SEQ ID NO: 27406 - protein, 478 aa, Antonospora locustae
MEGKKPNLNVCIIGHVDSGKSTTMGNLAYQLGVFDQRQLTKLKAEADSHGKGTFAYAYFFDNTAAERKRGITIDITLKEFKLKKFNANIIDCPGHKDFIKNTVTGAAQADVAVALVPASDFAAATSPKATLKDHIMISGVMGIKRLIICVNKMDEFPPEKQKEKFEWIKKEMLFISQRLHPDKDPIIIPISGLKGINIADHGEKFEWFEGWQKKDANNNLIGEKVFTLEGALNYCDLPERPIGKPLRMPITDIHTITGIGTIYTGRVDTGVIRPGMSISIQPANVFGEVKSLQIHRQDQKEVICGENIGLALKSGAKGNLTQIKKGNVISDTKTSPCVIQPACKARVIVVEHPKGIKTGYCPVMDLGSHHVPAKIAKFINKKGPKDKEPVTEFDSIQNKDNALCVIVPQKPIVMEVLKDFPSLSRFALRDGGKIVAIGSIVEVLTKEQCEKLGADVSITQGKAAAASKPAETSKKSKK

SEQ ID NO: 27407 - DNA, 1374 bp, Rosellinia sp
  CDS (1)..(1374)
atgtcgaccaaggcgcatcttaacgtcgtcgtcattggccacgtcgacagtggcaagtccaccactaccggccatctgatctaccagtgcggtggtatcgacaagcgaactatcgagaagttcgagaaggaagccgctgaactcggcaagggttctttcaaatatgcctgggttttggacaagctaaaggccgagcgtgagcgtggtatcaccatcgatattgccctctggaagttcgagacccccaagtactacgtcaccgtcattgatgcccccggtcaccgtgatttcatcaagaacatgattactggtacttcccaagccgattgcgccattctcatcatcgctgccggcactggtgagttcgaggccggtatctccaaggatggccagacccgtgagcacgctctgctcgctttcaccctcggtgttaagcagctcatcgttgctatcaacaagatggacactgctcagtgggccgaggctcgttacaacgaaatcgtcaaggagacctcttctttcatcaagaaggtcggtttcaaccccaagcacgtcgctttcgtccccatctcgggcttcaacggcgacaacatgcttgaggtcaccaagaacgcttcctggtacaagggctgggagaaggagagccccaagggcgccaagatctccggcaagaccctccttgatgccattgacgccattgaggagcccaagcgtgccaacgacaagcccctccgtctgccccttcaggatgtctacaagatcggtggtattggcacggtccctgtcggccgtatcgagaccggtgagctcaagcccggtatggtcgtcacattcgcccccgccatggttaccactgaagtcaagtccgtcgaaatgcaccaccagcagctcgagaagggcaaccccggtgacaacgttggtttcaacgtgaagaacgtctccgtcaaggatatccgccgtggtaacgtcgctggtgacagcaagaacgaccccccttacggtgctgagtctttcaacgctcaggtcatcgttctcaaccaccctggccaggtcggtgccggttacgctcccgtcctcgattgccacactgcccacattgcctgcaagttctctgagcttcttgagaagatcgaccgccgtaccggtaagagcgtcgaagccaaccccaagttcgtcaagtctggtgatgccgccatcgtcaagatggttccctccaagcctatgtgcgtggaggccttcactgactaccctcctctgggacgtttcgccgtccgtgacatgcgtcagaccgtcgccgtcggtgtcatcaagtcagttgagaaggacaccaaggtcaagggcaaggagaccaagtccgctaccaagaagaagtaa

SEQ ID NO: 27408 - protein, 457 aa, Rosellinia sp
MSTKAHLNVVVIGHVDSGKSTTTGHLIYQCGGIDKRTIEKFEKEAAELGKGSFKYAWVLDKLKAERERGITIDIALWKFETPKYYVTVIDAPGHRDFIKNMITGTSQADCAILIIAAGTGEFEAGISKDGQTREHALLAFTLGVKQLIVAINKMDTAQWAEARYNEIVKETSSFIKKVGFNPKHVAFVPISGFNGDNMLEVTKNASWYKGWEKESPKGAKISGKTLLDAIDAIEEPKRANDKPLRLPLQDVYKIGGIGTVPVGRIETGELKPGMVVTFAPAMVTTEVKSVEMHHQQLEKGNPGDNVGFNVKNVSVKDIRRGNVAGDSKNDPPYGAESFNAQVIVLNHPGQVGAGYAPVLDCHTAHIACKFSELLEKIDRRTGKSVEANPKFVKSGDAAIVKMVPSKPMCVEAFTDYPPLGRFAVRDMRQTVAVGVIKSVEKDTKVKGKETKSATKKK

SEQ ID NO: 27409 - DNA, 1389 bp, Oncometopia nigricans
  CDS (1)..(1389)
atgggaaaagagaagattcatatcaacattgtcgtcatcggtcacgtagactctggaaagtcaaccaccactggacatttgatttataaatgtggtggtattgacaagcgtaccatcgagaagttcgagaaggaagcccaggaaatgggcaaaggttccttcaaatatgcatgggtcttggacaagctgaaagctgaacgtgagcgtggtattactatcgatattgccctttggaaatttgaaactgccaagtactatgttaccatcattgatgctcccggacacagagatttcatcaagaacatgatcacaggaacttctcaggctgattgtgctgtactgattgtggctgctggtaccggtgagtttgaagctggcatttccaagaacggtcagactcgtgaacatgctctccttgcttttactttgggtgtgaaacaactgattgttggagttaacaagatggattctactgaacccgcttacagtgaaagccgatttgaggaaatcaagaaagaagtcagtaactacatcaagaaaatcggttacaacccagcagctgttgctttcgtgcccatttctggatggcacggagataatatgctggagccctctgacaagatgccatggttcaaggggtgggccatcgagcgtaaggaaggcaaggctgagggcaagtgcttgattgaagctttagatgccattcttcctccatcaagacctactgagaagcccctcaggctgcctcttcaggatgtatacaagattggtggtattggaacagtgcctgtaggccgagtagagactggagtgcttaaacctggtatggtggtcactttcgcccctgctaatctgactactgaagtcaagtctgttgaaatgcaccacgaagctctccaggaggccgtccctggagacaatgtgggcttcaacgttaagaacgtttctgtcaaagaattgaggcgaggttttgttgctggggactccaaatctaacccacccaaggctgccgctgacttcactgcacaggttattgttctgaaccatcctggtcaaatctccaacggatatactcctgtcctcgactgtcacactgctcacattgcgtgcaaattcgcagagatcaaagaaaagtgcgaccgtcgtactggcaagactactgaagataatccaaaatccataaagtctggtgatgcggctatcatcactttggttccttccaaacccatgtgtgtcgagagtttccaggagttcccacctctgggacgtttcgctgtgcgtgacatgaggcaaactgtggctgttggtgtcatcaagagcgtgaatcataaggatctcacatcaggtaaagtcacgaaggctgcagagaaggcccagaagaagaaataa

SEQ ID NO: 27410 - protein, 462 aa, Oncometopia nigricans
MGKEKIHINIVVIGHVDSGKSTTTGHLIYKCGGIDKRTIEKFEKEAQEMGKGSFKYAWVLDKLKAERERGITIDIALWKFETAKYYVTIIDAPGHRDFIKNMITGTSQADCAVLIVAAGTGEFEAGISKNGQTREHALLAFTLGVKQLIVGVNKMDSTEPAYSESRFEEIKKEVSNYIKKIGYNPAAVAFVPISGWHGDNMLEPSDKMPWFKGWAIERKEGKAEGKCLIEALDAILPPSRPTEKPLRLPLQDVYKIGGIGTVPVGRVETGVLKPGMVVTFAPANLTTEVKSVEMHHEALQEAVPGDNVGFNVKNVSVKELRRGFVAGDSKSNPPKAAADFTAQVIVLNHPGQISNGYTPVLDCHTAHIACKFAEIKEKCDRRTGKTTEDNPKSIKSGDAAIITLVPSKPMCVESFQEFPPLGRFAVRDMRQTVAVGVIKSVNHKDLTSGKVTKAAEKAQKKK

SEQ ID NO: 27411 - DNA, 1383 bp, Metarhizium anisopliae
  CDS (1)..(1383)
atgggtaaggacgacaagactcacatcaacgtggtcgttatcggccacgtcgactccggcaagtctaccaccactggtcacttgatctaccagtgcggtggtatcgacaagcgtaccattgagaagttcgagaaggaagccgctgaactcggcaagggttccttcaagtacgcatgggttcttgacaagctcaaggccgagcgtgagcgtggtatcaccatcgacattgccctctggaagttcgagactcccaagtactatgtcaccgtcattgacgctcccggtcaccgtgactttatcaagaacatgatcactggtacttcccaggctgactgcgctattctcattatcgctgccggtactggtgagttcgaggctggtatctccaaggatggccagacccgtgagcacgctctgctcgcctacaccctgggtgtcaagcagctcattgtcgccatcaacaagatggacaccaccaagtggtccgaggcccgttaccaggaaatcatcaaggagacttccaacttcatcaagaaggtcggctacaaccccaagaccgtcgccttcgtccccatctccggtttccacggtgacaacatgcttcaggcctccaccaactgcccctggtacaagggttgggagaaggagaccaaggctggcaagtccaccggcaagaccctcctcgaggccattgacgccattgagccccccaagcgtcccaccgacaagcccctccgtcttcccctccaggatgtttacaagattggcggtattggaactgtccctgtcggccgtatcgagactggtgtcctcaagcccggtatggtcgttacctttgctccctccaacgtcaccactgaagtcaagtccgtggaaatgcaccacgagcagcttaccgagggtgtccccggtgacaacgttggtttcaacgtgaagaacgtttccgtcaaggaaatccgccgtggtaacgttgctggtgactccaagaacgacccccccatgggtgccgcttccttcgatgcccaggtcatcgttctcaaccaccccggccaggtcggtgctggttacgctcccgtcctcgattgccacaccgcccacattgcctgcaagttctctgagatcaaggagaagattgaccgacgtaccggtaaggctgttgagtctgcccccaagttcatcaagtccggtgactctgccatcgtcaagatggttccctccaagcctatgtgcgttgaggctttcaccgactaccctcccctgggtcgtttcgccgtccgtgacatgcgtcagaccgtcgctgtcggtgtcatcaagtccgtcgagaaggctgctgctggttccggcaaggtcaccaagtctgctgccaaggctggcaagaaataa

SEQ ID NO: 27412 - protein, 460 aa, Metarhizium anisopliae
MGKDDKTHINVVVIGHVDSGKSTTTGHLIYQCGGIDKRTIEKFEKEAAELGKGSFKYAWVLDKLKAERERGITIDIALWKFETPKYYVTVIDAPGHRDFIKNMITGTSQADCAILIIAAGTGEFEAGISKDGQTREHALLAYTLGVKQLIVAINKMDTTKWSEARYQEIIKETSNFIKKVGYNPKTVAFVPISGFHGDNMLQASTNCPWYKGWEKETKAGKSTGKTLLEAIDAIEPPKRPTDKPLRLPLQDVYKIGGIGTVPVGRIETGVLKPGMVVTFAPSNVTTEVKSVEMHHEQLTEGVPGDNVGFNVKNVSVKEIRRGNVAGDSKNDPPMGAASFDAQVIVLNHPGQVGAGYAPVLDCHTAHIACKFSEIKEKIDRRTGKAVESAPKFIKSGDSAIVKMVPSKPMCVEAFTDYPPLGRFAVRDMRQTVAVGVIKSVEKAAAGSGKVTKSAAKAGKK

SEQ ID NO: 27413 - DNA, 1380 bp, Pichia angusta
  CDS (1)..(1380)
atgggaaaagaaaagactcacgttaacgtcgttgttattggtcacgtcgactctggtaaatctaccactaccggccacttgatctacaagtgtggtggtatcgacaagagaaccatcgagaagtttgaaaaggaggctgccgagcttggtaagggttccttcaaatacgcttgggttttggacaagttgaaggctgagagagaaagaggtatcaccatcgatatcgctttgtggaaattcgagactccaaagtaccacgtcactgttattgatgctccaggtcacagagatttcatcaagaacatgattactggtacttcccaggctgactgtgctattttgattattgctggtggtaccggtgagttcgaggctggtatttccaaggacggtcaaaccagagagcacgctttgttggctttcacccttggtgtcagacaactgattgttgctgtcaacaagatggactctgttcaatggtctgaggccagattcgaggaaattgtcaaggaaacctctaacttcatcaagaaggttggttacaaccctaagactgttccattcgtcccaatttctggttggaacggtgacaacatgattgagccatcttctaactgcccatggtacaagggatggcaaaaggagaccaagtctggtgtcgtcaagggtaagactcttctcgaggccattgacgccattgagccacctgccagaccatctgacaagccattgagattgccattgcaagatgtctacaagattggtggtatcggtactgttccagtcggtagagttgagactggtgtcatcaaggctggtatggttgttactttcgccccagctggtgttaccaccgaagtcaagtccgtcgagatgcaccacgagcagcttgctgagggtcttccaggtgacaatgttggattcaacgtcaagaacgtttccgtcaaggaaattagaagaggtaacgtctgtggtgactcgaagaacgacccacctcaaggatgtgcttccttcaacgctcaagtcattatcttgaaccacccaggtcagatctctgctggttactctccagttttggactgccacactgcccacattgcctgcagattcgaccaactgctcgagaagatcgacagaagaaccggtaagaagattgaggagaaccctaagtttgtcaagtctggtgacgctgctattgttaagatgatcccatctaagccaatgtgtgttgagaccttcactgagtacccaccattgggaagatttgccgtcagagatatgagacagaccgttgccgttggtgtcatcaagtctgttgagaagactgctgctggtgccggaaaggtcaccaaggctgctcaaaaggctgctaagaaataa

SEQ ID NO: 27414 - protein, 459 aa, Pichia angusta
MGKEKTHVNVVVIGHVDSGKSTTTGHLIYKCGGIDKRTIEKFEKEAAELGKGSFKYAWVLDKLKAERERGITIDIALWKFETPKYHVTVIDAPGHRDFIKNMITGTSQADCAILIIAGGTGEFEAGISKDGQTREHALLAFTLGVRQLIVAVNKMDSVQWSEARFEEIVKETSNFIKKVGYNPKTVPFVPISGWNGDNMIEPSSNCPWYKGWQKETKSGVVKGKTLLEAIDAIEPPARPSDKPLRLPLQDVYKIGGIGTVPVGRVETGVIKAGMVVTFAPAGVTTEVKSVEMHHEQLAEGLPGDNVGFNVKNVSVKEIRRGNVCGDSKNDPPQGCASFNAQVIILNHPGQISAGYSPVLDCHTAHIACRFDQLLEKIDRRTGKKIEENPKFVKSGDAAIVKMIPSKPMCVETFTEYPPLGRFAVRDMRQTVAVGVIKSVEKTAAGAGKVTKAAQKAAKK

SEQ ID NO: 27415 - DNA, 1389 bp, Crassostrea gigas
  CDS (1)..(1389)
atgggtaaggaaaagactcacatcaacattgtcgtcattggtcatgtcgactctggaaaatcaacttccactggccatctcatttacaaatgtggtggtattgaccagagaaccatccaaaagttcgagaaggaagctgctgagatgggaaagggttctttcaaatacgcctgggtgttggacaaactgaaggcagagcgtgaacgtggtatcaccattgacattgctctgtggaagttcgaaaccaccaagtaccatgtcaccattattgatgctcccggccacagagatttcatcaagaacatgattacaggaacttcacaggctgactgtgctgtgttgatcattgctgctggtactggtgaatttgaaactggtatctctgctaacggacaaacccgtgaacacgccttgttggctttcactttgggagtaaagcagctcatcattggtgtcaacaaaatggacagcactgaaccaccatacagtgaggctcgattcaacgaaatcaagggtgaagtagagaagtacatcaagaagattgggtacaaccccaaggctgtccccttcgtccccatctctggatggcacggagataacatgattgaggcttccacaaagatggaatggttcaagggatgggccattgagaggaaagagggaaatgccagcggaaagacccttttggaagctttggattctatcctgccaccaaagagaccaactgacttacctcttcgtcttccacttcaggatgtctacaagattggaggtattggaacagtgccagttggtagagtggaaactggtattatcaaaccaggtatggttgtcacctttgctccacccaacatcaccactgaggtaaaatctgtggaaatgcaccacgaatctctcccagaggctgtccctggtgacaatgttggcttcaacatcaagaacgtgtccgtaaaggaaatccgtcgtggaaatgtctgtggagacagcaaaaatgatccaccaaagggcgccaagaacttccttgcccaggtcatcatcttgaaccaccctggtgagatcaagaatggatatgcgcctgtccttgattgccacactgctcacattgcctgcaagtttgttgaaattaaagagaaatgcgatcgtcgtagtggaaaagtcttggaagaggcaccaaaatgcatcaagaacggagatgctggtatggtcctcatggttcccagcaagcctatgtgtgttgaagctttctctaaatatgcacccctgggacgttttgctgtccgtgacatgaggcagaccgtggctgttggtgtcatcaaggaggttgagaaggctgagccatcacagggcaaagtcaccaaggctgcacagaaagccggtggaaagaagtga

SEQ ID NO: 27416 - protein, 462 aa, Crassostrea gigas
MGKEKTHINIVVIGHVDSGKSTSTGHLIYKCGGIDQRTIQKFEKEAAEMGKGSFKYAWVLDKLKAERERGITIDIALWKFETTKYHVTIIDAPGHRDFIKNMITGTSQADCAVLIIAAGTGEFETGISANGQTREHALLAFTLGVKQLIIGVNKMDSTEPPYSEARFNEIKGEVEKYIKKIGYNPKAVPFVPISGWHGDNMIEASTKMEWFKGWAIERKEGNASGKTLLEALDSILPPKRPTDLPLRLPLQDVYKIGGIGTVPVGRVETGIIKPGMVVTFAPPNITTEVKSVEMHHESLPEAVPGDNVGFNIKNVSVKEIRRGNVCGDSKNDPPKGAKNFLAQVIILNHPGEIKNGYAPVLDCHTAHIACKFVEIKEKCDRRSGKVLEEAPKCIKNGDAGMVLMVPSKPMCVEAFSKYAPLGRFAVRDMRQTVAVGVIKEVEKAEPSQGKVTKAAQKAGGKK

SEQ ID NO: 27417 - DNA, 1185 bp, Ureaplasma urealyticum serovar 2
  CDS (1)..(1185): transl_table=4
atggctaaagctaaatttgaaagaacaaaacctcacgttaacattggtactattggccacgttgaccatggtaaaactactttaacagctgcaattagtacagtacttgctaaaaaaggacaagctattgcacaatcatatgctgatgttgataaaacaccagaagaaagagaacgtggtattacaattaacgcttctcacgttgaatatgaaacaaaaactcgtcactatgcacacgttgactgcccaggacacgccgactacgttaagaatatgattacaggtgcagcacaaatggatggtgcaatcttagttattgctgcatctgatggggttatggctcaaactaaagaacacatcctattagcgcgtcaagttggtgttccaaaaatcgttgtattcttaaataaatgtgatttcatgacagatccagatatgcaagatcttgttgaaatggaagttcgtgaattattaactaaatatggatttgatggcgataacacgccagttatccgtggttcaggtcttaaagctttagagggcgacccagtatgagaagctaaaattgatgaattaatggatgcagttgactcatgaattccattaccagaacgtagtactgacaaaccattcttattagcaattgaagacgtatttacaatttcaggacgtggtacagttgtaactggacgtgttgaacgtggtacattaaaagttaatgatgaagttgaaatcgttggtttaaaagacactcaaaaaactgttgttacaggaattgaaatgtttagaaaatcattagatcaagctgaagctggagataatgctggtattttattacgtggtattaaaaaagaagacgttgaacgtggacaagtacttgtaaaaccaggttcaattaaacctcaccgtacatttactgctaaagtttatattcttaaaaaagaagaaggtggacgtcacacacctatcgtttcaggataccgtccacaattctactttagaacaacagacgtaacaggtgctatttcattaccagctggtgttgacttagtaatgcctggtgatgacgttgaaatgactgtagaattaattgccccagttgcgattgaagatggatctaagttctcaatccgtgaaggtggtaaaactgtaggtcatggtagcgtaattaaaacaagtaattaa

SEQ ID NO: 27418 - protein, 394 aa, Ureaplasma urealyticum serovar 2
MAKAKFERTKPHVNIGTIGHVDHGKTTLTAAISTVLAKKGQAIAQSYADVDKTPEERERGITINASHVEYETKTRHYAHVDCPGHADYVKNMITGAAQMDGAILVIAASDGVMAQTKEHILLARQVGVPKIVVFLNKCDFMTDPDMQDLVEMEVRELLTKYGFDGDNTPVIRGSGLKALEGDPVWEAKIDELMDAVDSWIPLPERSTDKPFLLAIEDVFTISGRGTVVTGRVERGTLKVNDEVEIVGLKDTQKTVVTGIEMFRKSLDQAEAGDNAGILLRGIKKEDVERGQVLVKPGSIKPHRTFTAKVYILKKEEGGRHTPIVSGYRPQFYFRTTDVTGAISLPAGVDLVMPGDDVEMTVELIAPVAIEDGSKFSIREGGKTVGHGSVIKTSN

SEQ ID NO: 27419 - DNA, 1383 bp, Cryptococcus neoformans var
  CDS (1)..(1383)
atgggtaaggacaagctccacgtcaacgtcgttgttatcggtcacgtcgactccggtaagtcgaccaccaccggtcacttgatctacaagtgcggtggtatcgacaagcgaaccattgagaagttcgagaaggaggcccaagagctcggaaagtcttctttcaagtacgcttgggttcttgacaagcttaaggccgagcgagagcgaggtatcaccatcgacattgctctttggaagttcgagacccctaagtaccaggttaccgtcattgacgcccccggtcaccgagacttcatcaagaacatgatcaccggtacctcccaggctgactgtgccatcctcatcattgccaccggtatcggtgagttcgaggctggtatctccaaggacggtcagacccgagagcacgccctcctcgccttcaccctcggtgttaggcagctcattgttgcttgcaacaagatggacacctgcaagtggtctgaggaccgattcaacgaaatcgtcaaggagaccaacggtttcatcaagaaggtcggttacaaccccaaggctgtccccttcgtccccatctctggttggcacggtgacaacatgttggaggagaccaccaacatgccctggtacaagggatggaccaaggagaccaagtccggtgtttccaagggtaagacccttctcgaggccatcgacgccatcgagccccctacccgacccaccgacaagcccctccgtctccctctccaggacgtctacaagatcggtggtatcggcacagtccctgtcggccgagtcgagaccggtgtcatcaaggccggtatggtcgtcaagttcgcccccaccaacgtcaccactgaagtcaagtccgttgagatgcaccacgagcagatccccgagggtctccccggagacaacgttggtttcaacgtcaagaacgtttccatcaaggacatccgacgaggtaacgtctgtggtgactccaagaacgacccccctatggaggctgcttctttcaacgcccaggttatcgtccttaaccaccctggtcagatcggtgccggttacacccccgttctcgactgtcacactgcccacattgcttgcaagttctctgagttgatcgagaagattgaccgacgaaccggtaaggtcatggaggccgcccccaagttcgtcaagtctggtgacgccgccattgtcaagcttgtttcccagaagcctctctgtgttgagacctacgccgactacccccctcttggtcgattcgccgtccgagacatgcgacagaccgttgccgttggtgttattaagagtgtggagaagtccgatggtaagagcggcaaggttaccaaggccgccgagaaggccgccaagaagaagtaa

SEQ ID NO: 27420 - protein, 460 aa, Cryptococcus neoformans var
MGKDKLHVNVVVIGHVDSGKSTTTGHLIYKCGGIDKRTIEKFEKEAQELGKSSFKYAWVLDKLKAERERGITIDIALWKFETPKYQVTVIDAPGHRDFIKNMITGTSQADCAILIIATGIGEFEAGISKDGQTREHALLAFTLGVRQLIVACNKMDTCKWSEDRFNEIVKETNGFIKKVGYNPKAVPFVPISGWHGDNMLEETTNMPWYKGWTKETKSGVSKGKTLLEAIDAIEPPTRPTDKPLRLPLQDVYKIGGIGTVPVGRVETGVIKAGMVVKFAPTNVTTEVKSVEMHHEQIPEGLPGDNVGFNVKNVSIKDIRRGNVCGDSKNDPPMEAASFNAQVIVLNHPGQIGAGYTPVLDCHTAHIACKFSELIEKIDRRTGKVMEAAPKFVKSGDAAIVKLVSQKPLCVETYADYPPLGRFAVRDMRQTVAVGVIKSVEKSDGKSGKVTKAAEKAAKKK

SEQ ID NO: 27421 - DNA, 1344 bp, Solanum tuberosum
  CDS (1)..(1344)
atgggtaaaaaaaaaatccacatcagtattgtggtcattggtcatttcaactctggtaattcaaccacaactggtcacttgatctacaaccttggtggtattgacaacctttttattgaaaggtttgagaaggaacctgctgaaataaacaaaaggtcattcaattatgcctgggtgcttgacaaacttaaggctgaacttgagcgtggtatcactattgatattgctttgtggaattttgaaaccactaattactactgcactgtgattgatgcccccggacacagggactttatcaaaaacataatcactggtacctcccaggccgactgtgctgtcctcattattgactccaccactggtggttttaaacctggtatctctaaaaatggtcaaacccgtgaacatccattgcttgctttcacccttggtgtcaaccaaataatttgctgctgcaacaaaatggatgctaccacccccaagtactccaaggctaggtacgatgaaattgtgaaggaaatttcttcctacctcaagaaggttggttacaaccctgacaaaatcccatttgtccccatctctggttttgaaggagataatatgattgagaggtctaccaacctcgactggtacaagggaccaaccctccttgatgctctcgaccagattaatgagcccaagagaccaacagacaagccactccgtctcccacttcaggatgtttacaagattggtggtattggaactgtcccagttggtcgtgtagagactggtgtgatcaagcctggtatggttgtgacctttggccctactggtttgacaactgaagtcaagtctgttgagatgcaccacgaagctcttctggaggcactccctggtgacaatgttgggttcaatgttaagaatgttgctgttaaggatctgaagcgtggttttgttgcctcaaactccaaggatgacccagctaagggggcagccagtttcactgcccaggtcatcatcatgaaccatccaggacagattggaaatggatatgctccagtgctggactgtcacacatcccatattgctgtcaagtttgctgagatcttgactaagattgacaggcgttctggtaaggaactcgagaaggagcctaagttcttgaagaacggtgatgctggtatggttaagatgattcccaccaagcccatggttgttgagaccttctccgagtacccaccattggggcgttttgctgtgagggacatgcgtcaaactgttgctgttggtgttatcaagagtgttgacaagaaggacccatctggagccaaggtcaccaaggctgctcagaagaaaaaatga

SEQ ID NO: 27422 - protein, 447 aa, Solanum tuberosum
MGKKKIHISIVVIGHFNSGNSTTTGHLIYNLGGIDNLFIERFEKEPAEINKRSFNYAWVLDKLKAELERGITIDIALWNFETTNYYCTVIDAPGHRDFIKNIITGTSQADCAVLIIDSTTGGFKPGISKNGQTREHPLLAFTLGVNQIICCCNKMDATTPKYSKARYDEIVKEISSYLKKVGYNPDKIPFVPISGFEGDNMIERSTNLDWYKGPTLLDALDQINEPKRPTDKPLRLPLQDVYKIGGIGTVPVGRVETGVIKPGMVVTFGPTGLTTEVKSVEMHHEALLEALPGDNVGFNVKNVAVKDLKRGFVASNSKDDPAKGAASFTAQVIIMNHPGQIGNGYAPVLDCHTSHIAVKFAEILTKIDRRSGKELEKEPKFLKNGDAGMVKMIPTKPMVVETFSEYPPLGRFAVRDMRQTVAVGVIKSVDKKDPSGAKVTKAAQKKK

SEQ ID NO: 27423 - DNA, 1350 bp, Avicennia marina
  CDS (1)..(1350)
atgggcaaggaaaagtctcacattaaccttgtggttatcggtcatgttgactctgggaagtccaccacgactggccacttgatctacaagcttggtggtattgacaagcgtgtcattgaaaggtttgagaaggaggctgccgagatgaacaaaagatcattcaagtatgcttgggtgctcgacaagctcaaggctgagcgcgagcgtggcatcaccatcgatattgccttgtggaagtttgaaaccaccaagtactactgcaccgtcatcgatgctcctggacaccgcgactttatcaagaacatgattactggaacctcacaggctgattgtgctgtcctcatcattgactccaccactggtggttttgaagctggtatttccaaggatggacagactcgtgagcatgcattgctttctttcactctaggtgtcaagcaaatgatttgctgctgcaacaagatggatgccaccactccaaaatactcaaaggccagatatgatgaaattgtgaaggaagtctcttcctacatcaagaaggttggatacaaccctgagaagatcccatttgtccccatttctggttttgagggagacaacatgattgagaggtccaccaacctggactggtataagggcccaaccctccttgaagctcttgacatggttcaggagccaaagaggccctcagacaagcccctccgtctcccacttcaggatgtctacaagattggtggtattggaaccgtccctgttggtcgtgtggagactggtatgctgaagcccggtatgcttgtgaccttcggcccctctggcttgacaactgaagttaagtctgttgagatgcaccacgaagccttgcaggaggctcttcctggcgacaatgttgggttcaacgtgaagaatgtttctgttaaggatctcaagcgtggttatgttgcctcaaattctaaggatgatcctgctaagggagccgccagcttcacttcacaggtcattatcatgaaccatcctggtcagattggtaatggctacgcaccagtgcttgactgccacacctcccacattgctgttaagtttgctgagctcgtcaccaagattgacaggcgatctggtaaggaactcgagaaggaacctaagttcttgaagaacggtgatgctggatttgtgaagatgattccaaccaagcccatggttgtggaaaccttctctgaatacccaccactgggtcgttttgctgttcgtgatatgcgtcagacagttgctgttggtgtcataaagagcgtggaaaagaaggagccttcaggtgctaaggtgaccaaggccgctgttaagaagggtgccaagtga

SEQ ID NO: 27424 - protein, 449 aa, Avicennia marina
MGKEKSHINLVVIGHVDSGKSTTTGHLIYKLGGIDKRVIERFEKEAAEMNKRSFKYAWVLDKLKAERERGITIDIALWKFETTKYYCTVIDAPGHRDFIKNMITGTSQADCAVLIIDSTTGGFEAGISKDGQTREHALLSFTLGVKQMICCCNKMDATTPKYSKARYDEIVKEVSSYIKKVGYNPEKIPFVPISGFEGDNMIERSTNLDWYKGPTLLEALDMVQEPKRPSDKPLRLPLQDVYKIGGIGTVPVGRVETGMLKPGMLVTFGPSGLTTEVKSVEMHHEALQEALPGDNVGFNVKNVSVKDLKRGYVASNSKDDPAKGAASFTSQVIIMNHPGQIGNGYAPVLDCHTSHIAVKFAELVTKIDRRSGKELEKEPKFLKNGDAGFVKMIPTKPMVVETFSEYPPLGRFAVRDMRQTVAVGVIKSVEKKEPSGAKVTKAAVKKGAK

SEQ ID NO: 27425 - DNA, 1470 bp, Drosophila melanogaster
  CDS (1)..(1470)
atgtcacatgcatttgccgccgccgtctgccggtccaccgcatccatgtcattggccctgcgctgcagccggcgcgccatgagctctgccagaatgctgcgtatggcgggtgccactgccacctccacggcctgcaaggattggcagagaaacggactacttgctgcgcccagaaccggcaacatgcagcagtacctgcgcgagtacgccaacgagaagaaggtgttcgagcgaaccaagccccattgcaatgtgggcaccattggccatgtggatcacggcaagaccacgctcacggcggccattaccaaggtcctggccgacaagcagctggccgagagcaagaagtacaatgaaatcgacaatgcgcccgaggagaaggctcgtggtattaccatcaatgtagcccacgtggagtaccagacggagacgcgtcactacggccacacagattgtccgggacatgccgattatattaagaacatgatcaccggcacagcccagatggatggcgccattctcgttgtggccgccaccgatggcgccatgccccaaactcgcgagcatatgctgctagccaagcagatcggcattgatcacatcgtggtgttcatcaacaaggtggacgccgccgatgaggagatggtcgacctggtggagatggagatccgagagctgcttaccgagatgggctatgatggtgacaagatccctgtggtaaagggctcggcgatgtgcgccctcgaggacaagagtcccgagatcggcaaggaggcgatcctgaaactgctccaggaggtggatagcttcatccccacgcctgtgcgcgagctggacaagcccttcctgctgcctgttgagaatgtgtattcgattcccggacgcggaaccgtcgtcactggtcgcctggagcgcggagtggtcaagaagggcatggagtgcgagttcgtgggctataacaaggtgctgaagtcgacggtgacgggcgtggagatgttccaccagattctggaggaggcgcaagccggtgatcagctgggagctctggtgcgcggcgttaagcgagatgacatcaagcgcggcatggtcatgtgcaagccgggcagtgtgaaggcactcgatcagctggaggcccaggtgtacatcctgtccaaggatgaaggcggtcgcacaaagcccttcatgtccttcatccaactgcagatgttctcccgcacctgggactgtgccgtgcaggtgcagattcccgataaggagatggtcatgcccggcgaagacaccaagctcattctgcgcctcatccggccaatggtcctggagcagggacaacgcttcacgctgcgtgacggaaacctgaccctgggcactggtgtcgtcaccagcactctgcccccattgactgaatcgcagcgatccgagttgacggagggcaagaaggcgcgcgagaagaaggtggcggctaagaagtag

SEQ ID NO: 27426 - protein, 489 aa, Drosophila melanogaster
MSHAFAAAVCRSTASMSLALRCSRRAMSSARMLRMAGATATSTACKDWQRNGLLAAPRTGNMQQYLREYANEKKVFERTKPHCNVGTIGHVDHGKTTLTAAITKVLADKQLAESKKYNEIDNAPEEKARGITINVAHVEYQTETRHYGHTDCPGHADYIKNMITGTAQMDGAILVVAATDGAMPQTREHMLLAKQIGIDHIVVFINKVDAADEEMVDLVEMEIRELLTEMGYDGDKIPVVKGSAMCALEDKSPEIGKEAILKLLQEVDSFIPTPVRELDKPFLLPVENVYSIPGRGTVVTGRLERGVVKKGMECEFVGYNKVLKSTVTGVEMFHQILEEAQAGDQLGALVRGVKRDDIKRGMVMCKPGSVKALDQLEAQVYILSKDEGGRTKPFMSFIQLQMFSRTWDCAVQVQIPDKEMVMPGEDTKLILRLIRPMVLEQGQRFTLRDGNLTLGTGVVTSTLPPLTESQRSELTEGKKAREKKVAAKK

SEQ ID NO: 27427 - DNA, 1431 bp, Arabidopsis thaliana
  CDS (1)..(1431)
atgccgatttcggctccagccgcttgttcttcctcctctagaattctctgttcctactcctctccttctccttctctctgtcccgccatttccacctctggtaaactcaaaaccctaactctctcttcctccttcctcccttcttactcattaaccaccacctccgcttctcaatccactcgtcgctccttcaccgtccgcgccgctcgtggaaagttcgagaggaagaagcctcatgtcaacatcggaaccatcggtcatgttgaccatgggaaaactactttaaccgcagctctaaccatggctctcgcttccattggttccagcgtcgctaaaaagtacgacgagattgacgctgcgccggaggagagagctcgtggtatcacaatcaacactgctactgttgagtacgagactgagaatcgtcactacgctcacgttgattgtcctggtcacgctgattacgttaagaatatgattaccggagctgcacagatggacggagctatcctcgttgtttccggcgccgatggtcctatgcctcagactaaagagcatatccttttggctaagcaggttggtgttcctgatatggttgtgtttcttaacaaagaggatcaagtagatgatgcagagttgctagagctcgttgagcttgaggttcgtgagcttctctcgtcttatgaatttaacggtgatgatattccgattatctctggttctgctcttttagccgttgagactcttactgagaatcctaaggttaagagaggtgataacaaatgggtagataagatttatgaacttatggatgctgttgatgattacatccctatccctcagagacaaactgaattgccattcttgttagctgttgaggatgtgttctctatcactggacgtggtacggtggctacagggcgtgtcgagagaggtacggttaaggtaggagagactgtagatttagtgggtttgagggagactaggagttacactgtcactggggttgaaatgtttcagaagattcttgatgaggctttagctggtgacaatgtagggttgttgcttaggggtattcaaaaggctgatattcagagaggtatggttttagctaagccgggatcgattactccacataccaagtttgaagcaattatctatgtgttgaagaaagaggaaggtggaaggcattctccattctttgcagggtacaggcctcagttctacatgaggacgactgatgttacgggtaaagtgacgaagatcatgaacgacaaagatgaagagtcgaagatggttatgcccggtgatcgagtgaagattgttgttgagcttattgtgccggtggcttgtgaacaagggatgaggtttgctatcagagaaggaggaaagactgttggtgctggagttattgggacgatcctcgaatga

SEQ ID NO: 27428 - protein, 476 aa, Arabidopsis thaliana
MPISAPAACSSSSRILCSYSSPSPSLCPAISTSGKLKTLTLSSSFLPSYSLTTTSASQSTRRSFTVRAARGKFERKKPHVNIGTIGHVDHGKTTLTAALTMALASIGSSVAKKYDEIDAAPEERARGITINTATVEYETENRHYAHVDCPGHADYVKNMITGAAQMDGAILVVSGADGPMPQTKEHILLAKQVGVPDMVVFLNKEDQVDDAELLELVELEVRELLSSYEFNGDDIPIISGSALLAVETLTENPKVKRGDNKWVDKIYELMDAVDDYIPIPQRQTELPFLLAVEDVFSITGRGTVATGRVERGTVKVGETVDLVGLRETRSYTVTGVEMFQKILDEALAGDNVGLLLRGIQKADIQRGMVLAKPGSITPHTKFEAIIYVLKKEEGGRHSPFFAGYRPQFYMRTTDVTGKVTKIMNDKDEESKMVMPGDRVKIVVELIVPVACEQGMRFAIREGGKTVGAGVIGTILE

SEQ ID NO: 27429 - DNA, 1350 bp, Arabidopsis thaliana
  CDS (1)..(1350)
atgggtaaagagaagtttcacattaacattgtggtcattggtcatgttgattctggaaaatcgaccacaactggtcacttgatctataagcttggtggtattgacaagcgtgtcatcgagaggttcgagaaggaggctgctgagatgaacaagaggtccttcaagtacgcatgggtgttggacaaacttaaggccgagcgtgagcgtggtattaccatcgatattgctctatggaagttcgagaccaccaagtactactgcacagtcattgatgccccaggacatcgtgatttcatcaagaacatgattactggtacctcccaggctgattgtgctgttcttatcattgactccaccactggaggttttgaggctggtatctctaaggatggtcagacccgtgagcacgctcttcttgctttcacccttggtgtcaagcagatgatttgctgttgtaacaagatggatgccaccacccccaaatactccaaggctaggtacgatgaaatcatcaaggaggtgtcttcatacctgaagaaggtcggatacaaccctgacaaaatcccatttgtgccaatctctggattcgagggagacaacatgattgagaggtcaaccaaccttgactggtacaagggaccaactcttcttgaggctcttgaccagatcaacgagcccaagaggccatcagacaagccccttcgtcttccacttcaggatgtctacaagattggtggtattggaacggtgccagtgggacgtgttgagactggtatgatcaagcctggtatggttgttacctttgctcccacagggttgaccactgaggttaagtctgttgagatgcaccacgagtctcttcttgaggcacttcccggtgacaatgttggattcaatgtcaagaattttgctgtcaaggatcttaagagaggatacgttgcctctaactccaaggatgatccagctaagggtgccgccaacttcacctcccaggtcatcatcatgaaccaccctggtcagattggtaacggttacgccccagttctcgattgccacacctctcacattgcagtcaagttctctgagatcttgaccaagattgacaggcgttctggtaaggagattgagaaggagcccaagtttttgaagaatggtgacgctggtatggttaagatgaccccaaccaagcccatggttgttgagactttctccgagtacccacctttgggacgtttcgctgttagggacatgaggcagaccgttgctgttggtgttattaagagcgtggacaagaaggacccaactggagccaaggtcaccaaggctgcagtgaagaagggtgccaaatga

SEQ ID NO: 27430 - protein, 449 aa, Arabidopsis thaliana
MGKEKFHINIVVIGHVDSGKSTTTGHLIYKLGGIDKRVIERFEKEAAEMNKRSFKYAWVLDKLKAERERGITIDIALWKFETTKYYCTVIDAPGHRDFIKNMITGTSQADCAVLIIDSTTGGFEAGISKDGQTREHALLAFTLGVKQMICCCNKMDATTPKYSKARYDEIIKEVSSYLKKVGYNPDKIPFVPISGFEGDNMIERSTNLDWYKGPTLLEALDQINEPKRPSDKPLRLPLQDVYKIGGIGTVPVGRVETGMIKPGMVVTFAPTGLTTEVKSVEMHHESLLEALPGDNVGFNVKNFAVKDLKRGYVASNSKDDPAKGAANFTSQVIIMNHPGQIGNGYAPVLDCHTSHIAVKFSEILTKIDRRSGKEIEKEPKFLKNGDAGMVKMTPTKPMVVETFSEYPPLGRFAVRDMRQTVAVGVIKSVDKKDPTGAKVTKAAVKKGAK

SEQ ID NO: 27431 - DNA, 1350 bp, Stevia rebaudiana
  CDS (1)..(1350)
atgggtaaggaaaagattcatatcagtattgttgtcattggacatgtcgactctggcaagtccacaactaccggccacttaatttacaagttgggtggtattgacaaacgtgtgattgaaagattcgagaaagaagctgctgaaatgaacaaaaggtcattcaaatacgcatgggttcttgacaagctcaaagctgaacgtgaaagaggtatcaccattgatattgcattgtggaagtttgaaaccaccaaatactactgcaccgtcattgatgcacctggacatcgtgacttcatcaagaacatgattactggtacttctcaagctgattgtgcggttctcatcattgattccacaactggtggttttgaagctggtatttcaaaagacggtcaaacccgtgaacatgctcttcttgctttcactcttggtgtgaaacaaatgatttgctgctgtaacaagatggatgccactactccgaagtactcaaaggcgaggtatgaagaaatcgtcaaggaagtttcatcatacttgaagaaggtcggttacaaccccgacaaaatcccattcgtcccaatttctggatttgaaggcgacaacatgattgaaagatccaccaacctcgactggtacaagggtccgaccctacttgaagcacttgaccagatcaatgaaccgaaaagaccatcagacaaacctcttcgtctaccacttcaagacgtgtacaagattggtggtattggaaccgtgccagttggtcgtgttgagaccggtgtgatcaagcccggtatggttgttactttcggaccatctgggttaaccactgaagtcaagtcagttgagatgcaccacgaagcattgaccgaagctcttcccggtgacaatgttgggttcaatgttaagaatgttgcggtcaaggatctcaagcgtggttatgttgcgtcaaactctaaagatgatccggcaaagggtgcggctagtttcacctctcaggttattatcatgaaccatcctggtcagatcggtaacggttatgccccggttctcgattgtcacacctcccacattgctgtcaagttttctgagattttgaccaagattgacagacggtctggtaaggagcttgaaaaggaacccaagttcttaaagaatggagatgcaggtatggttaagatgcttccgactaaacctatggttgttgagacttttgctgagtacccaccgcttggacggtttgctgtgagggacatgcgtcagacggttgcagtcggtgttatcaagagtgttgacaagaaggacccaaccggagccaaggtgaccaaggctgctgtcaagaagggagccaagtga

SEQ ID NO: 27432 - protein, 449 aa, Stevia rebaudiana
MGKEKIHISIVVIGHVDSGKSTTTGHLIYKLGGIDKRVIERFEKEAAEMNKRSFKYAWVLDKLKAERERGITIDIALWKFETTKYYCTVIDAPGHRDFIKNMITGTSQADCAVLIIDSTTGGFEAGISKDGQTREHALLAFTLGVKQMICCCNKMDATTPKYSKARYEEIVKEVSSYLKKVGYNPDKIPFVPISGFEGDNMIERSTNLDWYKGPTLLEALDQINEPKRPSDKPLRLPLQDVYKIGGIGTVPVGRVETGVIKPGMVVTFGPSGLTTEVKSVEMHHEALTEALPGDNVGFNVKNVAVKDLKRGYVASNSKDDPAKGAASFTSQVIIMNHPGQIGNGYAPVLDCHTSHIAVKFSEILTKIDRRSGKELEKEPKFLKNGDAGMVKMLPTKPMVVETFAEYPPLGRFAVRDMRQTVAVGVIKSVDKKDPTGAKVTKAAVKKGAK

SEQ ID NO: 27433 - DNA, 1344 bp, Salsola komarovii
  CDS (1)..(1344)
atgggaaaggaaaagattcatatcagtttggtggtcattggacatgtcgactctggaaagtcgaccaccactggtcacttgatctacaagcttggaggtattgacaagcgtgtgattgagagattcgagaaggaagctgctgagatgaacaagaggtccttcaagtacgcatgggttcttgacaagcttaaggcagagcgtgaacgtggtatcaccatcgatattgccttgtggaagtttgagaccaacaagtactactgcactgtcatcgatgcccctggtcaccgtgactttatcaagaacatgattactggtacctcccaggctgactgtgccatcctcattatcgactccaccactggaggttttgaggctggtatctctaaggatggacagacccgtgagcatgcccttcttgccttcacccttggtgtcaagcaaatgatttgctgctgtaacaagatggatgccaccacacccaagtactcaaagtctaggttcgatgaaattgtcaaggaagtctcatcatacctcaagaaggttggttacaaccctgacaaaatcgcattcgtccccatttctggtttcgagggtgacaacatgattgagaggtccaccaaccttgactggtacaagggaccaacccttcttgaggctcttgacatgatcaacgagccaaagagaccctcagacaagccccttcgtctaccacttcaggatgtctacaagattggtggtattggaactgtgcccgtgggtcgtgttgagactggtgtcttgaagcctggtatggttgttactttcggtcccactggattgactactgaagttaagtcagttgagatgcaccacgagtctctcccagaagctctccctggtgacaacgttgggttcaacgttaagaatgttgctgtcaaggatatcaagcgtggtttcgtggcttctgactccaagaatgaccccgccaaggaggcagcaaacttcactgcccaggtcattatcatgaaccaccctggacagatcggaaacggttacgccccagtgttggattgccacacctctcacattgctgttaagtttgctgagttggtgaccaagatcgacaggcgttcaggtaaggagcttgagaaggagcccaaattcttgaagaatggtgatgctggtatgattaagatggttccaaccaagcctatggtggtggagactttctcggagtacccaccccttggtcgttttgccgtgagggacatgaggcaaactgttgctgttggtgtcatcaagaatgttgagaagaaggacccaactggtgccaaggtcaccaaggctgcccttaagaagaaataa

SEQ ID NO: 27434 - protein, 447 aa, Salsola komarovii
MGKEKIHISLVVIGHVDSGKSTTTGHLIYKLGGIDKRVIERFEKEAAEMNKRSFKYAWVLDKLKAERERGITIDIALWKFETNKYYCTVIDAPGHRDFIKNMITGTSQADCAILIIDSTTGGFEAGISKDGQTREHALLAFTLGVKQMICCCNKMDATTPKYSKSRFDEIVKEVSSYLKKVGYNPDKIAFVPISGFEGDNMIERSTNLDWYKGPTLLEALDMINEPKRPSDKPLRLPLQDVYKIGGIGTVPVGRVETGVLKPGMVVTFGPTGLTTEVKSVEMHHESLPEALPGDNVGFNVKNVAVKDIKRGFVASDSKNDPAKEAANFTAQVIIMNHPGQIGNGYAPVLDCHTSHIAVKFAELVTKIDRRSGKELEKEPKFLKNGDAGMIKMVPTKPMVVETFSEYPPLGRFAVRDMRQTVAVGVIKNVEKKDPTGAKVTKAALKKK

SEQ ID NO: 27435 - DNA, 1344 bp, Suaeda japonica
  CDS (1)..(1344)
atgggtaaggaaaagattcatatcagtttggtggttattggacatgtcgattctggaaagtcgaccaccaccggtcacttgatctacaagcttggtggtattgacaagcgtgtgatcgagagattcgagaaggaagctgctgagatgaacaagaggtccttcaagtacgcttgggttcttgacaagcttaaggcagagcgtgaacgtggtatcaccattgatattgccttgtggaagttcgagaccaacaagtactactgtactgttatcgatgcccctggtcaccgtgactttatcaagaatatgatcactggtacctctcaggctgattgtgctatcctcattattgactccaccaccggaggttttgaggctggtatctccaaggacggtcagactcgtgagcatgctcttctttccttcactcttggtgtgaggcaaatgatttgctgctgtaacaagatggatgccactacccccaagtactcgaaagctaggtacgatgaaatcgtgaaggaagtttcctcttacctcaagaaggttggttacaacccagagaaggttccattcgttcccatctctgggttcgagggtgataacatgattgagaggtctaccaaccttgactggtacaaggggccaactcttcttgaggctcttgacatgatcaacgagccaaagaggccttctgacaagcccctccgtctcccaatccaggatgtctacaagattggtggtattggaactgtccctgtgggtcgtattgagactggtgtcttgaagcctaacatggttgttacctttggtcctactggactgaccactgaagttaagtccgttgagatgcaccacgagtctcttccagaggcactccctggtgacaatgtcggattcaatgttaagaatgtttccatcaaggatctcaagcgtggttacgtggcttctgactccaagaatgaccctgctaagggagcatcaagtttcactgctcaggtcattatcatgaaccaccctggacagattggaaatggttatgcacctgtgcttgactgtcacacctctcacattgctgtcaaatttgctgaactccttaccaagattgacagacgatctggtaaggagctcgagaaggagcccaaattcttgaagaatggtgatgctggtatggttaagatgattcccaccaagcccatggtggtggagacttttgcagagtactcacctcttggtcgttttgccgtgagggacatgaggcagactgttgctgtgggtgtcatcaagagtgttgacaagaaggaaccaactagtgccaaggtcaccaaggctgccatgaagaagaaatga

SEQ ID NO: 27436 - protein, 447 aa, Suaeda japonica
MGKEKIHISLVVIGHVDSGKSTTTGHLIYKLGGIDKRVIERFEKEAAEMNKRSFKYAWVLDKLKAERERGITIDIALWKFETNKYYCTVIDAPGHRDFIKNMITGTSQADCAILIIDSTTGGFEAGISKDGQTREHALLSFTLGVRQMICCCNKMDATTPKYSKARYDEIVKEVSSYLKKVGYNPEKVPFVPISGFEGDNMIERSTNLDWYKGPTLLEALDMINEPKRPSDKPLRLPIQDVYKIGGIGTVPVGRIETGVLKPNMVVTFGPTGLTTEVKSVEMHHESLPEALPGDNVGFNVKNVSIKDLKRGYVASDSKNDPAKGASSFTAQVIIMNHPGQIGNGYAPVLDCHTSHIAVKFAELLTKIDRRSGKELEKEPKFLKNGDAGMVKMIPTKPMVVETFAEYSPLGRFAVRDMRQTVAVGVIKSVDKKEPTSAKVTKAAMKKK

SEQ ID NO: 27437 - DNA, 1350 bp, Bruguiera sexangula
  CDS (1)..(1350)
atgggtaaggagaagattcacattaacattgtggttattggccatgtcgactccggaaagtcaaccacaactggccacttgatttacaagcttggaggtatcgacaagcgtgtgattgagaggtttgagaaggaagctgctgagatgaacaagaggtcattcaagtatgcctgggtgcttgacaagctgaaggctgagcgtgagcgtggtatcaccattgatattgccttgtggaagttcgagacaaccaaatattactgcacggtcattgatgctcctggacatcgtgactttattaagaatatgatcaccgggacttcccaagctgactgtgctgtcctcatcattgactctaccactggtggctttgaggctggtatctctaaagatggtcagacccgcgagcatgccctgcttgccttcacccttggtgttaagcaaatgatttgctgctgcaacaagatggatgctaccacttccaagtattctaaggcaagatatgatgaaattgttaaggaagtgtcatcctacttgaagaaggttggttacaacccagagaagattccttttgtccccatatctggatttgagggtgacaacatgattgagagatccaccaaccttgactggtacaagggcccaactcttcttgaggccctggacatgatccaggagccaaagaggccatcagataagcccctccgtctcccacttcaggatgtgtacaagattggtggtattgggacagtcccagtgggtcgtgttgaaactggtgtcctgaagcctggaatggttgttacttttggtccctcaggactgaccactgaagttaagtctgtggagatgcaccatgaagctctccaagaggctcttcccggagacaacgttggcttcaatgttaagaatgtttccgtgaaggatcttaagcggggttatgttgcctcaaactccaaggatgatcctgccaaggaggcatctagcttcacctcccaagttatcatcatgaaccaccctggtcagattggaaatggttatgcccctgttctggattgccacacctctcacattgctgtcaagttttctgagatcctcacaaagattgataggcgatctggcaaggagcttgaaaaggagcccaagttcttgaagaatggtgatgctgggttcgtgaagatgattccgaccaagcctatggtggtggaaactttctccgagtatcctccgcttggtagatttgccgtcagggacatgcgccagactgttgcagtgggagtcatcaagagtgtcgagaaaaaggaaccttctggagctaaggtgactaaatctgctgccaagaagggtggcaaatga

SEQ ID NO: 27438 - protein, 449 aa, Bruguiera sexangula
MGKEKIHINIVVIGHVDSGKSTTTGHLIYKLGGIDKRVIERFEKEAAEMNKRSFKYAWVLDKLKAERERGITIDIALWKFETTKYYCTVIDAPGHRDFIKNMITGTSQADCAVLIIDSTTGGFEAGISKDGQTREHALLAFTLGVKQMICCCNKMDATTSKYSKARYDEIVKEVSSYLKKVGYNPEKIPFVPISGFEGDNMIERSTNLDWYKGPTLLEALDMIQEPKRPSDKPLRLPLQDVYKIGGIGTVPVGRVETGVLKPGMVVTFGPSGLTTEVKSVEMHHEALQEALPGDNVGFNVKNVSVKDLKRGYVASNSKDDPAKEASSFTSQVIIMNHPGQIGNGYAPVLDCHTSHIAVKFSEILTKIDRRSGKELEKEPKFLKNGDAGFVKMIPTKPMVVETFSEYPPLGRFAVRDMRQTVAVGVIKSVEKKEPSGAKVTKSAAKKGGK

SEQ ID NO: 27439 - DNA, 1347 bp, Solanum tuberosum
  CDS (1)..(1347)
atgggtaaagagaagattcacatcagcattgtggtcattggccacgtcgactctggaaagtcgactaccactggtcacttgatctacaagcttggtggaattgacaagcgtgttattgagaggttcgagaaggaagctgctgagatgaacaagaggtcattcaagtatgcctgggtgcttgacaaacttaaggctgaacgtgagcgtggtatcaccattgatattgctttgtggaagtttgagaccactaagtactactgcactgtgattgatgcccccggacacagagactttatcaagaacatgatcactggtacttcccaggctgactgtgctgtcctcattattgactccaccactggtggttttgaagctggtatctctaaagatggtcagacccgtgaacatgcattgcttgctttcacccttggtgtcaagcaaatgatctgctgctgtaacaagatggatgctaccacccccaagtactccaaggctaggtatgatgaaattgtgaaggaagtttcttcctacctcaagaaggtcggttacaaccctgacaaaatcccctttgtccctatctctggttttgaaggagataacatgattgagaggtctaccaacctcgactggtacaagggaccaaccctccttgacgctcttgaccagattaatgagcccaagaggccatcagacaaacccctccgtcttccactgcaggatgtttacaagattggtggtattggaactgtacctgttggtcgtgttgagactggtgtgatcaagcctggtatggttgtgacctttggccctactggtttgacaactgaagtcaagtctgtagagatgcaccatgaagctctccaggaggcactccccggtgacaatgttgggttcaatgttaagaatgttgctgttaaggatcttaagcgtggttttgttgcatcaaactccaaggatgacccagccaagggggcagccagcttcactgcccaggtcatcatcatgaaccatcctggccagattggaaacggatatgctccagtgcttgactgtcacacttcccacattgctgtcaagtttgctgagatcttgaccaagattgacaggcgttcaggtaaggaacttgagaaggagcctaagttcttgaagaacggtgatgctggtatggttaagatgattcccaccaagcccatggttgttgagacctttgctgaatacccaccattgggtcgttttgctgtgagagacatgaggcaaactgttgctgtcggtgttgtcaagaatgttgacaagaaggacccaactggtgccaaagtgaccaaggctgcccagaagaagggaaagtga

SEQ ID NO: 27440 - protein, 448 aa, Solanum tuberosum
MGKEKIHISIVVIGHVDSGKSTTTGHLIYKLGGIDKRVIERFEKEAAEMNKRSFKYAWVLDKLKAERERGITIDIALWKFETTKYYCTVIDAPGHRDFIKNMITGTSQADCAVLIIDSTTGGFEAGISKDGQTREHALLAFTLGVKQMICCCNKMDATTPKYSKARYDEIVKEVSSYLKKVGYNPDKIPFVPISGFEGDNMIERSTNLDWYKGPTLLDALDQINEPKRPSDKPLRLPLQDVYKIGGIGTVPVGRVETGVIKPGMVVTFGPTGLTTEVKSVEMHHEALQEALPGDNVGFNVKNVAVKDLKRGFVASNSKDDPAKGAASFTAQVIIMNHPGQIGNGYAPVLDCHTSHIAVKFAEILTKIDRRSGKELEKEPKFLKNGDAGMVKMIPTKPMVVETFAEYPPLGRFAVRDMRQTVAVGVVKNVDKKDPTGAKVTKAAQKKGK

SEQ ID NO: 27441 - DNA, 1395 bp, Trichophyton rubrum
  CDS (1)..(1395)
atgggtaaagatgagaagggccacattaacttggtcgttatcggccacgtcgattccggcaaatccaccactactggtcacttgatctacaagtgcggtggtatcgaccagcgtaccattgagaagttcgagaaggaagccgaagagttgggcaagaagtccttcaagtacgcctgggttcttgacaagctcaaggccgagcgtgagcgtggtatcaccatcgatatcgccctctggaagttcgagacccccaagtacaatgtcaccgtcattgacgcccccggtcaccgtgacttcatcaagaacatgatcactggtacctcccaggccgactgtgctattctcatcattgctgccggtactggtgagttcgaggctggtatctccaaggatggccagacccgtgagcaccgctctgctcgccttcacccttgggtgtcaaagcagctcatcgttgccatcaacaagatggacaccaccaactggtccgagacccgtttcaaggaaatcatcaagggaagtcaccaacttcatcaagaaaggttggctaccgaccccaaggggtgttccattttcgttccaatctctggtttcaacggtgacaacatgattgaaggcttcaccaactgcccatggtacaagggatggaacaaggagaccaaggccggtggtgccaagactggcaagaccctcctcgaggccatcgatgccatcgacatgccaacccgtcctaccgacaagcccctccgtctcccactccaggatgtctacaagatctctggtatcggaactgtaccagtcggtcgtgttgagaccggtatcatcaagcccggtatggtcgtcaccttcgcccctgccaacgtcaccactgaagtcaagtccgtcgaaatgcaccaccagcagcttcagcagggtgtccccggtgacaacgtcggcttcaacgtcaagaacgtttccgtcaaggaagtccgccgtggtaacgttgccggtgactccaagaacgacccaccatccggctgtgcctccttcaacgcccaggtcatcgtcctcaaccaccccggccagatcggtgctggttacgccccagtcctcgactgccacactgctcacattgcttgcaagttcgctgagctcctcgagaagattgaccgccgtaccggtaaatccgtcgaagccaaccccaagttcgtcaagtctggtgatgccgctatcgccaagatggttccatccaagcctatgtgcgttgaggctttcactgactaccccccacttggtcgtttcgccgtccgtgacatgagacagaccgttgccgtcggtgtcatcaaggctgttgagaaggccaccggtggtgctggcaaggtcaccaagtccgctgccaaggctggcaagaagtaa

SEQ ID NO: 27442 - protein, 464 aa, Trichophyton rubrum
MGKDEKGHINLVVIGHVDSGKSTTTGHLIYKCGGIDQRTIEKFEKEAEELGKKSFKYAWVLDKLKAERERGITIDIALWKFETPKYNVTVIDAPGHRDFIKNMITGTSQADCAILIIAAGTGEFEAGISKDGQTREHRSARLHPWVSKQLIVAINKMDTTNWSETRFKEIIKGSHQLHQERLATDPKGCSIFVPISGFNGDNMIEGFTNCPWYKGWNKETKAGGAKTGKTLLEAIDAIDMPTRPTDKPLRLPLQDVYKISGIGTVPVGRVETGIIKPGMVVTFAPANVTTEVKSVEMHHQQLQQGVPGDNVGFNVKNVSVKEVRRGNVAGDSKNDPPSGCASFNAQVIVLNHPGQIGAGYAPVLDCHTAHIACKFAELLEKIDRRTGKSVEANPKFVKSGDAAIAKMVPSKPMCVEAFTDYPPLGRFAVRDMRQTVAVGVIKAVEKATGGAGKVTKSAAKAGKK

SEQ ID NO: 27443 - DNA, 1344 bp, Saccharum hybrid cultivar CP65
  CDS (1)..(1344)
atgggtaaggagaagactcacatcaacattgtggtcattggccatgtcgactctggcaagtcgaccaccactggccacctgatctacaagcttggtggtattgacaagcgtgtgatcgagaggttcgagaaagaggctgcggagatgaacaagcgttcattcaagtatgcgtgggtgcttgacaagctcaaggccgagcgtgagagaggtatcacaattgatattgccctgtggaagtttgagaccaccaagtactactgtactgtcattgatgcccctggacaccgtgacttcatcaagaatatgatcactggtacttcccaggctgactgtgctgttcttatcattgacttcaccactggtggttttgaggctggtatcttcaaggatggtcagacccgtgagcatgctctccttgctttcacacttggagtgaagcagatgatttgctgctgcaacaagatggacgccaccacacccaagtactccaaggcccgttatgatgagattgtgaaggaagtctcttcctacctgaagaaggttgggtacaaccctgacaagatccactttgttcccatctctggattcgaaggtgacaacatgattgagaggtccactaaccttgactggtacaagggcccaaccctccttgaggctttggacttgatcaatgagccgaagaggccttcagacaagcccctgcggctcccccttcaggatgtgtacaagattggtggtattggaactgttcctgttgggcgtgttgagactggtgtcatcaagcccggtatggtggttaccttcggtcccagtggccttactactgaggttaagtctgttgagatgcaccacgaggctctccaggaggctcttcctggtgacaacgttggcttcaacgttaagaatgttgctgtgaaggatctgaagcgtgggtatgtggcctccaactccaaggatgaccctgccaaggaggctgctagcttcacctcccaggtcatcatcatgaaccaccctgggcagatcggcaacggctacgccccagtgctggactgccacacctcacacattgctgtcaagtttgctgagcttgtaaccaagattgataggcggtctggcaaggagcttgagaaggagcccaaattcctcaagaacggtgatgctggtatggtgaagatggttcccacaaagcccatggtggtggagaccttctctgaatatcctcctcttggtcgctttgctgtgcgggacatgaggcaaacggtggctgtcggagtcatcaagagtgtggagaagaaggacccaactggagccaaggtgaccaaggctgccgccaagaagaaatga

SEQ ID NO: 27444 - protein, 447 aa, Saccharum hybrid cultivar CP65
MGKEKTHINIVVIGHVDSGKSTTTGHLIYKLGGIDKRVIERFEKEAAEMNKRSFKYAWVLDKLKAERERGITIDIALWKFETTKYYCTVIDAPGHRDFIKNMITGTSQADCAVLIIDFTTGGFEAGIFKDGQTREHALLAFTLGVKQMICCCNKMDATTPKYSKARYDEIVKEVSSYLKKVGYNPDKIHFVPISGFEGDNMIERSTNLDWYKGPTLLEALDLINEPKRPSDKPLRLPLQDVYKIGGIGTVPVGRVETGVIKPGMVVTFGPSGLTTEVKSVEMHHEALQEALPGDNVGFNVKNVAVKDLKRGYVASNSKDDPAKEAASFTSQVIIMNHPGQIGNGYAPVLDCHTSHIAVKFAELVTKIDRRSGKELEKEPKFLKNGDAGMVKMVPTKPMVVETFSEYPPLGRFAVRDMRQTVAVGVIKSVEKKDPTGAKVTKAAAKKK

SEQ ID NO: 27445 - DNA, 1350 bp, Arabidopsis thaliana
  CDS (1)..(1350)
atgggtaaagagaagtttcacatcaacattgtggtcattggccacgtcgattctggaaagtcgacaaccactggacacttgatctacaagttgggtggtattgacaagcgtgtgatcgagaggttcgagaaggaggctgctgagatgaacaagaggtccttcaagtacgcatgggtgttggacaaacttaaggctgagcgtgagcgtggtatcaccattgacattgctctctggaagttcgagaccaccaagtactactgcactgtcattgatgctcctggtcatcgtgatttcatcaagaacatgatcactggtacctcccaggctgattgtgctgtccttatcattgactccaccactggtggttttgaggctggtatctccaaggatggtcagacccgtgagcacgctctccttgctttcacccttggtgtcaagcagatgatctgctgttgtaacaatatcgatgccactacccccaagtactccaaggccaggtacgatgaaatcatcaaggaggtgtcttcctacttgaagaaggttggttacaaccccgacaaaatcccatttgtgcccatctctggatttgagggtgacaacatgattgagaggtccaccaaccttgactggtacaagggaccaactctccttgaggctcttgaccagatcaacgagcccaagaggccgtcagacaagccccttcgtctcccacttcaggatgtctacaagattggtggtattggaacggtgccagtgggacgtgttgagactggtatgatcaagcctggtatggttgtgacctttgctcccacaggattgaccactgaggtcaagtctgttgagatgcaccacgagtctcttcttgaggcacttccaggtgacaacgttgggttcaatgttaagaatgttgccgtgaaggatcttaagagagggtacgtcgcctccaactccaaggatgaccctgccaagggtgctgctaacttcacctcccaggtcatcatcatgaaccaccctggtcagattggtaacggttacgccccagtcttggattgccacacctctcacattgcagtcaagttctctgagatcttgaccaagattgacaggcgttctggtaaggagattgagaaggagcccaaattcttgaagaatggtgatgctggtatggtgaagatgactccaaccaagcccatggttgtggagaccttctctgagtacccaccacttggacgtttcgctgttagggacatgaggcagactgttgcagtcggtgttatcaagagtgttgacaagaaggacccaaccggagccaaggttaccaaggctgcagttaagaagggtgcaaagtga

SEQ ID NO: 27446 - protein, 449 aa, Arabidopsis thaliana
MGKEKFHINIVVIGHVDSGKSTTTGHLIYKLGGIDKRVIERFEKEAAEMNKRSFKYAWVLDKLKAERERGITIDIALWKFETTKYYCTVIDAPGHRDFIKNMITGTSQADCAVLIIDSTTGGFEAGISKDGQTREHALLAFTLGVKQMICCCNNIDATTPKYSKARYDEIIKEVSSYLKKVGYNPDKIPFVPISGFEGDNMIERSTNLDWYKGPTLLEALDQINEPKRPSDKPLRLPLQDVYKIGGIGTVPVGRVETGMIKPGMVVTFAPTGLTTEVKSVEMHHESLLEALPGDNVGFNVKNVAVKDLKRGYVASNSKDDPAKGAANFTSQVIIMNHPGQIGNGYAPVLDCHTSHIAVKFSEILTKIDRRSGKEIEKEPKFLKNGDAGMVKMTPTKPMVVETFSEYPPLGRFAVRDMRQTVAVGVIKSVDKKDPTGAKVTKAAVKKGAK

SEQ ID NO: 27447 - DNA, 1344 bp, Elaeis oleifera
  CDS (1)..(1344)
atgggaaaggaaaaggtacacattaacattgtggtcattggccatgtcgattctggcaagtcaaccaccactgggcaccttatctacaagcttggtggtattgacaagcgtgtgattgagagattcgaaaaggaagcagctgaaatgaacaagaggtcattcaagtatgcttgggttcttgacaagctgaaggccgagcgagaacgtggtatcacaattgatattgctctgtggaagtttgagaccacaaagtactactgcactgtcattgatgcccctgggcatcgcgacttcatcaagaacatgatcactggcacctcccaggctgactgtgctgtccttatcatagactccacaactggtggttttgaagcaggtatcttcaaggatggacagactcgtgaacatgcattgcttgcctttactcttggtgtcaagcagatgatctgctgctgcaacaagatggatgccactacttccaagtattcaaaggctaggtatgatgaaattgtcaaggaagtctcttcctatctgaagaaggtcggttacaatcctgataagattcccttcgttccaatctctgggtttgaaggtgataacatgattgagaggtccaccaaccttgactggtacaagggccaaacccttcttgaggctttggacttgatacaggagcccaagaggccttcagacaagcccctccgtctttcacttcaggatgggtacaaaattggtggtatcggcactgtccaagttggacgtgttgagactggtgtcattaagcctggtatggtggttacttttgggccaactggtcttactactgaggtcaagtccgttgagatgcaccatgaggctctccaggaggcccttccaggtgataatgttggcttcaacgttaagaatgttgctgtcaaggatctcaagcgtgggtatgttgcttccaactccaaggatgatcccgcaaaggaggctgccaactttatcgctcaggtcatcatcatgaaccaccctggccagattggcaatggctatgccccagttctggactgccacacctcccatattgctgttaagtttgccgagctcgttactaagattgacaggcggtctggtaaggaacttgagaaagagcccaagtttttaaagaatggtgatgcaggttttgtgaagatgcttcccaccaagcccatggttgttgagaccttctctgagtacccccctcttggtcgatttgctgtgagggacatgcgccagaccgtagcagtgggtgtcatcaagagcgtggagaagaaggatccaactggtgccaagatcaccaaggcagctgctaagaagaagtga

SEQ ID NO: 27448 - protein, 447 aa, Elaeis oleifera
MGKEKVHINIVVIGHVDSGKSTTTGHLIYKLGGIDKRVIERFEKEAAEMNKRSFKYAWVLDKLKAERERGITIDIALWKFETTKYYCTVIDAPGHRDFIKNMITGTSQADCAVLIIDSTTGGFEAGIFKDGQTREHALLAFTLGVKQMICCCNKMDATTSKYSKARYDEIVKEVSSYLKKVGYNPDKIPFVPISGFEGDNMIERSTNLDWYKGQTLLEALDLIQEPKRPSDKPLRLSLQDGYKIGGIGTVQVGRVETGVIKPGMVVTFGPTGLTTEVKSVEMHHEALQEALPGDNVGFNVKNVAVKDLKRGYVASNSKDDPAKEAANFIAQVIIMNHPGQIGNGYAPVLDCHTSHIAVKFAELVTKIDRRSGKELEKEPKFLKNGDAGFVKMLPTKPMVVETFSEYPPLGRFAVRDMRQTVAVGVIKSVEKKDPTGAKITKAAAKKK

SEQ ID NO: 27449 - DNA, 1350 bp, Arabidopsis thaliana
  CDS (1)..(1350)
atgggtaaagagaagtttcacatcaacattgtggtcattggccacgtcgattctggaaagtcgacaaccactggacacttgatctacaagttgggtggtattgacaagcgtgtgatcgagaggttcgagaaggaggctgctgagatgaacaagaggtccttcaagtacgcatgggtgttggacaaacttaaggctgagcgtgagcgtggtatcaccattgacattgctctctggaagttcgagaccaccaagtactactgcactgtcattgatgctcctggtcatcgtgatttcatcaagaacatgatcactggtacctcccaggctgattgtgctgtccttatcattgactccaccactggtggttttgaggctggtatctccaaggatggtcagacccgtgagcacgctctccttgctttcacccttggtgtcaagcagatgatctgctgttgtaacaagatggatgccactacccccaagtactccaaggccaggtacgatgaaatcatcaaggaggtgtcttcctacttgaagaaggttggttacaaccccgacaaaatcccatttgtgcccatctctggatttgagggtgacaacatgattgagaggtccaccaaccttgactggtacaagggaccaactctccttgaggctcttgaccagatcaacgagcccaagaggccgtcagacaagccccttcgtctcccacttcaggatgtctacaagattggtggtattggaacggtgccagtgggacgtgttgagactggtatgatcaagcctggtatggttgtgacctttgctcccacaggattgaccactgaggtcaagtctgttgagatgcaccacgagtctcttcttgaggcacttccaggtgacaacgttgggttcaatgttaagaatgttgccgtgaaggatcttaagagagggtacgtcgcctccaactccaaggatgaccctgccaagggtgctgctaacttcacctcccaggtcatcatcatgaaccaccctggtcagattggtaacggttacgccccagtcttggattgccacacctctcacattgcagtcaagttctctgagatcttgaccaagattgacaggcgttctggtaaggagattgagaaggagcccaaattcttgaagaatggtgatgctggtatggtgaagatgactccaaccaagcccatggttgtggagaccttctctgagtacccaccacttggacgtttcgctgttagggacatgaggcagactgttacagtcagtgttatcaagagtgttgacaagaaggacccaaccggagccaaggttaccaaggctgcagttaagaagggtgcaaagtga

SEQ ID NO: 27450 - protein, 449 aa, Arabidopsis thaliana
MGKEKFHINIVVIGHVDSGKSTTTGHLIYKLGGIDKRVIERFEKEAAEMNKRSFKYAWVLDKLKAERERGITIDIALWKFETTKYYCTVIDAPGHRDFIKNMITGTSQADCAVLIIDSTTGGFEAGISKDGQTREHALLAFTLGVKQMICCCNKMDATTPKYSKARYDEIIKEVSSYLKKVGYNPDKIPFVPISGFEGDNMIERSTNLDWYKGPTLLEALDQINEPKRPSDKPLRLPLQDVYKIGGIGTVPVGRVETGMIKPGMVVTFAPTGLTTEVKSVEMHHESLLEALPGDNVGFNVKNVAVKDLKRGYVASNSKDDPAKGAANFTSQVIIMNHPGQIGNGYAPVLDCHTSHIAVKFSEILTKIDRRSGKEIEKEPKFLKNGDAGMVKMTPTKPMVVETFSEYPPLGRFAVRDMRQTVTVSVIKSVDKKDPTGAKVTKAAVKKGAK

SEQ ID NO: 27451 - DNA, 1194 bp, Streptomyces aureofaciens
  CDS (1)..(1194): transl_table=11
gtggccaaggcgaagttcgagcggacgaagccccacgtcaacatcggcaccatcggtcacatcgaccacggcaagaccacgctgaccgcggccatcaccaaggtgctgcacgacgcgtacccggagatcaaccccttcacgccgttcgaccagatcgacaaggccccggaggagcgtcagcgcggtatcaccatctcgatcgcgcacgtcgagtaccagaccgaggcgcgtcactacgcccacgtcgactgcccgggtcacgctgactacatcaagaacatgatcaccggtgccgcccagatggacggcgccatcctggtggtcgccgccaccgacggcccgatgccgcagaccaaggagcacgtcctcctggcccgccaggtcggcgttccgtacatcgtcgtcgccctgaacaaggccgacatggtggacgacgaggagatcctggagctcgtcgagctcgaggtgcgcgagctcctctcggagtacgagttcccgggcgacgacctgccggtcgtccgcgtctccgccctgaaggccctcgagggcgacaaggagtggggcgagaagctcctcggcctcatgcacgcggtcgacgagaacatccccaccccggcccgcgccgtggaccagccgttcctgatgccgatcgaggacgtcttcacgatcaccggtcgtggcaccgtcgtcaccggtcgtatcgagcgcggcatcctcaaggtcaacgagaccgtcgacatcatcggcatcaagaccgagaagaccaccaccacggtcaccggcatcgagatgttccgcaagctgctcgacgagggccaggccggtgagaacgtcggtctgctgctccgtggcatcaagcgcgaggacgtcgagcgcggccaggtcatcatcaagccgggttcggttaccccgcacaccgacttcgaggcccaggcctacatcctgtcgaaggacgagggtggccgccacaccccgttcttcaacaactaccgcccgcagttctactttcgtaccacggacgtgaccggcgtcgtgaccctccccgagggcaccgagatggtcatgccgggcgacaacaccgccatgaccgtcgcgctgatccagcccgtcgccatggaggagggcctgaagttcgccatccgtgagggtggccgtaccgtcggcgccggccaggtcaccaagatcgtcaagtaa

SEQ ID NO: 27452 - protein, 397 aa, Streptomyces aureofaciens
MAKAKFERTKPHVNIGTIGHIDHGKTTLTAAITKVLHDAYPEINPFTPFDQIDKAPEERQRGITISIAHVEYQTEARHYAHVDCPGHADYIKNMITGAAQMDGAILVVAATDGPMPQTKEHVLLARQVGVPYIVVALNKADMVDDEEILELVELEVRELLSEYEFPGDDLPVVRVSALKALEGDKEWGEKLLGLMHAVDENIPTPARAVDQPFLMPIEDVFTITGRGTVVTGRIERGILKVNETVDIIGIKTEKTTTTVTGIEMFRKLLDEGQAGENVGLLLRGIKREDVERGQVIIKPGSVTPHTDFEAQAYILSKDEGGRHTPFFNNYRPQFYFRTTDVTGVVTLPEGTEMVMPGDNTAMTVALIQPVAMEEGLKFAIREGGRTVGAGQVTKIVK

SEQ ID NO: 27453 - DNA, 1350 bp, Arabidopsis thaliana
  CDS (1)..(1350)
atgggtaaagagaagtttcacatcaacattgtggtcattggccacgtcgattctggaaagtcgacaaccactggacacttgatctacaagttgggtggtattgacaagcgtgtgatcgagaggttccagaaggaggctgctgagatgaacaagaggtccttcaagtacgcatgggtgttggacaaacttaaggctgagcgtgagcgtggtatcaccattgacattgctctctggaagatcgagaccaccaagtactactgcactggcattgatgctcctggtcatcgtgatttcatcaagaacatgatcactggtacctcccaggctgattgtgctgtccttatcattgactccaccactggtggttttgaggctggtatctccaaggatggtcagacccgtgagcacgctctccttgctttcacccttggtgtcaagcagatgatctgctgttgtaacaagatggatgccactacccccaagtactccaaggccaggtacgatgaaatcatcaaggaggtgtcttcctacttgaagaaggttggttacaaccccgacaaaatcccatttgtgcccatctctggatttgagggtgacaacatgattgagaggtccaccaaccttgactggtacaagggaccaactctccttgaggctcttgaccagatcaacgagcccaagaggccgttagacaagccccttcgtctcccacttcaggatgtctacaagattggtggtattggaacggtgccagtgggacgtgttgagactggtatgatcaagcctggtatggttgtgacctttgctcccacaggattgaccactgaggtcaagtctgttgagatgcaccacgagtctcttcttgaggcacttccaggtgacaacgttgggttcaatgttaagaatgttgccgtgaaggatcttaagagagggtacgtcgcctccaactccaaggatgaccctgccaagggtgctgctaacttcacctcccaggtcatcatcatgaaccaccctggtcagattggtaacggttacgccccagtcttggattgccacacctctcacattgcagtcaagttctctgagatcttgaccaagattgacaggcgttctggtaaggagattgagaaggagcccaaattcttgaagaatggtgatgctggtatggtgaagatgactccaaccaagcccatggttgtggagaccttctctgagtacccaccacttggacgtttcgctgttagggacatgaggcagactgttgcagtcggtgttatcaagagtgttgacaagaaggacccaaccggagccaaggttaccaaggctgcagttaagaagggtgcaaagtga

SEQ ID NO: 27454 - protein, 449 aa, Arabidopsis thaliana
MGKEKFHINIVVIGHVDSGKSTTTGHLIYKLGGIDKRVIERFQKEAAEMNKRSFKYAWVLDKLKAERERGITIDIALWKIETTKYYCTGIDAPGHRDFIKNMITGTSQADCAVLIIDSTTGGFEAGISKDGQTREHALLAFTLGVKQMICCCNKMDATTPKYSKARYDEIIKEVSSYLKKVGYNPDKIPFVPISGFEGDNMIERSTNLDWYKGPTLLEALDQINEPKRPLDKPLRLPLQDVYKIGGIGTVPVGRVETGMIKPGMVVTFAPTGLTTEVKSVEMHHESLLEALPGDNVGFNVKNVAVKDLKRGYVASNSKDDPAKGAANFTSQVIIMNHPGQIGNGYAPVLDCHTSHIAVKFSEILTKIDRRSGKEIEKEPKFLKNGDAGMVKMTPTKPMVVETFSEYPPLGRFAVRDMRQTVAVGVIKSVDKKDPTGAKVTKAAVKKGAK

SEQ ID NO: 27455 - DNA, 1350 bp, Arabidopsis thaliana
  CDS (1)..(1350)
atgggtaaagagaagtttcacatcaacattgtggtcattggccacgtcgattctggaaagtcgacaaccactggacacttgatctacaagttgggtggtattgacaagcgtttgatcgagaggttcgagaaggaggctgctgagatgaacaagaggtccttcaagtacgcatgggtgttggacaaacttaaggctgagcgtgagcgtggtatcaccattgacattgctctctggaagttcgagaccaccaagtactactgcactgtcattgatgctcctggtcatcgtgatttcatcaagaacatgatcactggtacctcccaggctgattgtgctgtccttatcattgactccaccactggtggttttgaggctggtatctccaaggatggtcagacccgtgagcacgctctccttgctttcacccttggtgtcaagcagatgatctgctgttgtaacaagatggatgccactacccccaagtactccaaggccaggtacgatgaaatcatcaaggaggtgtcttcctacttgaagaaggttggttacaaccccgacaaaatcccatttgtgcccatctctggatttgagggtgacaacatgattgagaggtccaccaaccttgactggtacaagggaccaactctccttgaggctcttgaccagatcaacgagcccaagaggccgtcagacaagccccttcgtctcccacttcaggatgtctacaagattggtggtattggaacggtgccagtgggacgtgttgagactggtatgatcaagcctggtatggttgtgacctttgctcccacaggattgaccactgaggtcaagtctgttgagatgcaccacgagtctcttcttgaggcacttccaggtgacaacgttgggttcaatgttaagaatgttgccgtgaaggatcttaagagagggtacgtcgcctccaactccaaggatgaccctgccaagggtgctgctaacttcacctcccaggtcatcatcatgaaccaccctggtcagattggtaacggttacgccccagtcttggattgccacacctctcacattgcagtcaagttctctgagatcttgaccaagattgacaggcgttctggtaaggagattgagaaggagcccaaattcttgaagaatggtgatgctggtatggtgaagatgactccaaccaagcccatggttgtggagaccttctctgagtacccaccacttggacgtttcgctgttagggacatgaggcagactgttgcagtcggtgttatcaagagtgttgacaagaaggacccaaccggagccaaggttaccaaggctgcagttaagaagggtgcaaagtga

SEQ ID NO: 27456 - protein, 449 aa, Arabidopsis thaliana
MGKEKFHINIVVIGHVDSGKSTTTGHLIYKLGGIDKRLIERFEKEAAEMNKRSFKYAWVLDKLKAERERGITIDIALWKFETTKYYCTVIDAPGHRDFIKNMITGTSQADCAVLIIDSTTGGFEAGISKDGQTREHALLAFTLGVKQMICCCNKMDATTPKYSKARYDEIIKEVSSYLKKVGYNPDKIPFVPISGFEGDNMIERSTNLDWYKGPTLLEALDQINEPKRPSDKPLRLPLQDVYKIGGIGTVPVGRVETGMIKPGMVVTFAPTGLTTEVKSVEMHHESLLEALPGDNVGFNVKNVAVKDLKRGYVASNSKDDPAKGAANFTSQVIIMNHPGQIGNGYAPVLDCHTSHIAVKFSEILTKIDRRSGKEIEKEPKFLKNGDAGMVKMTPTKPMVVETFSEYPPLGRFAVRDMRQTVAVGVIKSVDKKDPTGAKVTKAAVKKGAK

SEQ ID NO: 27457 - DNA, 1425 bp, Pelargonium graveolens
  CDS (1)..(1425)
atggcactaccagcaatttcagccaagctcttatgcccacacgcctctccttctcctctctccactctctcactcccctccacctccttctccactaaaccctcaattctcaccccaaccaatctctcctccacctccctcaacccctccaccgccgccatttccacgcgccgccgccgcgccttcaccgtccgcgccgcccgcggcaagttcgagcgcaagaagccccatgtcaacatcggcaccatcggccacgtcgaccacggcaagaccaccctcaccgccgccctcaccatggccctcgcctccttaggcaacagcgcccccaaaaagtacgacgagatcgatgccgcgccggaggagcgagcccgcggcatcaccatcaacaccgccaccgtggagtacgagaccgagaaccgccactacgcccacgtggactgccccggccacgccgattacgtcaagaacatgatcaccggagctgctcagatggacggagccatcctcgtggtctccggcgccgacggcccgatgccacagacgaaggagcacattttgctggccaagcaggttggtgtgcccaacatggtggtgttcctcaacaagcaggaccaggttgatgatgaggagctcttggagcttgttgaattggaggtgcgtgagcttctttctgcatatgaattccctggtgatgaagtgcccatcatttccgggtcggctctgttagctttggaggctcttatggccaatcccgccattaaacgtggcgagaaccaatgggttgacaaaatctttagccttatggattctgtggatagctacattcctctccctcagcgccagactgaccttccgtttttgctagctgttgaggatgtgttttcaatcaccggacgtggtaccgttgccacgggtcgtgttgagaggggtacggttaggatcggagagactgtggagatagttggtttgagggataccagaagtgttactgtcaccggagtggaaatgttccagaaaattcttgatgaggcattggctggggacaatgtcgggttgttgcttagaggtgttcagaaggaggatatcacgagagggatggttctcgccaagcccggcacaatcacaccccacaccaaattctctgccattgtgtatgtcttgaagaaggaagagggtgggaggcattcgcctttctttgccggatacaggccccaattctttgtgagaacgactgatgttactggcaaggttgccaccattatgaatgataaggatgaggagtctaagatggttatgcctggtgatcgtgtcaagatggttgttgagcttattttgcccattgcttgtgagcagggcatgcggtttgctattagagaaggagggaagactgttggagccggtgttatttcatccatcattgagtga

SEQ ID NO: 27458 - protein, 474 aa, Pelargonium graveolens
MALPAISAKLLCPHASPSPLSTLSLPSTSFSTKPSILTPTNLSSTSLNPSTAAISTRRRRAFTVRAARGKFERKKPHVNIGTIGHVDHGKTTLTAALTMALASLGNSAPKKYDEIDAAPEERARGITINTATVEYETENRHYAHVDCPGHADYVKNMITGAAQMDGAILVVSGADGPMPQTKEHILLAKQVGVPNMVVFLNKQDQVDDEELLELVELEVRELLSAYEFPGDEVPIISGSALLALEALMANPAIKRGENQWVDKIFSLMDSVDSYIPLPQRQTDLPFLLAVEDVFSITGRGTVATGRVERGTVRIGETVEIVGLRDTRSVTVTGVEMFQKILDEALAGDNVGLLLRGVQKEDITRGMVLAKPGTITPHTKFSAIVYVLKKEEGGRHSPFFAGYRPQFFVRTTDVTGKVATIMNDKDEESKMVMPGDRVKMVVELILPIACEQGMRFAIREGGKTVGAGVISSIIE

SEQ ID NO: 27459 - DNA, 1350 bp, Arabidopsis thaliana
  CDS (1)..(1350)
atgggtaaagagaagtttcacattaacattgtggtcattggtcatgttgattctggaaaatcgaccacaactggtcacttgatctataagcttggtggtattgacaagcgtgtcatcgagaggttcgagaaggaggctgctgagatgaacaagaggtccttcaagtacgcatgggtgttggacaaacttaaggccgagcgtgagcgtggtattaccatcgatattgctctatggaagttcgagaccaccaagtactactgcacagtcattgatgccccaggacatcgtgatttcatcaagaacatgattactggtacctcccaggctgattgtgctgttcttatcattgactccaccactggaggttttgaggctggtatctctaaggatggtcagacccgtgagcacgcttttcttgctttcacccttggtgtcaagcagatgatttgctgttgtaacaagatggatgccaccacccccaaatactccaaggctaggtacgatgaaatcatcaaggaggtgtcttcatacctgaagaaggtcggatacaaccctgacaaaatcccatttgtgccaatctctggattcgagggagacaacatgattgagaggtcaaccaaccttgactggtacaagggaccaactcttcttgaggctcttgaccagatcaacgagcccaagaggccatcagacaagccccttcgtcttccacttcaggatgtctacaagattggtggtattggaacggtgccagtgggacgtgttgagactggtatgatcaagcctggtatggttgttacctttgctcccacagggttgaccactgaggttaagtctgttgagatgcaccacgagtctcttcttgaggcacttcccggtgacaatgttggattcaatgtcaagaatgttgctgtcaaggatcttaagagaggatacgttgcctctaactccaaggatgatccagctaagggtgccgccaacttcacctcccaggtcatcatcatgaaccaccctggtcagattggtaacggttacgccccagttctcgattgccacacctctcacattgcagtcaagttctctgagatcttgaccaagattgacaggcgttctggtaaggagattgagaaggagcccaagtttttgaagaatggtgacgctggtatggttaagatgaccccaaccaagcccatggttgttgagactttctccgagtacccacctttgggacgtttcgctgttagggacatgaggcagaccgttgctgttggtgttattaagagcgtggacaagaaggacccaactggagccaaggtcaccaaggctgcagtgaagaagggtgccaaatga

SEQ ID NO: 27460 - protein, 449 aa, Arabidopsis thaliana
MGKEKFHINIVVIGHVDSGKSTTTGHLIYKLGGIDKRVIERFEKEAAEMNKRSFKYAWVLDKLKAERERGITIDIALWKFETTKYYCTVIDAPGHRDFIKNMITGTSQADCAVLIIDSTTGGFEAGISKDGQTREHAFLAFTLGVKQMICCCNKMDATTPKYSKARYDEIIKEVSSYLKKVGYNPDKIPFVPISGFEGDNMIERSTNLDWYKGPTLLEALDQINEPKRPSDKPLRLPLQDVYKIGGIGTVPVGRVETGMIKPGMVVTFAPTGLTTEVKSVEMHHESLLEALPGDNVGFNVKNVAVKDLKRGYVASNSKDDPAKGAANFTSQVIIMNHPGQIGNGYAPVLDCHTSHIAVKFSEILTKIDRRSGKEIEKEPKFLKNGDAGMVKMTPTKPMVVETFSEYPPLGRFAVRDMRQTVAVGVIKSVDKKDPTGAKVTKAAVKKGAK

SEQ ID NO: 27461 - DNA, 1359 bp, Zea mays
  CDS (1)..(1359)
atggcttccgccgcggtgctccggaacgccggctcccggcgcctcttctcctaccctactctccgcgccgctgcgatatatgtaccttctgcgctacccgatgcgcccgcggcggcggcagcgccggcccagccgccaccgacggccgggaccctctgggcgaggtctatggccaccttcacgcgcacgaagccccatgtgaccgtcggcaccattgggcacgtcgatcacggcaaaaccactctcactgctgccattaccaaggtcctggccgaggcagggaaggccaaagccgttgctttcgacgagatcgacaaggctccggaggagaaagccagaggaatcaccattgcgacagctcacgtcgagtatgagacggctaaaaggcattatgctcacgttgattgtccaggtcacgcagattatgtcaagaacatgatcactggagctgctcaaatggatggtggtattcttgtcgtgtcagctcctgatggcccgatgccacaaactaaggagcatattcttcttgcccgtcaggttggtgtaccttcccttgtgtgcttcttaaacaaagttgatgctgttgatgatccagagcttctggaacttgtagagatggagcttcgggagctcctcagtttctacaagttccccggtgatgagattccgatcatccgtgggtctgcgttgtctgctttgcaagggaacaatgatgagataggaaagaatgcaattttgaaattaatggacgcagttgatgagtacatccctgatcctgtgaggcagcttgataagcctttcttgatgccgatagaagatgtgttttctattcagggtcgtggaactgttgttactgggcgtgttgaacagggaacaatcaaaactggtgaagatgttgagatcttgggtttggcacagactggtcccttgaagactacagttactggtgttgagatgttcaaaaagatactggaccatgggaaagctggtgacaacgttgggcttcttctccgtggtcttaagcgtggtgatgttgagcgtggccaggtggtgtgcagacctgggtattctgaagactgcaaaaagttcgaggcggaaatatatgtcctgacaaaggatgaaggtggccggcacactgcctttgtcacaaattacagcccccaattctacttcaggacagctgatgtcactggaagggttgagctgcttggggagatgaagatggttttgcccggtgacaatgtaactgcgaattttgacttgatatcacctgttcctcttgaacctgggcaaagatttgcgattagggaaggaggaagaacggtcggtgctggagtcgtctccaaagttcttagctga

SEQ ID NO: 27462 - protein, 452 aa, Zea mays
MASAAVLRNAGSRRLFSYPTLRAAAIYVPSALPDAPAAAAAPAQPPPTAGTLWARSMATFTRTKPHVTVGTIGHVDHGKTTLTAAITKVLAEAGKAKAVAFDEIDKAPEEKARGITIATAHVEYETAKRHYAHVDCPGHADYVKNMITGAAQMDGGILVVSAPDGPMPQTKEHILLARQVGVPSLVCFLNKVDAVDDPELLELVEMELRELLSFYKFPGDEIPIIRGSALSALQGNNDEIGKNAILKLMDAVDEYIPDPVRQLDKPFLMPIEDVFSIQGRGTVVTGRVEQGTIKTGEDVEILGLAQTGPLKTTVTGVEMFKKILDHGKAGDNVGLLLRGLKRGDVERGQVVCRPGYSEDCKKFEAEIYVLTKDEGGRHTAFVTNYSPQFYFRTADVTGRVELLGEMKMVLPGDNVTANFDLISPVPLEPGQRFAIREGGRTVGAGVVSKVLS

SEQ ID NO: 27463 - DNA, 1347 bp, Saccharum officinarum
  CDS (1)..(1347)
atgggtaaggagaagtcccacatcaacattgtggttattggccacgtcgactctggcaagtcgaccactacgggccacctgatctataagcttggaggcattgacaagcgtgtgatcgagaggttcgagaaggaggccgctgaaatgaacaagcggtccttcaagtatgcatgggtgctcgacaagctcaaggctgagcgtgagagaggtatcaccattgatatcgctctgtggaaatttgagaccaccaagtactactgcactgtcattgatgcccctggacatcgcgacttcatcaagaacatgatcaccggtacctcccaggctgactgtgctgtccttatcattgactccaccactggtggttttgaggctggtatctccaaggatggccagacccgtgagcatgccctccttgctttcacccttggagtgaagcagatgatttgctgctgctgctgcaacaagatggatgcgaccactcccaagtactccaaggcccgttatgatgagattgtgaaggaagtctcatcctacctcaagaaggttggatacaaccctgacaagattgctttcgtcccaatctctggttttgagggtgacaacatgattgagaggtccaccaaccttgactggtacaagggcccaaccctgcttgaggctcttgaccagatcaccgagcccaagaggccctcggacaagcctctgcgtctgcccctccaggatgtgtacaagattggtggtattggaactgtaccagttggtcgtgtggagactggtgtcatcaagcctggtatggttgtcaccttcggtccaactggcctgactactgaggtgaagtctgttgagatgcaccacgaggctcttcaggaggcccttcctggtgacaatgttggattcaacgtgaagaacgtcgctgtgaaggatctgaagcgtgggtatgtggcctccaactccaaggatgaccctgccaaggaggctgccagcttcacctcccaggtcatcatgaaccaccctgggcagatcggcaacggctatgctccagtgctggactgccacacctcccacatcgctgtcaagtttgctgagctcattaccaagatcgacaggcggtctggcaaggagcttgagaaggaggccaagttcctgaagaacggtgatgctggtatggtgaagatgattcccaccaagccgatggtggtggagacattctccgagtatcctccccttggtaggtttgctgtccgcgacatgaggcaaacggttgctgttggaatcatcaagagtgtggagaagaaggacccgaccggcgccaaggtgaccaaggctgctgccaagaagaaatga

SEQ ID NO: 27464 - protein, 448 aa, Saccharum officinarum
MGKEKSHINIVVIGHVDSGKSTTTGHLIYKLGGIDKRVIERFEKEAAEMNKRSFKYAWVLDKLKAERERGITIDIALWKFETTKYYCTVIDAPGHRDFIKNMITGTSQADCAVLIIDSTTGGFEAGISKDGQTREHALLAFTLGVKQMICCCCCNKMDATTPKYSKARYDEIVKEVSSYLKKVGYNPDKIAFVPISGFEGDNMIERSTNLDWYKGPTLLEALDQITEPKRPSDKPLRLPLQDVYKIGGIGTVPVGRVETGVIKPGMVVTFGPTGLTTEVKSVEMHHEALQEALPGDNVGFNVKNVAVKDLKRGYVASNSKDDPAKEAASFTSQVIMNHPGQIGNGYAPVLDCHTSHIAVKFAELITKIDRRSGKELEKEAKFLKNGDAGMVKMIPTKPMVVETFSEYPPLGRFAVRDMRQTVAVGIIKSVEKKDPTGAKVTKAAAKKK

SEQ ID NO: 27465 - DNA, 2415 bp, Arabidopsis thaliana
  CDS (1)..(2415)
atgtcaggagtttgggtgttcaataacggagtgatacgtctagtggagaacccgaaccagtccggtggagtttccacacagtcgcacggccggagaaatgtcttggtttacttgccgaccggtgaagccgtctcatcttactcgtcgctcgaacaaatcctaaggagcctcgggtgggaaagatacttcagtggagactccgatctcatccagtaccacaaacgctcctccatcgacctcatctccttaccaagagacttctccaagttcaactccgtttacatgtacgacatcgttgtcaagaaccctaattccttccacaaacaaacgatgcctcgtaaaggattatccaatttcgatgattatgatgatggttttgatgatgatgacgatgcttttgattatgactatgatgttgatatagatgaacatgaagaagaagctgctgctgaaccaaaggaagaaattgctaaaacgcaagggctttggcgatgtgctatctgtacatatgacaatgttgagactatgtttgtgtgtgatatctgcggtgttcttcgtcatcctgtcgccggaaatcaaagtatcaataagaatacagctgttcgtgttgtgagtctctttgcaattgtggtgttgcaaaggcgttattctgacagttccttttcaacttatgtagcacctttcaagtttgatgctccatcgccagatgatttagtctccaatggactaacatcctcaaaaactggtccaaaaggctcaggtgatgctagcatgagacagaaggagaagcaagatagcgtagaacagaaacctttaaagaaaggaggagatagttcagaaacaagctcccgaggtagacatgataaacttgatgataagggcggtgctggcggcataaaatcaggcaaaagtttgccaaaagcaaaagcagatatgtctaatgagacaagttcgtcctctaaatatatggagacgtcggagagtcttactggtactatgaacaagatgtctttgattggggaaacagaaaactctagcgatattaaaattagaggaccaaaatcacaatctaagcataagccagaggagtggatgcttcttgataaagaatcagatgcactaagccagcttaatcttgccatcgtggggcatgttgattccggtaagtctacactttcgggtagattattgcatcttttgggaagaatatcgcagaagcaaatgcacaagtatgagaaagaagcaaagttgcagggcaaagggtcctttgcatatgcctgggcattggatgagagtgctgaagagagggaacgaggaataacaatgactgtggctgttgcttatttcaattccaaaagacatcatgttgttttgctcgactctcctggacacaaagattttgttccaaacatgatagcaggagcaacacaagcagatgctgcgattcttgtcatagatgcatctgttggtgcttttgaagctggttttgataatttgaaagggcagacaagggagcatgcacgggttctgagaggttttggcgtggagcaagtcatagttgcaatcaacaaaatggatattgttggctactcaaaggaaagatttgatttgattaagcagcacgttggatcttttttgcaatcctgtcgttttaaggattcttctctgacatggattccattaagtgccatggaaaaccaaaacttggtggcagctccctctgataaccgcctatcctcatggtatcaaggtccatgtttattggatgccgtcgactctgtcaagtctcctgatagagacgtctcaaagcctctactcatgcctatatgtgacgctgtaagatcaacttcgcaagggcaggtatctgcatgtggcaaacttgaagctggagctgtccggccaggatctaaggtaatggttatgccatcaggagatcaaggaaccatacgatcactagagcgtgactctcaggcttgcaccattgcaagagctggagataacgtagcgttagcgttgcaagggatcgatgcaaatcaagtaatggcaggagatgtattgtgccatcctgatttccctgtatcagtagcaactcatttggaattgatggtgctcgtcttggaaggcgcaacaccgatcttgctcggttctcagttggagtttcatgtgcatcatgcaaaggaagcagcaacagttgtgaaacttgtggcaatgcttgatcccaaaacagggcagccaacaaagaagtctcctcgttgtctaactgctaaacagagcgcaatgcttgaggttagtctccaaaatccagtatgtgtggagacattttctgagagtagagctcttggaagagtgttccttagatcatcgggaagaactgttgctatgggcaaagttactcggattatccaagactcataa

SEQ ID NO: 27466 - protein, 804 aa, Arabidopsis thaliana
MSGVWVFNNGVIRLVENPNQSGGVSTQSHGRRNVLVYLPTGEAVSSYSSLEQILRSLGWERYFSGDSDLIQYHKRSSIDLISLPRDFSKFNSVYMYDIVVKNPNSFHKQTMPRKGLSNFDDYDDGFDDDDDAFDYDYDVDIDEHEEEAAAEPKEEIAKTQGLWRCAICTYDNVETMFVCDICGVLRHPVAGNQSINKNTAVRVVSLFAIVVLQRRYSDSSFSTYVAPFKFDAPSPDDLVSNGLTSSKTGPKGSGDASMRQKEKQDSVEQKPLKKGGDSSETSSRGRHDKLDDKGGAGGIKSGKSLPKAKADMSNETSSSSKYMETSESLTGTMNKMSLIGETENSSDIKIRGPKSQSKHKPEEWMLLDKESDALSQLNLAIVGHVDSGKSTLSGRLLHLLGRISQKQMHKYEKEAKLQGKGSFAYAWALDESAEERERGITMTVAVAYFNSKRHHVVLLDSPGHKDFVPNMIAGATQADAAILVIDASVGAFEAGFDNLKGQTREHARVLRGFGVEQVIVAINKMDIVGYSKERFDLIKQHVGSFLQSCRFKDSSLTWIPLSAMENQNLVAAPSDNRLSSWYQGPCLLDAVDSVKSPDRDVSKPLLMPICDAVRSTSQGQVSACGKLEAGAVRPGSKVMVMPSGDQGTIRSLERDSQACTIARAGDNVALALQGIDANQVMAGDVLCHPDFPVSVATHLELMVLVLEGATPILLGSQLEFHVHHAKEAATVVKLVAMLDPKTGQPTKKSPRCLTAKQSAMLEVSLQNPVCVETFSESRALGRVFLRSSGRTVAMGKVTRIIQDS

SEQ ID NO: 27467 - DNA, 1344 bp, Capsicum annuum
  CDS (1)..(1344)
atgggtaaggagaagattcacatcagcattgtggtcattggccacttgactctggaaaagtcaactaccactggtcacttgatctataagcttggcggtattgacaagcgtgttattgagaggtttgagaaggaagctgctgagatgaacaagagatcattcaagtatgcctgggtgcttgacaagcttaaggctgaacgtgagcgtggtatcaccattgatattgctttgttggaatttgagaccactaagtactactgcaccgtgaatgattgcccccggggcacagggactttatcaagaacaatgttactggtactccaggctgattgtgctgtcttattattacctaccactggtggttttgaagtggtatcttctaaagatggccagacccgtgaacatggtttgcttgctttcaccctggagtcaagcaaaatgatttgttgctgcaacaagatggatgctaccactccaagtactcccaaggctaggtatgatgaaatcgtgaaggaagtttcttcttacctcaagaaggttggttacaaccctgacaagatccccttcgtccctatttctggttttgaaggagataatatgattgagaggtctaccaaccttgactggtacaagggtccaacccttcttgaggctcttgaccagattaatgagcccaagaggccatcagacaagcccttccgccttccacttaaggatgtttacaagattggtggtattggaactgtccctgttggtcgtgtagagactggtgtgatcaagcctggtatggttgtgacctttggaccttctggtttgacaactgaagtcaaatctgtagagatgcaccacgaagctctccaggaggcactccctggtgacaatgttggattcaacgttaagaatgttgctgttaaggatcttaagcgtggttatgttgcctcaaactccaaggatgacccagccaagggggctgccagcttcactgcccaggtcatcatcatgaaccatcctggacagattggaaatggatatgccccagttctcgactgccacacttcccacattgctgtcaagtttggggagattttgaccaagatcgacaggtggtcgggtaaggaacttgagaaggagcctaagttccttaagaatggtgatgctggcatggttaagatgattcccaccaagccaatggtggttgaaacctttgcagaaaacccaccattgggtcgttttgctgtgagagacatgaggcaaactgttgctgttggtgttgtcaagaatgttgacaagaaggacccaactggtgccaaggtcaccaaggctgcccagaagaaggggaagtga

SEQ ID NO: 27468 - protein, 447 aa, Capsicum annuum
MGKEKIHISIVVIGHLTLEKSTTTGHLIYKLGGIDKRVIERFEKEAAEMNKRSFKYAWVLDKLKAERERGITIDIALLEFETTKYYCTVNDCPRGTGTLSRTMLLVLQADCAVLLLPTTGGFEVVSSKDGQTREHGLLAFTLESSKMICCCNKMDATTPSTPKARYDEIVKEVSSYLKKVGYNPDKIPFVPISGFEGDNMIERSTNLDWYKGPTLLEALDQINEPKRPSDKPFRLPLKDVYKIGGIGTVPVGRVETGVIKPGMVVTFGPSGLTTEVKSVEMHHEALQEALPGDNVGFNVKNVAVKDLKRGYVASNSKDDPAKGAASFTAQVIIMNHPGQIGNGYAPVLDCHTSHIAVKFGEILTKIDRWSGKELEKEPKFLKNGDAGMVKMIPTKPMVVETFAENPPLGRFAVRDMRQTVAVGVVKNVDKKDPTGAKVTKAAQKKGK

SEQ ID NO: 27469 - DNA, 1344 bp, Zea mays
  CDS (1)..(1344)
atgggtaaggagaagtcccacatcaacattgtggtcattggccatgtcgactctggcaagtcgaccaccaccggccacctgatctacaagcttggaggcattgacaagcgtgtaattgagaggtttgagaaggaggctgctgacatgaacaagcggtccttcaagtatgcttgggtgctcgacaagctcaaggctgagcgtgagagaggtatcaccattgatattgctctgtggaagtttgagaccaccaagtattactgcaccgtcattgatgcccctggacaccgtgacttcatcaagaacatgatcactggtacctcccaggctgactgtgctgtccttatcattgactccaccactggtggttttgaggctggtatctccaaggatggccagacccgtgagcatgctctccttgcgttcactcttggagtgaaacagatgatttgctgctgcaacaagatggatgcaacgactcccaaatactccaaggcgcgttatgatgagattgtgaaggaagtctcatcctacctcaagaaagttgggtacaaccctgataagattgcctttgtccccatctctggttttgagggcgccaacatgattgagaggtccaccaaccttgactggtacaaaggcccaaccctgcttgaggctcttgaccagatcaccgagccgaagaggccttcagacaagcccctgcgtctccccctgcaggatgtgtacaagattggtggtattggaactgtaccggttggtcgtgtggagactggtgtcatcaagcctggtatggttgtcaccttcggtccaactggcctgactactgaggtgaagtctgttgagatgcaccacgaggcacttcaggaggctcttccgggtgacaatgttggcttcaacgtgaagaacgttgctgtcaaggatctcaagcgtgggtttgtggcctcaaactccaaggatgaccctgccaaggaggctgccagcttcacgtcccaggtcatcatcatgaaccaccctgggcagataggcaatggctatgccccagtgctggactgccacacctcccacatcgctgtcaagtttgctgagctcattaccaagatcgacaggcgctctggcaaggagcttgagaaggagccaaagttcctgaaggacggtgatgctggtatggtgaagatgatacccaccaagcctatggtggtggagacattctccgcgtttcctccccttggtaggtttgctgtccgcgacatgaggcagacagttgctgttggagtcatcaagagtgtggagaagaaggacccgaccggcgccaaggtgaccaaggcggccgccaagaagaaatga

SEQ ID NO: 27470 - protein, 447 aa, Zea mays
MGKEKSHINIVVIGHVDSGKSTTTGHLIYKLGGIDKRVIERFEKEAADMNKRSFKYAWVLDKLKAERERGITIDIALWKFETTKYYCTVIDAPGHRDFIKNMITGTSQADCAVLIIDSTTGGFEAGISKDGQTREHALLAFTLGVKQMICCCNKMDATTPKYSKARYDEIVKEVSSYLKKVGYNPDKIAFVPISGFEGANMIERSTNLDWYKGPTLLEALDQITEPKRPSDKPLRLPLQDVYKIGGIGTVPVGRVETGVIKPGMVVTFGPTGLTTEVKSVEMHHEALQEALPGDNVGFNVKNVAVKDLKRGFVASNSKDDPAKEAASFTSQVIIMNHPGQIGNGYAPVLDCHTSHIAVKFAELITKIDRRSGKELEKEPKFLKDGDAGMVKMIPTKPMVVETFSAFPPLGRFAVRDMRQTVAVGVIKSVEKKDPTGAKVTKAAAKKK

SEQ ID NO: 27471 - DNA, 1344 bp, Zea mays
  CDS (1)..(1344)
atgggtaaggagaagtcccacatcaacattgtggtcattggccatgtcgactctggcaagtcgaccaccaccggccacctgatctacaagcttggaggcattgacaagcgtgtaatagagaggtttgagaaggaggctgctgagatgaacaagcggtccttcaagtatgcttgggtgctcgacaagctcaaggctgagcgtgagaggggtatcaccattgatattgctctgtggaagtttgagaccaccaagtattactgcaccgtcattgatgcccctggacaccgtgacttcatcaagaacatgatcactggtacctcccaggctgactgtgctgtccttatcattgactccaccactggtggttttgaggctggtatctccaaggatggccagacccgtgagcatgctctccttgcgttcactcttggagtgaaacagatgatttgctgctgcaacaagatggatgcaacgactcccaaatactccaaggcacgttatgaagagattgtgaaggacgtctcatcctacctcaagaaagttggctacaaccctgataagattgcctttgttcccatttctggttatgagggcgacaacatgattgagaggtccaccaaccttgactggtacaaaggcccaaccctgcttgaggctcttgaccaaatcaccgagccgaagaggccttcagacaagccgctgcgtctagccttccaggatgtgtacaagattggtggtattggaactgtaccggttggtcgtgtggagactggtgtcatcaagcctggtatggtagtcaccattggtccaactggcctgactaccgaggtgaagtctgttgagatgcaccacgaggcacttcaggaggctcttccgagtgacaatgttggcttcaacgtgaagaatgttgctgtcaaggatctcaagcgtgggtttgtggcctccaactccaagcatgaccctgccaaggaggctgccagcttcacctcccaggtcatcatcatgacccaccctgggcagattggcaacggctatggccctgtgctggactgccacacctcccacatcgctgtcaagtttgctgagctcattaccaagatcgacaggcgctctggcaaggagcttgaaaaggagccaaagttcctgaagaacggtgatgctggtatggtgaagatgatacccaccaagcctatggtggtggagacattctccgcgtatcctcccctgggtaggttagccgtccgcgacatgaggcagacggttgctgttggagtcatcaagagtgtggagaagaaggacccgaccggcgccaaggttaccaaggcagctgccaaaaagaaatga

SEQ ID NO: 27472 - protein, 447 aa, Zea mays
MGKEKSHINIVVIGHVDSGKSTTTGHLIYKLGGIDKRVIERFEKEAAEMNKRSFKYAWVLDKLKAERERGITIDIALWKFETTKYYCTVIDAPGHRDFIKNMITGTSQADCAVLIIDSTTGGFEAGISKDGQTREHALLAFTLGVKQMICCCNKMDATTPKYSKARYEEIVKDVSSYLKKVGYNPDKIAFVPISGYEGDNMIERSTNLDWYKGPTLLEALDQITEPKRPSDKPLRLAFQDVYKIGGIGTVPVGRVETGVIKPGMVVTIGPTGLTTEVKSVEMHHEALQEALPSDNVGFNVKNVAVKDLKRGFVASNSKHDPAKEAASFTSQVIIMTHPGQIGNGYGPVLDCHTSHIAVKFAELITKIDRRSGKELEKEPKFLKNGDAGMVKMIPTKPMVVETFSAYPPLGRLAVRDMRQTVAVGVIKSVEKKDPTGAKVTKAAAKKK

SEQ ID NO: 27473 - DNA, 1344 bp, Zea mays
  CDS (1)..(1344)
atggggaaggagaagtcccacatcaacattgtggtcattggccatgtcgactccggcaagtccacaaccaccggccacctcatctacaagcttggaggcattgacaagcgtgtgatcgagaggtttgagaaggaggctgccgagatgaacaaacggtccttcaagtacgcttgggcgctcgacaagctcaaggctgagcgcgagagaggcatcaccattgacattgccctgtggaagtttgagaccaccaagtactactgcaccgtcattgatgcccctggaccccgtgacttcatcaagaacatgatcactggcacctcccaggctgattgtgctgtccttatcattgactccaccactggtggtttcgaggctggtatctccaaggacggccagacccgtgagcatgccctccttgctttcactcttggtgtgaggcagatgatctgctgctgcaacaagatggatgccactacccccaagtactccaaggcacgttatgaagagattgtgaaggaagtctcatcctacctcaagaaagttggttacaaccctgataagattgcctttgttcccatttctggttttgagggcgacaacatgattgagaggtccaccaaccttgactggtacaatggcccaaccctgcttgaggctcctgaccagatcaccgagcccaagaggccttcagacaagcccatgcgtctagccctccaggatgtgtacaagattggtggttttggaactgtaccggttggtcgtgtggagactggtgtcatcaagcctgttatggtagtcacctttggtccaactggcctgactaccgaggtgaagtctgttgagatgcaccacgaggcaattcaggaggctcttccgggtgacaatgttggcttcaacttgaagaatgttgctgtcaaggatctcaagcgtgggtttgtggcctccaactccaaggatgaccttgccaaggaggctgccagcttcacttcccaggtgatcatcatgaaccacccggggcagatcggcaacggctacgcccctgtgctggactgccacacgtcccacatcgccgtgaagtttgctgagctcattaccaagattgaccggcggtcgggcaaggagctaggagaggagccaaagtttctcaagaacggtgacgccggtttcgtgaagatggtccccacgaagcccatggtggtggagactttctccgagtatcctccactgggtaggtttgcggtccgcgacatgaggcagacggttgcagtcggcgtgatcaagagtgtggagaagaaggacccaaccggcgccaaggtgaccaaggcggccgccaagaagaaatga

SEQ ID NO: 27474 - protein, 447 aa, Zea mays
MGKEKSHINIVVIGHVDSGKSTTTGHLIYKLGGIDKRVIERFEKEAAEMNKRSFKYAWALDKLKAERERGITIDIALWKFETTKYYCTVIDAPGPRDFIKNMITGTSQADCAVLIIDSTTGGFEAGISKDGQTREHALLAFTLGVRQMICCCNKMDATTPKYSKARYEEIVKEVSSYLKKVGYNPDKIAFVPISGFEGDNMIERSTNLDWYNGPTLLEAPDQITEPKRPSDKPMRLALQDVYKIGGFGTVPVGRVETGVIKPVMVVTFGPTGLTTEVKSVEMHHEAIQEALPGDNVGFNLKNVAVKDLKRGFVASNSKDDLAKEAASFTSQVIIMNHPGQIGNGYAPVLDCHTSHIAVKFAELITKIDRRSGKELGEEPKFLKNGDAGFVKMVPTKPMVVETFSEYPPLGRFAVRDMRQTVAVGVIKSVEKKDPTGAKVTKAAAKKK

SEQ ID NO: 27475 - DNA, 1344 bp, Zea mays
  CDS (1)..(1344)
atgggcaaggagaagtcccacatcaacattgtggttattggccatgtcgactctggcaagtcaaccaccaccggccacctgatctacaagcttggaggcattgacaagcgtgtgattgagaggttcgagaaggaagccgctgaaatgaacaaacggtccttcaagtacgcttgggtgcttgacaagctcaaggctgagcgtgagagaggtatcaccattgatattgctctgtggaagtttgagaccaccaagtactactgcactgtcattgatgcccctggacatcgcgacttcatcaagaacatgatcacgggtacctctcaggctgactgtgctgttcttatcattgactccaccactggtggttttgaggccggtatctctaaggatggccagacccgtgagcatgctctccttgctttcacccttggggtcaagcagatgatttgctgctgcaacaagatggatgcaaccactcccaaatattccaaggcccgttacgatgagattgtgaaggaagtttcatcctacctcaagaaggttggatacaaccctgacaagattgcctttgtccctatctctggttttgagggtgacaacatgattgagaggtccaccaaccttgactggtacaaaggtccaaccctgcttgaggctcttgaccagatcaccgagcccaagaggccttcagacaagcccctgcgtctagccctccaggatgtgtacaagattggtggtattggaactgttcaggttggtcgtgtggagactggtgtcatcaagcctgatatggtagtcaccttcggtccaactggcctgaccactgaggtgaagtctgttgagatgcaccacgaggctctccaggaggcccttcctggtgacaatgttggcttcaatgtgaagaacgttgctgtgaaggatctcaatcgtgggtttgtggcctccaactctaaggatgaccctgccaaggaggctgctagcttcacctcccaagtcatcatcatgaaccaccctgggcagattggcaatggctatgccccagtgctggactgccacacctcccacattgctgtcaagtttgctgagctcattaccaagatcgacaggcgctctggcaaggagcttgagaaggagccaaagttcctgaagaatggtgatgccggtatggtgaagatgattcccactaagcccatggtggttgagaccttctctcagtatcctcctctgggtcgttttgctgtcctcgacatgaggcagacggttgctgttggagtcatcaagagcgtggagaagaaggacccaactggtgccaaggtgaccaaggctgcaataaagaagaaatga

SEQ ID NO: 27476 - protein, 447 aa, Zea mays
MGKEKSHINIVVIGHVDSGKSTTTGHLIYKLGGIDKRVIERFEKEAAEMNKRSFKYAWVLDKLKAERERGITIDIALWKFETTKYYCTVIDAPGHRDFIKNMITGTSQADCAVLIIDSTTGGFEAGISKDGQTREHALLAFTLGVKQMICCCNKMDATTPKYSKARYDEIVKEVSSYLKKVGYNPDKIAFVPISGFEGDNMIERSTNLDWYKGPTLLEALDQITEPKRPSDKPLRLALQDVYKIGGIGTVQVGRVETGVIKPDMVVTFGPTGLTTEVKSVEMHHEALQEALPGDNVGFNVKNVAVKDLNRGFVASNSKDDPAKEAASFTSQVIIMNHPGQIGNGYAPVLDCHTSHIAVKFAELITKIDRRSGKELEKEPKFLKNGDAGMVKMIPTKPMVVETFSQYPPLGRFAVLDMRQTVAVGVIKSVEKKDPTGAKVTKAAIKKK

SEQ ID NO: 27477 - DNA, 1344 bp, Zea mays
  CDS (1)..(1344)
atgggtaacgagaagtcccacatcaacattgtggttattggccctgtcgactctggcaagtcgaccaccacaggacaccttatctacaagcttggaggctttgacaagcgtgtgatcgagaggttcgagaaggaggctcctgaaatgaacaagcggtccttcaagtacgcgtgggtgctcgacaagctcaaggctgagcgtgagagaggtttcaccattgatatcgctctgtggaagtttgagaccaccaagtactactgcacggtcattgatgcccgtggacaccgtcacttcatcaagaacatgatcactcgtacctcccaggctgactgtgctgtccttatcattgactcaaccactggtggttttgaggctggtatctccaaggatggccagacccgtgagcatgctctccttgctttcacacttggtgtgaagcagatgatttgctgctgcaacaagatggatgctactacacccaagtattccaaggcccgttatgatgagattgtgaaggaagtctcttcctacctcaagaaagttggatacaaccctgataagattgcctttgttccaatctctggttttgaaggtgacaacatgattgagaggtccaccaaccttgactggtacaagggcccaaccctacttgaggctcttgacaagatcaccgaggccaagaggccttcacacaagcccctgcgtctagccctccaggatgtgtaccagattggtggtattgggactgtaccggttggtcgtgtggaggctggtgtcatcaagcctggtatggtagtcacgtttggtccaacaggcctgactaccgaggtgaagtctgttgagatgcagcacgaggcacttcaggaggctcttccgggtgacaatgttggcttcaacgtgaagaatgttgctgtcaaggatctcaagcgtgggtttgtggcctccaactccagggatgaccctgccaaggaggctggcagcttcacctcccaagtcatcatcatgaaccaccctgggcagattggcaacggctatgcccctgtgctggactgccacacctcccacatcgctgtcaagtttgctgagctcattaccaagatcgacaggcgctctggcaaagagcttgagaaggagccaaagttcctgaagtacggtgatgctggtatggtgaagatgataccaaccaagcctatggtggtggagacattctccgcgtatcctcctctgggtaggtttgccgtccgtgacatgaggcaaacggtggctgtcggagtcatcaagagtgtggagaagaaggacccaactggagccaaggtgacgaaggctgctgccaagaagaaatga

SEQ ID NO: 27478 - protein, 447 aa, Zea mays
MGNEKSHINIVVIGPVDSGKSTTTGHLIYKLGGFDKRVIERFEKEAPEMNKRSFKYAWVLDKLKAERERGFTIDIALWKFETTKYYCTVIDARGHRHFIKNMITRTSQADCAVLIIDSTTGGFEAGISKDGQTREHALLAFTLGVKQMICCCNKMDATTPKYSKARYDEIVKEVSSYLKKVGYNPDKIAFVPISGFEGDNMIERSTNLDWYKGPTLLEALDKITEAKRPSHKPLRLALQDVYQIGGIGTVPVGRVEAGVIKPGMVVTFGPTGLTTEVKSVEMQHEALQEALPGDNVGFNVKNVAVKDLKRGFVASNSRDDPAKEAGSFTSQVIIMNHPGQIGNGYAPVLDCHTSHIAVKFAELITKIDRRSGKELEKEPKFLKYGDAGMVKMIPTKPMVVETFSAYPPLGRFAVRDMRQTVAVGVIKSVEKKDPTGAKVTKAAAKKK

SEQ ID NO: 27479 - DNA, 1344 bp, Zea mays
  CDS (1)..(1344)
atgggtaaagagaagtcccacatcaacattgtggttattggccacgttgactctggcaagtcgaccaccacaggacacctgatctacaagcttggaggcattgacaagcgtgtgatcgagaggttcgagaaggaggctgctgaaatgaacaagcggtccttcaagtacgcatgggtgctcgacaagctcaaggctgagcgtgagagaggtatcaccattgatatcgctctgtggaagtttgagaccaccaagtactactgcacggtcattgatgcccctggacaccgtgacttcatcaagaacatgatcactggtacctcccaggctgactgtgctgtccttatcattgactccaccactggtggttttgaggctggtatctccaaggatggccagacccgtgaacatgctctccttgcgttcacccttggtgtgaagcagatgatttgctgctgcaacaagatggatgcaaccactcccaaatactccaaggcacgttatgatgagattgtgaaggaagtctcatcctacctcaagaaagttgggtacaaccctgataagattgccttcgttcccatttctggttttgagggcgacaacatgattgagaggtccaccaaccttgactggtacaaaggcccaaccctgcttgaggctcttgaccagatcaccgagcccaagaggccttcagacaagcccctgcgtctagccctccaggatgtgtacaagattggtggtattggaactgtaccggttggtcgtgtggagactggtgtcatcaagcctggtatggtagtcacctttggtccaactggcctgactactgaggtgaagtctgttgagatgcaccatgaggcgcttcaggaggctcttccgggcgacaatgttggcttcaacgtgaagaacgttgctgtcaaggatctcaagcgtgggttcgtggcctccaactccaaggatgaccctgccaaggaggctgccagcttcacctcccaggtcatcatcatgaaccaccctgggcagattggcaacggctatgccccagtgctggactgccacacctcccacatcgccgtcaagtttgctgagctcattaccaagatcgacaggcgatctggcaaggagctcgagaaggagcccaagttcctgaagaacggtgatgctggtatggtgaagatgattcccaccaagcctatggtggtggagacattctccgcgtatcctcccctgggtaggtttgccgtccgcgacatgaggcagacggttgctgttggagtcatcaagagtgtggagaagaaggacccaaccggcgccaaggtgaccaaggcggccgccaagaagaaatga

SEQ ID NO: 27480 - protein, 447 aa, Zea mays
MGKEKSHINIVVIGHVDSGKSTTTGHLIYKLGGIDKRVIERFEKEAAEMNKRSFKYAWVLDKLKAERERGITIDIALWKFETTKYYCTVIDAPGHRDFIKNMITGTSQADCAVLIIDSTTGGFEAGISKDGQTREHALLAFTLGVKQMICCCNKMDATTPKYSKARYDEIVKEVSSYLKKVGYNPDKIAFVPISGFEGDNMIERSTNLDWYKGPTLLEALDQITEPKRPSDKPLRLALQDVYKIGGIGTVPVGRVETGVIKPGMVVTFGPTGLTTEVKSVEMHHEALQEALPGDNVGFNVKNVAVKDLKRGFVASNSKDDPAKEAASFTSQVIIMNHPGQIGNGYAPVLDCHTSHIAVKFAELITKIDRRSGKELEKEPKFLKNGDAGMVKMIPTKPMVVETFSAYPPLGRFAVRDMRQTVAVGVIKSVEKKDPTGAKVTKAAAKKK

SEQ ID NO: 27481 - DNA, 1344 bp, Zea mays
  CDS (1)..(1344)
atgggtaaagagaagtcccacatcaacattgtggttattggccatgtcgactctggcaagtcgaccaccacaggacaccttatctacaagcttggaggcattgacaagcgtgtgatcgagaggttcgagaaggaggctgctgaaatgaacaagcggtccttcaagtacgcgtgggtgctcgacaagctcaaggctgagcgtgagagaggtatcaccattgatatcgctctgtggaagtttgagaccaccaagtactactgcacggtcattgatgcccctggacaccgtgacttcatcaagaacatgatcactggtacctcccaggctgactgtgctgtccttatcattgactccaccactggtggttttgaggctggtatctccaaggatggccagacccgtgaacatgctctccttgcgttcacacttggagtgaagcagatgatttgctgctgcaacaagatggatgcaaccactcccaaatactccaaggcacgttatgaagagattgtgaaggaagtctcatcctacctcaagaaagttgggtacaaccctgataagattgcctttgttcccatttctggttttgagggcgacaacatgattgagaggtccaccaaccttgactggtacaaaggcccaaccctgcttgaggctcttgaccagatcaccgagcccaagaggccttcagacaagcccctgcgtctagccctccaggatgtgtacaagattggtggtattggaactgtaccggttggtcgtgtggagactggtgtcatcaagcctggtatggtagtcacctttggtccaactggcctgactaccgaggtgaagtctgttgagatgcaccacgaggcacttcaggaggctcttccgggtgacaatgttggcttcaacgtgaagaatgttgctgtcaaggatctcaagcgtgggtttgtggcctccaactccaaggatgaccctgccaaggaggctgccagcttcacctcccaggtcatcatcatgaaccaccctgggcagattggcaacggctatgcccctgtgctggactgccacacctcccacatcgctgtcaagtttgctgagctcattaccaagatcgacaggcgctctggcaaggagcttgagaaggagccaaagttcctgaagaacggtgatgctggtatggtgaagatgatacccaccaagcctatggtggtggagacattctccgcgtatcctcccctgggtaggtttgccgtccgcgacatgaggcagacggttgctgttggagtcatcaagagtgtggagaagaaggacccaaccggcgccaaggtgaccaaggcggccgccaagaagaaatga

SEQ ID NO: 27482 - protein, 447 aa, Zea mays
MGKEKSHINIVVIGHVDSGKSTTTGHLIYKLGGIDKRVIERFEKEAAEMNKRSFKYAWVLDKLKAERERGITIDIALWKFETTKYYCTVIDAPGHRDFIKNMITGTSQADCAVLIIDSTTGGFEAGISKDGQTREHALLAFTLGVKQMICCCNKMDATTPKYSKARYEEIVKEVSSYLKKVGYNPDKIAFVPISGFEGDNMIERSTNLDWYKGPTLLEALDQITEPKRPSDKPLRLALQDVYKIGGIGTVPVGRVETGVIKPGMVVTFGPTGLTTEVKSVEMHHEALQEALPGDNVGFNVKNVAVKDLKRGFVASNSKDDPAKEAASFTSQVIIMNHPGQIGNGYAPVLDCHTSHIAVKFAELITKIDRRSGKELEKEPKFLKNGDAGMVKMIPTKPMVVETFSAYPPLGRFAVRDMRQTVAVGVIKSVEKKDPTGAKVTKAAAKKK

SEQ ID NO: 27483 - DNA, 1194 bp, Streptoverticillium netropsis
  CDS (1)..(1194): transl_table=11
gtggcgaaggcgaagttcgagcggactaagccgcacgtcaacatcggcaccatcggtcacatcgaccacggtaagacgaccctcacggccgccattaccaaggtgctgcacgacgcgtacccggacctgaacgaggcctcggccttcgaccagatcgacaaggctcccgaggagcgccagcgcggtatcacgatctcgatcgcgcacgtcgagtaccagaccgagtcgcgtcactacgcccacgtcgactgccccggtcacgcggactacatcaagaacatgatcacgggtgccgcgcagatggacggcgccatcctcgtggtcgccgccaccgacggcccgatgccgcagaccaaggagcacgtgctcctggcccgccaggtcggcgttccgtacatcgtcgtcgccctgaacaaggccgacatggtggacgacgaggagatcctggagctcgtcgagctcgaggtgcgtgagctcctctccgagtacgagttcccgggcgacgaccttccggtcgtccgcgtctcggcgctcaaggcgctcgagggcgacaaggagtggggcgagaagctcctcggcctcatgaaggccgtggacgagtccatcccgcagcccgagcgtgacgtcgacaagccgttcctgatgccgatcgaggacgtcttcacgatcaccggtcgtggcaccgtcgtcaccggtcgtatcgagcgcggtgtcctcaaggtcaacgagaccgtcgacatcatcggcatcaagaccgagaagaccaccaccacggtcaccggcatcgagatgttccgcaagctcctcgacgagggccaggccggtgagaacgtcggtctgctcctccgtggcatcaagcgcgaggacgtcgagcgcggccaggtcatcatcaagccgggctcggtcacgccgcacacctccttcgaggcccaggcgtacatcctgtcgaaggacgagggtggccgtcacaccccgttcttcaacaactaccgcccgcagttctacttccgtaccacggacgtgaccggcgtcgtgaccctccccgagggcaccgagatggtcatgccgggcgacaacacctccatgaccgtcgagctgatccagcccgtcgccatggaggagggcctcaagttcgccatccgtgagggtggccggaccgtcggcgccggccaggtcgtcaagatcaacgcctga

SEQ ID NO: 27484 - protein, 397 aa, Streptoverticillium netropsis
MAKAKFERTKPHVNIGTIGHIDHGKTTLTAAITKVLHDAYPDLNEASAFDQIDKAPEERQRGITISIAHVEYQTESRHYAHVDCPGHADYIKNMITGAAQMDGAILVVAATDGPMPQTKEHVLLARQVGVPYIVVALNKADMVDDEEILELVELEVRELLSEYEFPGDDLPVVRVSALKALEGDKEWGEKLLGLMKAVDESIPQPERDVDKPFLMPIEDVFTITGRGTVVTGRIERGVLKVNETVDIIGIKTEKTTTTVTGIEMFRKLLDEGQAGENVGLLLRGIKREDVERGQVIIKPGSVTPHTSFEAQAYILSKDEGGRHTPFFNNYRPQFYFRTTDVTGVVTLPEGTEMVMPGDNTSMTVELIQPVAMEEGLKFAIREGGRTVGAGQVVKINA

SEQ ID NO: 27485 - DNA, 1194 bp, Streptomyces mobaraensis
  CDS (1)..(1194): transl_table=11
gtggcgaaggcgaagttcgagcggactaagccgcacgtcaacatcggcaccatcggtcacgtcgaccacggtaagacgacccttaccgcggcgatcaccaaggtgctgcacgacgcgcacccggagctgaaccccttcacgccgttcgaccagatcgacaaggcgcctgaggagcggcagcgcggtatcaccatctccatcgcgcacgtcgagtaccagaccgagtcgcgtcactacgcccacgtcgactgcccgggtcacgcggactacatcaagaacatgatcaccggtgccgcccagatggacggcgcgatcctcgtggtcgccgcgaccgacggtccgatgccgcagaccaaggagcacgtgctcctggcccgccagtccggcgttccgtacatcgtcgtcgccctgaacaaggccgacatggtggacgacgaggagatcctggagctcgtcgagctcgaggtccgtgagctcctcaacgagtacgagttcccgggcgacgacgctccggtcgtcaaggtctcggcgctgaaggcgctcgagggcgacgccgagtggggccagtcggtcatgaacctcatgaacgccgtcgacgagaacatcccgcagcccgagcgtgacgtcgacaagccgttcctgatgccgatcgaggacgtcttcacgatcaccggtcgtggcaccgtcgtcaccggccgtatcgagcgcggtgtcctgaaggtcaacgagaccgtcgacatcatcggcatcaagaccgagaagaccaccaccacggtcaccggtatcgagatgttccgcaagctgctcgacgagggccaggccggtgagaacgtcggtctgctcctccgtggcatcaagcgcgaggacgtcgagcgcggccagtgcatcatcaagccgggttcggtcaccccgcacaccgagttcgaggccacggcctacatcctgtcgaaggacgagggtggccgtcacaccccgttcttcaacaactaccgtccgcagttctacttccgtacgactgacgtgaccggtgtcgtgaccctcaaggagggcacggagatggtcatgcccggcgacaacgccgagatgtccgtccagctgatccagcccgtcgccatggaggagggcctgcgcttcaccatccgtgagggcggccgtaccgtcggcgccggccaggtcaccaagatcaccaagtaa

SEQ ID NO: 27486 - protein, 397 aa, Streptomyces mobaraensis
MAKAKFERTKPHVNIGTIGHVDHGKTTLTAAITKVLHDAHPELNPFTPFDQIDKAPEERQRGITISIAHVEYQTESRHYAHVDCPGHADYIKNMITGAAQMDGAILVVAATDGPMPQTKEHVLLARQSGVPYIVVALNKADMVDDEEILELVELEVRELLNEYEFPGDDAPVVKVSALKALEGDAEWGQSVMNLMNAVDENIPQPERDVDKPFLMPIEDVFTITGRGTVVTGRIERGVLKVNETVDIIGIKTEKTTTTVTGIEMFRKLLDEGQAGENVGLLLRGIKREDVERGQCIIKPGSVTPHTEFEATAYILSKDEGGRHTPFFNNYRPQFYFRTTDVTGVVTLKEGTEMVMPGDNAEMSVQLIQPVAMEEGLRFTIREGGRTVGAGQVTKITK

SEQ ID NO: 27487 - DNA, 1188 bp, Bacteroides forsythus
  CDS (1)..(1188): transl_table=11
  misc_feature (500)..(500): n is a, g, c or t
atggcaaaagagcattttaacagatcgaaaccccacgttaacgttggtacgatcggacacgtggaccacggtaagactaccttgacggctgcaatcacaactgtgttggcaaagaggggcctttcagaactccgttcatttgattcaatcgataacgctcccgaagaaaaggaacgtggtatcacgattaatacttcacacgttgaataccaaacagctaatcgtcactacgctcacgtagactgtccgggtcacgccgactatgtgaagaacatggttaccggtgctgctcagatggacggtgctataatcgttgtagcagctacagacggccctatgcctcagactcgcgagcacatccttttggctcgccaggtaaacgttcctcgtctggttgttttcatgaacaaatgtgacatggtagacgatgaagagatgctcgagcttgttgaaatggacatgcgcgaactcctttctttctacgatttcgatggtgacantacccctatcatccgtggttctgctctgggcgctttgaatggagagcctcagtgggaagacaaggtgatggagcttatggaagctgttgacaactgggttcccctgcctgagcgcgatatcgataaaccgttcttgatgccggttgaagacgtgttctctatcacgggtcgtggtacggttgctacaggacgtatcgaaaccggtatcgtgaagaccggtgacgaagttcagatcatcggcctcggtgcagaaggaatgaagtcggttgttacgggtgttgaaatgttccgtaagattcttgacgaaggtcaggccggtgacaacgttggtctcctcctgcgtggtatcgataaggatcagatcaagcgtggtatggttatctctcacccgggtaagattactcctcacaagagatttaaggccgaggtttatatcttgaagaaagaagaaggtggtcgccacactcctttccacaacaaatatcgtccgcagttctacatccgtacgcttgacgtgaccggtgaaatcactcttcccgaagggacagaaatggttatgcccggtgacaacgtaacgatcactgtagaactcatctacccggttgcatgtaatgtaggtctccgcttcgctatccgtgaaggtggtcgtacggtaggtgccggtcagattacagagctcatcgactaa

SEQ ID NO: 27488 - protein, 395 aa, Bacteroides forsythus
  misc_feature (167)..(167): The Xaa at location 167 stands for Asn, Ile, Ser, or Thr.
MAKEHFNRSKPHVNVGTIGHVDHGKTTLTAAITTVLAKRGLSELRSFDSIDNAPEEKERGITINTSHVEYQTANRHYAHVDCPGHADYVKNMVTGAAQMDGAIIVVAATDGPMPQTREHILLARQVNVPRLVVFMNKCDMVDDEEMLELVEMDMRELLSFYDFDGDXTPIIRGSALGALNGEPQWEDKVMELMEAVDNWVPLPERDIDKPFLMPVEDVFSITGRGTVATGRIETGIVKTGDEVQIIGLGAEGMKSVVTGVEMFRKILDEGQAGDNVGLLLRGIDKDQIKRGMVISHPGKITPHKRFKAEVYILKKEEGGRHTPFHNKYRPQFYIRTLDVTGEITLPEGTEMVMPGDNVTITVELIYPVACNVGLRFAIREGGRTVGAGQITELID

SEQ ID NO: 27489 - DNA, 1188 bp, Porphyromonas gingivalis
  CDS (1)..(1188): transl_table=11
atggcaaaagagcattttaacagatcgaaaccccacgttaacgttggtacgatcggacacgtggaccacggtaagactaccttgacggctgcaatcacaactgtgttggcaaagaggggcctttcagaactccgttcatttgattcaatcgataacgctcccgaagaaaaggaacgtggtatcacgattaatacttcacacgttgaataccaaacagctaatcgtcactacgctcacgtagactgtccgggtcacgccgactatgtgaagaacatggttgccggtgctgctcagatggacggtgctataatcgttgtagcagctacagacggtcctatgcctcagactcgcgagcacatccttttggctcgccaggtaaacgttcctcgtctggttgttttcatgaacaaatgtgacatggtagacgatgaagagatgctcgagcttgttgaaatggacatgcgcgaactcctttctttctacgatttcgatggtgacaatacccctatcatccgtggttctgctctgggcgctttgaatggagagcctcagtgggaagacaaggtgatggagcttatggaagctgttgacaactgggttcccctgcctgagcgcgatatcgacaaaccgttcttgatgccggttgaagacgtgttctctatcacgggtcgtggtacggtcgctacaggacgtatcgaaaccggtattgtgaagaccggtgacgaagttcaaatcatcggcctcggtgcagaaggaatgaagtcggttgttacgggtgttgaaatgttccgtaagattcttgacgaaggtcaggctggtgacaacgttggtctcctcctgcgtggtatcgataaggatcagatcaagcgtggtatggttatctctcacccgggtaagattactcctcacaagagatttaaggccgaggtttatatcttgaagaaagaagaaggtggtcgccacactcctttccacaacaaatatcgtccgcagttctacatccgtacgcttgacgtgaccggtgaaatcactcttcccgaaggaacagaaatggttatgcccggtgacaacgtaacgatcactgtagaactcatctacccggttgcatgtaatgtaggtctccgcttcgctatccgtgaaggtggtcgtacggtaggtgccggtcagattacagagctcatcgactaa

SEQ ID NO: 27490 - protein, 395 aa, Porphyromonas gingivalis
MAKEHFNRSKPHVNVGTIGHVDHGKTTLTAAITTVLAKRGLSELRSFDSIDNAPEEKERGITINTSHVEYQTANRHYAHVDCPGHADYVKNMVAGAAQMDGAIIVVAATDGPMPQTREHILLARQVNVPRLVVFMNKCDMVDDEEMLELVEMDMRELLSFYDFDGDNTPIIRGSALGALNGEPQWEDKVMELMEAVDNWVPLPERDIDKPFLMPVEDVFSITGRGTVATGRIETGIVKTGDEVQIIGLGAEGMKSVVTGVEMFRKILDEGQAGDNVGLLLRGIDKDQIKRGMVISHPGKITPHKRFKAEVYILKKEEGGRHTPFHNKYRPQFYIRTLDVTGEITLPEGTEMVMPGDNVTITVELIYPVACNVGLRFAIREGGRTVGAGQITELID

SEQ ID NO: 27491 - DNA, 1404 bp, Oryza sativa
  CDS (1)..(1404)
atggcctccctcgcctccgcctccgcatccacctccctggtcttctccacctcctcctccaagccgcgcctcggctcctccgtcggattctcctcgcccgcgcggttccggcgcacggcggcggcggcggcgtccaagggcacggggcggcgcgcggggctgctggtaatgcgcgcggcgagggggaagttcgagcggaccaagccgcacgtcaacatcggcaccatcggccacgtcgaccacgggaagactacgctgacggcggcgctcaccatggtgctcgcctccgtgggcgggagcgcccccaagaagtacgacgagatcgacgcggcgcccgaggagcgcgcccgcggcatcaccatcaacaccgccaccgtcgagtacgagaccgagacccgccactacgcccacgtcgactgccccggccacgccgactacgtcaagaacatgattaccggcgccgcgcagatggacggcgccatcctcgtcgtctccggcgccgacgggcccatgccgcagaccaaggagcacatcctgctcgccaagcaggtcggtgtccccaagattgttgtcttcctcaacaagaaggaccaggtcgacgacgaggagctgctccagctcgtcgagctcgaggtccgcgaattgctctcctcctacgagtacgatggcgacgaagtgcccatcgtcgctggctccgcgctcaaggcgctcgagaacctcatggccaaccctgccattaagcgcggcgatgatgagtgggtggacgggatcttctcgttgattgattccgtggataactacatccctgtcccacagcgccagaccgacctcccgttcttgcttgctgttgaggatgtgttctccatcaccggtcgtggtaccgttgccactggccgtattgagcgtggcaccgtcaaggttggggacacggtcgatatcgtcggtatccgggagactcgcaactgcacggtgactggtgttgagatgttccagaagaccatggatgatgcgatggctggggacaatgtcggcctgcttctccgaggtatgcagaaggatgatatcgagagaggcatggtgcttgcgaagcctgcttccatcacgccacacaccaagtttgatgcggttgtgtatgtcctgaagaaagacgaaggtggacggcactcaccgtttttccctggttaccgccctcagttctacatgcggactaccgatgtgacggggaatgtcccaaagattatgaacgacaaggacgaggaggcgaagatgtgcatgcctggtgaccgtgtcaagatggttgtggagctcatccagcccgtcgcttgtgagcagggaatgaggtttgccatccctgagggtggaaagaccgtcggtgccggcgtcatcaatacgattttgaagtaa

SEQ ID NO: 27492 - protein, 467 aa, Oryza sativa
MASLASASASTSLVFSTSSSKPRLGSSVGFSSPARFRRTAAAAASKGTGRRAGLLVMRAARGKFERTKPHVNIGTIGHVDHGKTTLTAALTMVLASVGGSAPKKYDEIDAAPEERARGITINTATVEYETETRHYAHVDCPGHADYVKNMITGAAQMDGAILVVSGADGPMPQTKEHILLAKQVGVPKIVVFLNKKDQVDDEELLQLVELEVRELLSSYEYDGDEVPIVAGSALKALENLMANPAIKRGDDEWVDGIFSLIDSVDNYIPVPQRQTDLPFLLAVEDVFSITGRGTVATGRIERGTVKVGDTVDIVGIRETRNCTVTGVEMFQKTMDDAMAGDNVGLLLRGMQKDDIERGMVLAKPASITPHTKFDAVVYVLKKDEGGRHSPFFPGYRPQFYMRTTDVTGNVPKIMNDKDEEAKMCMPGDRVKMVVELIQPVACEQGMRFAIPEGGKTVGAGVINTILK

SEQ ID NO: 27493 - DNA, 1344 bp, Lilium longiflorum
  CDS (1)..(1344)
atgggaaaagagaaggttcacattaacattgttgtcattggtcatgttgactctggcaagtccaccaccactggccaccttatctacaagcttgggggtattgacaagcgtgtgattgagaggtttgagaaggaagctgctgagatgaacaagaggtcattcaagtatgcttgggtgcttgacaagctgaaggcggagcgtgagcgtggtatcaccatcgacattgccctctggaagtttgagaccaccaagtactactgcacagtcattgatgcccctggtcatcgggatttcatcaagaacatgatcactgggacctcacaggctgactgtgcgattcttatcattgactctaccaccggaggctttgaagctggaatttccaaggatggtcagacccgtgagcatgcccttcttgcctttactctgggagtgagacagatgatttgctgctgcaacaagatggatgctactacaccaaagtatgctaaggctaggtatgatgagattgtgaaggaggtttcttcctacctgaagaaggttgggtacaaccctgacaagatcccatttgtcccaatttctggatttgagggtgacaacatgattgagaggtcgaccaaccttgattggtacaagggcccgactcttcttgaagctcttgaccagatctccgagccgaagcgcccatctgacaagcccctccgcctcccccttcaggatgtgtacaagattggtggtattggaactgtgccagttggtcgtgttgagactggagtgatcaagcctggtatggttgtcacttttggcccaaccggtctgaccactgaagtcaagtctgtggagatgcaccatgaggctctcctggaagcgctgccaggtgacaatgttgggttcaatgttaagaatgttgctgtcaaggatctgaagcgtggctttgttgcatcaaactcgaaggatgatccagccaaggaggcagccaactttacctcccaagtcatcatcatgaaccatccggggcaaattgggaatggttatgctcctgtccttgattgccacacctcccacatagctgttaagtttgccgagatcctgaccaagattgacaggcgatctggtaaggagctggagaaggaaccgaagtttctgaagaatggtgatgctggtatggtgaagatgattccgactaagccgatggtggttgagaccttcgctgagtatcctccactggggaggtttgctgtgagggacatgaggcagactgttgctgtcggtgtcatcaagaatgttgagaagaaggatcccactggagccaaggttaccaagtctgctgtgaagaagaaatga

SEQ ID NO: 27494 - protein, 447 aa, Lilium longiflorum
MGKEKVHINIVVIGHVDSGKSTTTGHLIYKLGGIDKRVIERFEKEAAEMNKRSFKYAWVLDKLKAERERGITIDIALWKFETTKYYCTVIDAPGHRDFIKNMITGTSQADCAILIIDSTTGGFEAGISKDGQTREHALLAFTLGVRQMICCCNKMDATTPKYAKARYDEIVKEVSSYLKKVGYNPDKIPFVPISGFEGDNMIERSTNLDWYKGPTLLEALDQISEPKRPSDKPLRLPLQDVYKIGGIGTVPVGRVETGVIKPGMVVTFGPTGLTTEVKSVEMHHEALLEALPGDNVGFNVKNVAVKDLKRGFVASNSKDDPAKEAANFTSQVIIMNHPGQIGNGYAPVLDCHTSHIAVKFAEILTKIDRRSGKELEKEPKFLKNGDAGMVKMIPTKPMVVETFAEYPPLGRFAVRDMRQTVAVGVIKNVEKKDPTGAKVTKSAVKKK

SEQ ID NO: 27495 - DNA, 1344 bp, Lilium longiflorum
  CDS (1)..(1344)
atgggcaaggagaaggttcacatcaacattgtcgtcatcggccatgttgactctgggaagtccacaaccacagggcatctgatctacaagcttggtggtattgacaagcgtgttattgagcgctttgagaaggaagcagctgagatgaataagaggtcatttaagtatgcttgggtgcttgacaagctcaaggcagagcgtgagcgtggtatcacaattgacattgcactgtggaaatttgaaaccactaagtactactgcactgttattgatgcccctggccatcgtgactttatcaagaacatgatcactggtacatctcaggctgattgcgcaattctcatcattgactccacgactggtggttttgaagcaggtatttctaaggatggacagacccgtgagcacgccctccttgccttcactcttggtgtcaagcagatgatttgctgttgtaacaagatggatgctactacaccaaagtattcgaaggctaggtatgatgaaattgttaaggaagtttcttcctacctcaagaaggttggctataaccctgacaagattccctttgtcccaatctctggttttgagggtgacaacatgattgagaggtcgatcaaccttgactggtacaagggcccaactctccttgaagctcttgatatgatcaatgagcccaagcgtccgtctgacaagcccctccgcctccccctgcaggatgtctacaagattggggggattggcactgtgccagttgggcgagtcgagactggtgttttgaagcctgcgatggttgttacctttggccccactggtctgaccactgaagtgaagtctgttgagatgcaccatgaggcacttgtggaggccctacctggtgacaatgttggcttcaatgtgaaaaatgttgctgttaaggatttgaagcgtgggtttgttgcgtccaactcgaaggatgatccagcgaaggaggctgccaacttcacttctcaggtcattatcatgaaccaccccggccagattggtaatggctatgctcctgttctcgactgtcacacctctcacattgctgttaagttcaatgagatcttgaccaagattgatcggcgctctggcaaggagttggagaaggagccgaagtttctgaagaatggagatgcgggtatgattaagatgattcctaccaagccaatggtggtggagactttttctgagtaccctccacttgggcggtttgctgttcgtgacatgaggcagactgttgctgtgggtgttatcaagaatgtggagaagaaggaaccgactggagccaaggtgactaagtcggctgtgaagaagaagtga

SEQ ID NO: 27496 - protein, 447 aa, Lilium longiflorum
MGKEKVHINIVVIGHVDSGKSTTTGHLIYKLGGIDKRVIERFEKEAAEMNKRSFKYAWVLDKLKAERERGITIDIALWKFETTKYYCTVIDAPGHRDFIKNMITGTSQADCAILIIDSTTGGFEAGISKDGQTREHALLAFTLGVKQMICCCNKMDATTPKYSKARYDEIVKEVSSYLKKVGYNPDKIPFVPISGFEGDNMIERSINLDWYKGPTLLEALDMINEPKRPSDKPLRLPLQDVYKIGGIGTVPVGRVETGVLKPAMVVTFGPTGLTTEVKSVEMHHEALVEALPGDNVGFNVKNVAVKDLKRGFVASNSKDDPAKEAANFTSQVIIMNHPGQIGNGYAPVLDCHTSHIAVKFNEILTKIDRRSGKELEKEPKFLKNGDAGMIKMIPTKPMVVETFSEYPPLGRFAVRDMRQTVAVGVIKNVEKKEPTGAKVTKSAVKKK

SEQ ID NO: 27497 - DNA, 1380 bp, Dreissena polymorpha
  CDS (1)..(1380)
atgggaaaggaaaagctccacatcaacatcgtcgtcattgggcacgtcgactccggcaagtccacctccactggtcacatgatctacaaatgtggaggcatcgacaagagaaccattgagaagttcgagaaggaagccgctgagatgggcaagggctctttcaagtatgcctgggttttggacaaactgaagtccgaacgtgaacgtggtatcaccattgacattgctttgtggaagtttgagaccacaaagtactacgtcacaattattgatgcccccggccatcgtgacttcatcaagaacatgatcacaggtacatcacaggctgactgtgcagtgttgatcgttgctgctggtgttggtgagtttgaggctggtatctccaagaacggtcagaccagagaacacgccctgcttgccttcacccttggagtgaagcagcttattgttggtgtcaacaaaatggacaacactgaaccacctttctcggagaaacgttatgaggaaatcaagaatgaagtcggaaactacatcaagaagatcggttacaatcccaaggcagttgctttcgtccccatttctggatggcacggagacaacatgattgagccaacagaaaagatgccctggtacaagggatgggccattgagaggaaggaaggcaatgcgtctggcaagaccctgttcgaggctttcgactcaattttcccccctacccgaccattcgagaagcccctccgtctcccactccaggacgtctacaaaattggaggtattggaacggtgccagtgggccgagttgagacaggtatcctcaagcccggcatggtcgtcacattctcacctgccaacatcacgactgaagtcaagtctgtggagatgcaccacgagtctctacctgaagcctcccctggtgacaacgtaggattcaacattaagaacgtctctgtcaaggaaatcagaagaggaaacgtcactggtgactccaagaacgatccaccaaaggcagccaagagcttctacgctcaggtcatcatcctgaaccacccaggagagattaagaacgggtatgcgccggtgttggactgtcacacagcacacatcgcctgcaagttcgaggagatcaaggagaagattgaccgtcgttctggcaagaagctggaagacttccccaaggtggttaagtctggagacgcttgtatggctgacctcgtcccatttaagcccatgtgcgtcgaggctttcagcgattacgctcccctcggacgttttgcagtgcgtgacatgagacagaccgttgccgtcggtgtcatcaaggaggtcaccaaggaggttgatggtcaaggaaaggtcacaaaggctgccaccaagaagaaatga

SEQ ID NO: 27498 - protein, 459 aa, Dreissena polymorpha
MGKEKLHINIVVIGHVDSGKSTSTGHMIYKCGGIDKRTIEKFEKEAAEMGKGSFKYAWVLDKLKSERERGITIDIALWKFETTKYYVTIIDAPGHRDFIKNMITGTSQADCAVLIVAAGVGEFEAGISKNGQTREHALLAFTLGVKQLIVGVNKMDNTEPPFSEKRYEEIKNEVGNYIKKIGYNPKAVAFVPISGWHGDNMIEPTEKMPWYKGWAIERKEGNASGKTLFEAFDSIFPPTRPFEKPLRLPLQDVYKIGGIGTVPVGRVETGILKPGMVVTFSPANITTEVKSVEMHHESLPEASPGDNVGFNIKNVSVKEIRRGNVTGDSKNDPPKAAKSFYAQVIILNHPGEIKNGYAPVLDCHTAHIACKFEEIKEKIDRRSGKKLEDFPKVVKSGDACMADLVPFKPMCVEAFSDYAPLGRFAVRDMRQTVAVGVIKEVTKEVDGQGKVTKAATKKK

SEQ ID NO: 27499 - DNA, 1389 bp, Anthocidaris crassispina
  CDS (1)..(1389)
atgggtaaggaaaagcagcatatcaacatcgtggttgtcggtcacgtagattccggcaagtcaaccaccacaggtcatctcatctacaagtgcggtggaatcgacaagcgtaccatcgagaaatttgagaaggaagctgctgagcttggaaaaggatccttcaagtatgcctgggttctcgataagctgaaggctgagcgtgaacgtggtatcaccattgacattgccctctggaaatttgagacggaaaagtacttcgtcactgtcatcgacgcccctggacatcgtgatttcatcaagaacatgatcactggaacctcacaggctgattgtgctgtgttggttgttgctgctggtactggagagtttgaggctggtatctcaaaggatggacagacacgtgagcatgccctgctttgctacaccctgggtgtcaagcagctcattgttgctgtcaacaagatggacagtaccgtgcccaaatacgaggagaagcgtttcaacgaaattgtcaaggaggtacagagctacatcaagaaggttggctacaacatcaagggtgtgcccttcatcccaatctcaggatggtgtggtgacaatatgcttgagacatcagaaaatatgccatggttcaagggatgggccattgaacgcaaggaaggcaatgccagtggaaagaccctctacaatgccctagatgccattcttctgcctgagagaccaacaaagaagcctctccgtctaccccttcaggatgtctacaagattggtggtattggcactgttccagtgggccgtgttgaaactggtattatcaagcctggtgtggtcgttacttttgcccctaccaatctctccactgaagtgaagtctgttgagatgcatcacgaacaaatggctcaagctgaacctggtgacaacgttggcttcaatgtcaagaacgtctcagtcaaggaaatcaagcgtggttacgttgctggagacagcaagaatgtccctcctgttggggccctgtccttcaaggctcaggtcattatcatgaaccaccctggccagattcatgcaggctactgcccagttttggattgtcacactgctcacattgcctgcaagtttgcggaactccaggagaagctggatcgtcgatcaggcaagactctggaggagaatcccaagttcatcaagactggtgatgcttgcatcgccaaactggttccctctaaacagatgtgtgtcgagactttctcggaattcccccctcttggacgcttcgctgtccgtgacatgaggcagaccgtcgccgttggtgtggtgaagtctgtggagaagtcagaggcatctggtggcaagactaccaagtctgctcagaaggctcagaagaagaaatga

SEQ ID NO: 27500 - protein, 462 aa, Anthocidaris crassispina
MGKEKQHINIVVVGHVDSGKSTTTGHLIYKCGGIDKRTIEKFEKEAAELGKGSFKYAWVLDKLKAERERGITIDIALWKFETEKYFVTVIDAPGHRDFIKNMITGTSQADCAVLVVAAGTGEFEAGISKDGQTREHALLCYTLGVKQLIVAVNKMDSTVPKYEEKRFNEIVKEVQSYIKKVGYNIKGVPFIPISGWCGDNMLETSENMPWFKGWAIERKEGNASGKTLYNALDAILLPERPTKKPLRLPLQDVYKIGGIGTVPVGRVETGIIKPGVVVTFAPTNLSTEVKSVEMHHEQMAQAEPGDNVGFNVKNVSVKEIKRGYVAGDSKNVPPVGALSFKAQVIIMNHPGQIHAGYCPVLDCHTAHIACKFAELQEKLDRRSGKTLEENPKFIKTGDACIAKLVPSKQMCVETFSEFPPLGRFAVRDMRQTVAVGVVKSVEKSEASGGKTTKSAQKAQKKK

SEQ ID NO: 27501 - DNA, 1344 bp, Nicotiana tabacum
  CDS (1)..(1344)
atgggtaaagagaaggttcacatcaacattgtggtcattggccacgtcgactctggtaagtcgactaccactggtcacttgatctaccttggtggtattgacaagcgtgtcattgagaggtttgagaaagaagctgctgagatgcacaagcggtcattcaagtatgcctgggtgcttgacaaactaaaggctgagcgtgaccggggtatcactattgatatcgccttgtggaagtttgagaccaccaagtactactgcactgtgattgatcgtcctggacacagggatttcatcaagaatatgattactggtacctcccgtgcctgtcgtgtcctgattgttgcctccaccactggctttgcacaagctggtaatctcaaggatggacagacccgtgaaagactgcttattgactccaccactggtaacacccttggtgtcacccaaatgatttgctgctgcaacaagatggatgctaccacccccaagtattccaaggctaggtacgatgaaatcgtgaaggaggtttcttcctacctcaagaaggtaggatacaaccctgacaagatcccctttgtccccatctctggtttggaaggtgacaacatgctcgaaagatcaacaaaccttgactggtacaagggcccaacacttcttgatgctcttgaccagattaatgagcccaagaggcccacagacaagcctctcaggctcccacttcaggatgtttacaagattggtggaattggtactgtccctgttggtcgtgtggaaactggtgtcctcaagcctggtatggttgttacttttggtcccactggtctgaccactgaagttggatctgttgagatgcaccacgaagctcttcaggaggcacttcctggtgacaatgttggatttaatgtcaagaatgttgcggttaaggatctcaagcgtgggtttgttgcttccaactccggatgtcccagcaatgggtgcttcagctttacctcccaagctatcatcatgaaccattcaggacagattggcaatggatatgctccagttctggactgccacacctcccatgctgtcagtgcagaaattttgaccaatattgccaggcgttctggtcaggagattgcgaaagagcccaggttccttttgaatggttgtgctggttttgttatgatgattcccaccctacccatggttgttgcaaggatcctctctgcgtacccaccattggagcgttttgcgttcaggagcatgcgtcaaactgttgctgttggtgttatcaagaacgttgtcaagaaggacccaactggtgctatggtcaccaaggctgctcagaagaagaaatga

SEQ ID NO: 27502 - protein, 447 aa, Nicotiana tabacum
MGKEKVHINIVVIGHVDSGKSTTTGHLIYLGGIDKRVIERFEKEAAEMHKRSFKYAWVLDKLKAERDRGITIDIALWKFETTKYYCTVIDRPGHRDFIKNMITGTSRACRVLIVASTTGFAQAGNLKDGQTRERLLIDSTTGNTLGVTQMICCCNKMDATTPKYSKARYDEIVKEVSSYLKKVGYNPDKIPFVPISGLEGDNMLERSTNLDWYKGPTLLDALDQINEPKRPTDKPLRLPLQDVYKIGGIGTVPVGRVETGVLKPGMVVTFGPTGLTTEVGSVEMHHEALQEALPGDNVGFNVKNVAVKDLKRGFVASNSGCPSNGCFSFTSQAIIMNHSGQIGNGYAPVLDCHTSHAVSAEILTNIARRSGQEIAKEPRFLLNGCAGFVMMIPTLPMVVARILSAYPPLERFAFRSMRQTVAVGVIKNVVKKDPTGAMVTKAAQKKK

SEQ ID NO: 27503 - DNA, 1344 bp, Lilium longiflorum
  CDS (1)..(1344)
atgggtaaagagaaggttcacatcaacattgttgtcattggtcatgtcgactccgggaagtcgaccaccactgggcatcttatttacaagcttggtggtattgacaagcgtgtgatcgagcggtttgagaaggaagctgctgagatgaacaaaaggtcattcaagtatgcgtgggtgcttgataagctgaaggccgagcgtgagcgtggtatcaccattgatattgctctctggaagtttgagaccaccagatactactgcactgtcattgatgcccctggccatcgtgacttcatcaaaaacatgattactggaacttctcaggccgattgtgctgtccttattattgactctaccactggtggttttgaggctggtatttccaaggatggtcagactcgtgagcatgccctgcttgctttcactcttggtgtgaagcagatgatctgttgttgcaacaagatggatgccacaaccccgaagtactccaaggcccggtacgatgaaattatcaaggaggtttcttcatacctcaagaaggttggttacaacccagacaaaattccctttgttccaatctctgggtttgagggtgataacatgattgagaggtccaacaacctcgactggtacaagggtcccaccctccttgaggcccttgacttaatcaatgagccaaagaggcccacagacaagcccctccgccttccccttcaggatgtgtacaagattggaggcattggaactgtgccagtcggccgtgtggagactggtattgtgaagcccggaatggtagtgacttttgggccaactggtctgaccactgaagttaagtctgttgagatgcaccatgaggctctccttgaagccctccctggtgacaatgtgggatttaatgtgaagaatgttgctgtcaaggatctcaagcgtgggtttgttgcgtcgaactccaaggatgaccctgccaaggaggcggccaacttcacttcccaggttatcatcatgaaccaccctggccagatcggtaatggttatgctcctgtcctggattgccacacctcccacattgctgtcaagtttgctgagatcctgaccaagatcgacaggcgctctggtaaggaaattgagaaggagcctaagtttttgaagaatggtgatgctggtttcgtgaagatgattccgaccaagcctatggtggtggagacattctctgagtatcctcctcttgggcgttttgctgttagggacatgcgccagactgttgctgttggggttattaagagtgttgagaagaaggatcccactggtgccaaggtgaccaaggctgctatcaagaagaagtga

SEQ ID NO: 27504 - protein, 447 aa, Lilium longiflorum
MGKEKVHINIVVIGHVDSGKSTTTGHLIYKLGGIDKRVIERFEKEAAEMNKRSFKYAWVLDKLKAERERGITIDIALWKFETTRYYCTVIDAPGHRDFIKNMITGTSQADCAVLIIDSTTGGFEAGISKDGQTREHALLAFTLGVKQMICCCNKMDATTPKYSKARYDEIIKEVSSYLKKVGYNPDKIPFVPISGFEGDNMIERSNNLDWYKGPTLLEALDLINEPKRPTDKPLRLPLQDVYKIGGIGTVPVGRVETGIVKPGMVVTFGPTGLTTEVKSVEMHHEALLEALPGDNVGFNVKNVAVKDLKRGFVASNSKDDPAKEAANFTSQVIIMNHPGQIGNGYAPVLDCHTSHIAVKFAEILTKIDRRSGKEIEKEPKFLKNGDAGFVKMIPTKPMVVETFSEYPPLGRFAVRDMRQTVAVGVIKSVEKKDPTGAKVTKAAIKKK

SEQ ID NO: 27505 - DNA, 1344 bp, Malus domestica
  CDS (1)..(1344)
atgggtaaggagaagttccacatcaacatcgtggtcattggccatgtcgactctgggaagtcgaccacgacaggtcacttgatctacaagcttggtggtattgacaagcgtgttattgagaggttcgagaaggaggcagctgagatgaacaagaggtcattcaagtatgcctgggtgttggacaagctcaaggctgagcgtgaacgtggtattaccattgacattgccctgtggaagttcgagaccaccaagtactactgcactgtcattgatgctcctggacatcgtgactttatcaagaacatgattactggaacctcacaggctgactgtgccattctcatcattgactctaccaccggaggttttgaagccggtatttccaaggatggtcagacccgtgagcatgctttgcttgcttttactcttggtgtcaggcaaatgatttgctgctgcaacaagatggatgccaccactcccaagtactcaagggcaaggtatgatgaaattgtgaaggaagtgtcgtcctatctcaagaaggttggctacaacccagataagatcccctttgtccccatttctgggttcgagggtgacaacatgattgagaggtccaccaaccttgactggtacaagggtcccacccttcttgaggctcttgaccagatcaatgagcccaagaggccctcagacaagcccctccggcttccacttcaggatgtgtacaagattggtggtatcggtactgttcctgttggacgtgttgagactggtgtcattaagcctggtatggtggtgacttttggcccaactggtctgactactgaggtcaagtctgttgagatgcaccacgaagctatgcaggaggcccttccaggtgataatgttggattcaacgttaagaatgttgctgtcaaggatctcaagcgtgggtacgttgcttccaactccaaggatgatcccgcaaaggaggctgccaactttatcgctcaggtcatcatcatgaaccaccccggccagattggacagggatatgctccagttctcgactgtcacacctcccacattgccgtcaagtttgctgagctcgttacaaagatcgacaggcgatctggcaaggagcttgagaaggagcccaagtttttaaagaatggtgatgctggatttgtgaagatgcttcccaccaagcccatggttgttgagaccttctctgagtacccaccgctcggacgttttgctgtgagggacatgcgccagactgttgcagttggtgtcatcaagagcgttgagaagaaggatccaactggagctaagatcaccaaggccgcagctaagaagaagtga

SEQ ID NO: 27506 - protein, 447 aa, Malus domestica
MGKEKFHINIVVIGHVDSGKSTTTGHLIYKLGGIDKRVIERFEKEAAEMNKRSFKYAWVLDKLKAERERGITIDIALWKFETTKYYCTVIDAPGHRDFIKNMITGTSQADCAILIIDSTTGGFEAGISKDGQTREHALLAFTLGVRQMICCCNKMDATTPKYSRARYDEIVKEVSSYLKKVGYNPDKIPFVPISGFEGDNMIERSTNLDWYKGPTLLEALDQINEPKRPSDKPLRLPLQDVYKIGGIGTVPVGRVETGVIKPGMVVTFGPTGLTTEVKSVEMHHEAMQEALPGDNVGFNVKNVAVKDLKRGYVASNSKDDPAKEAANFIAQVIIMNHPGQIGQGYAPVLDCHTSHIAVKFAELVTKIDRRSGKELEKEPKFLKNGDAGFVKMLPTKPMVVETFSEYPPLGRFAVRDMRQTVAVGVIKSVEKKDPTGAKITKAAAKKK

SEQ ID NO: 27507 - DNA, 1344 bp, Nicotiana paniculata
  CDS (1)..(1344)
atgggtaaagagaaggttcacatcaacattgtggtcattggccatgtcgactctggtaaatcaactaccactggtcacttgatctacaagcttggtggtattgacaagcgtgtcattgagaggtttgagaaagaagctgctgagatgaacaagaggtcattcaagtatgcctgggtgcttgacaagctaaaggctgagcgtgagcgtggtatcactattgatattgccttgtggaagtttgagaccaccaagtactactgcactgtgattgatgctcctggacacagggatttcatcaagaatatgattactggtacctctcaagctgactgtgctgtcctgattatcgactctaccactggtggttttgaagctggtatctccaaggatggacagacccgtgaacatgcattgcttgctttcacccttggtgtcaaacaaatgatttgctgctgcaacaagatggatgctaccacccccaagtactccaaggctaggtacgatgaaattgtgaaggaggtttcttcctacctcaagaaggttggatacaaccctgacaagatcccctttgtccccatctctggttttgagggtgacaacatgatcgaaagatcaaccaaccttgactggtacaagggcccaactcttcttgaggctcttgaccagattaatgagcccaagaggcccacagacaagcccctcaggcttccacttcaggatgtttacaagattggtggtattggtactgtgcccgttggtcgtgtggaaactggtgtcctcaagcctggtatgcttgtgacttttggtcccactggtctgaccactgaagttaaatctgttgagatgcaccacgaagctcttcaggaggcacttcctggtgacaatgttggattcaacgtcaagaacgttgcagttaaggatctcaagcgtgggtttgttgcttccaactccaaggatgacccagctaagggtgcttccagctttacctcccaagtcatcatcatgaaccatccaggacagattggaaatggatatgctccagtgcttgactgccacacctcccacattgctgtcaagtttgcagaaattttgaccaagatcgacaggcgttctggtaaggagcttgagaaggagcccaagttcttgaagaatggtgatgctggtatggttaagatgattcccaccaagcccatggttgttgagaccttctctgagtatccaccattgggacgttttgctgtgagggacatgcgtcaaactgttgctgttggtgttatcaagaacgttgacaagaaggacccaactggtgctaaggtcaccaaggctgctcagaagaagaaatga

SEQ ID NO: 27508 - protein, 447 aa, Nicotiana paniculata
MGKEKVHINIVVIGHVDSGKSTTTGHLIYKLGGIDKRVIERFEKEAAEMNKRSFKYAWVLDKLKAERERGITIDIALWKFETTKYYCTVIDAPGHRDFIKNMITGTSQADCAVLIIDSTTGGFEAGISKDGQTREHALLAFTLGVKQMICCCNKMDATTPKYSKARYDEIVKEVSSYLKKVGYNPDKIPFVPISGFEGDNMIERSTNLDWYKGPTLLEALDQINEPKRPTDKPLRLPLQDVYKIGGIGTVPVGRVETGVLKPGMLVTFGPTGLTTEVKSVEMHHEALQEALPGDNVGFNVKNVAVKDLKRGFVASNSKDDPAKGASSFTSQVIIMNHPGQIGNGYAPVLDCHTSHIAVKFAEILTKIDRRSGKELEKEPKFLKNGDAGMVKMIPTKPMVVETFSEYPPLGRFAVRDMRQTVAVGVIKNVDKKDPTGAKVTKAAQKKK

SEQ ID NO: 27509 - DNA, 1350 bp, Daucus carota
  CDS (1)..(1350)
atgggcaaggaaaaagttcacatcaatattgtggtcattggccatgtcgattctgggaaatcaaccaccactggtcacttgatttacaagcttggaggtattgataagcgtgttatcgagaggtttgagaaggaagccgctgagatgaacaaaaggtcgttcaagtatgcttgggtccttgacaagttgaaggccgagcgggagcgtggtattactattgatattgctttgtggaagttcgaaactaataagtactattgcactgtcattgatgctcctggtcatcgtgactttatcaagaacatgattaccgggacctcacaggctgattgtgctgtgcttattatcgaccccacaactggtggttttgaagccggtatttctaaggatgggcagacccgtgagcatgcattgcttgcattcacccttggtgtcaagcagatgatttgctgttgtaataagatggatgccaccactccaaaatactcaaaggcgaggtacgatgaaattgtgaaggaagtctcttcatacttgaagaaggttggatacaatcctgagaaaattgcttttgttccaatctctggttttgaaggggacaacatgatagagaggtctaccaaccttgattggtacaagggtccaaccctgctagatgctcttgaccagatcaacgagcccaagaggccctcagacaagcctcttcgtcttccccttcaggatgtttacaagattggtggtattggaactgtgcccgtgggacgtgttgagaccggaactatcaagccagggatggttgtcacctttggcccatctggtttgaccactgaagtcaagtctgtggagatgcaccatgaatctctgcttgaagctctgcctggtgacaacgttggcttcaatgtgaaaaatgtttctgtcaaggatctcaagcgtggttatgtggcctcgaactccaaagatgatcctgctaagggagctgccagcttcacatctcaggtcattatcatgaaccaccctggtcagattggaaacggttatgccccggtacttgattgccacacctctcacattgctgtcaagtttgctgagctcttgacaaagattgaccgaagatctggcaaggagcttgagaaggagcccaagttcttgaaaaatggtgatgctggaatggttaagatgcttcccaccaagcctatggtggttgagacatttgctgagtacccgcccctcggtaggttcgctgttcgtgtcatgagacagactgttgcagttggagtcatcaaggctgttgagaagaaggatccaactggcgccaaggtcaccaaggctgctgccaagaagggtgccaagtga

SEQ ID NO: 27510 - protein, 449 aa, Daucus carota
MGKEKVHINIVVIGHVDSGKSTTTGHLIYKLGGIDKRVIERFEKEAAEMNKRSFKYAWVLDKLKAERERGITIDIALWKFETNKYYCTVIDAPGHRDFIKNMITGTSQADCAVLIIDPTTGGFEAGISKDGQTREHALLAFTLGVKQMICCCNKMDATTPKYSKARYDEIVKEVSSYLKKVGYNPEKIAFVPISGFEGDNMIERSTNLDWYKGPTLLDALDQINEPKRPSDKPLRLPLQDVYKIGGIGTVPVGRVETGTIKPGMVVTFGPSGLTTEVKSVEMHHESLLEALPGDNVGFNVKNVSVKDLKRGYVASNSKDDPAKGAASFTSQVIIMNHPGQIGNGYAPVLDCHTSHIAVKFAELLTKIDRRSGKELEKEPKFLKNGDAGMVKMLPTKPMVVETFAEYPPLGRFAVRVMRQTVAVGVIKAVEKKDPTGAKVTKAAAKKGAK

SEQ ID NO: 27511 - DNA, 1392 bp, Drosophila melanogaster
  CDS (1)..(1392)
atgggcaaggaaaagattcacattaacattgtcgtgatcggacacgtcgattccggtaagtcgaccaccaccggacacttgatctacaagtgcggtggtatcgacaagcgtaccatcgagaagttcgagaaggaggcccaggagatgggaaagggatccttcaagtacgcctgggttttggataagttgaaggctgagcgcgagcgtggtatcaccatcgatatcgccctgtggaagttcgaaactgccaagtactacgtgaccatcattgatgcccccggacacagggatttcatcaagaacatgatcactggtacctcgcaggccgattgcgccgtgctgattgtcgccgccggaaccggagaattcgaggcaggtatctcgaagaacggccagacccgcgagcacgccctgctcgccttcaccctgggtgtgaagcagctgatcgttggtgtgaacaagatggactcctccgagccaccatacagcgaggcccgttatgaggaaatcaagaaggaagtgtcctcttacatcaagaagatcggctacaacccagccgccgttgccttcgtgcccatttccggatggcacggcgacaacatgttggaaccctctaccaacatgccctggttcaagggatggaaggtggagcgcaaggagggtaacgctgacggcaagaccctgatcgatgccctcgatgccatccttcccccagcccgtcccaccgacaaggccctgcgtctgcccctgcaggatgtgtacaaaattggcggtattggaacagtacccgtgggtcgtgtggagactggtgtgctgaagcccggtaccgttgtggtcttcgcccctgctaacatcaccactgaggtcaagtccgtggagatgcaccacgaggccctgcaggaggccgttcccggagacaacgttggcttcaacgtcaagaacgtgtccgtgaaggagctgcgtcgtggctacgttgccggtgactccaaggctaacccccccaagggagccgccgacttcaccgcccaggtcatcgtgctgaaccaccccggtcagattgccaacggctacacccccgtgttggattgccacaccgctcacattgcttgcaagttcgctgagatcaaggagaaggtcgaccgtcgttccggcaagaccaccgaggagaaccccaagttcatcaagtctggcgatgctgccatcgtcaacctggtgccctctaagcccctgtgcgtggaggccttccaggagttcccccctctgggtcgcttcgctgtgcgtgacatgaggcagaccgtggctgtcggtgtcattaaggctgtcaacttcaaggatgcctccggtggcaaggtcaccaaggccgccgagaaggccaccaagggcaagaagtag

SEQ ID NO: 27512 - protein, 463 aa, Drosophila melanogaster
MGKEKIHINIVVIGHVDSGKSTTTGHLIYKCGGIDKRTIEKFEKEAQEMGKGSFKYAWVLDKLKAERERGITIDIALWKFETAKYYVTIIDAPGHRDFIKNMITGTSQADCAVLIVAAGTGEFEAGISKNGQTREHALLAFTLGVKQLIVGVNKMDSSEPPYSEARYEEIKKEVSSYIKKIGYNPAAVAFVPISGWHGDNMLEPSTNMPWFKGWKVERKEGNADGKTLIDALDAILPPARPTDKALRLPLQDVYKIGGIGTVPVGRVETGVLKPGTVVVFAPANITTEVKSVEMHHEALQEAVPGDNVGFNVKNVSVKELRRGYVAGDSKANPPKGAADFTAQVIVLNHPGQIANGYTPVLDCHTAHIACKFAEIKEKVDRRSGKTTEENPKFIKSGDAAIVNLVPSKPLCVEAFQEFPPLGRFAVRDMRQTVAVGVIKAVNFKDASGGKVTKAAEKATKGKK

SEQ ID NO: 27513 - DNA, 1725 bp, Hordeum vulgare
  CDS (108)..(1451)
gaattccgttgctgtcgatacgactcactatagggagaccggaattccgttgctgtcgcgccgccccccctcctcttcgtctccggccagccaggtagttaacagccatgggcaaggaaaagatccacatcagcattgtggtcattggccatgttgactctggcaagtcaaccacgactggccatctcatctacaagcttggaggcattgacaagcgtgtgatcgagaggtttgagaaggaagccgctgagatgaacaagaggtcattcaagtatgcctgggtgcttgacaagctcaaggctgagcgtgagagaggtatcaccattgatattgctctgtggaagttcgagaccaccaagtactcttgcactgtcattgatgctcctggtcaccgtgatttcatcaagaacatgatcactgggacctcccaggctgattgtgctgtgcttatcattgactccaccactggtgtttttcaggctggtatctccaaggatggccagacccgtgagcatgctctccttgctttcactcttggtgtgaagcagatgatttgctgctgtaacaagatggacgccaccactcccaagtactcgaagtcccgttacgatgaaattgtcaaggaagtctcttcatacctgaagaaggtcggctacaaccctgacaaggtccccttcgttcccatctctgggtttgagggtgacaacatgattgagaggtcctccaaccttgactggtacaagggccctaccctgcttgaggcgcttgaccagatcaatgagcccaagaggccctcagacaagcccctgcatcttccccttcaggatgtctacaagattggtggcattggaactgtgccagtgggacgtgttgagactggagtcatcaagccaggcatggttgtcacctttggccctactggcctgaccactgaggtcaagtctgttgaggtgcaccatgagtctctcctggaggcgcttcctggtgacaatgttggcttcaacgtcaagaacgtggctgtcaaggatctcaagcgtgggtatgttgcttccaactccaaggacgaccctgccaaggaggctgccaacttcactgcccaggtcatcatcatgaaccaccctggccagatcagcaacggttatgcccctgtgctggactgccacacatcccacatcgccgtcaagttcgccgagatccagaccaagatcgacaggcggtccggcaaggagctggaggcagcgcccaagtttctcaagaatggtgatgctgggttcgtcaagatgattccaaccaagcccatggtggtggagacctttgcccagtaccctcctctgggtcggtttgccgtgcgtgacatgaggcagacggttgctgtgggtgtgatcaagagcgtggagaagaaggagccgaccggcgccaaggttaccaaggctgcgatcaagaagaaatgagatggtgtcaggttctttaccacatctatggtggcggtggcggtgtttggtggtggcgatagttgttttagtcgcttgggttatttgtgtcgagaagtgtttgaactgcttaaagctctggtcattgtatcgttcggttgtgttggtggaacttcatcagttaatgttgctaccatatatagtcatcatgtttggagtcgttttatatcaaaaaaaaaaaaccgttgctgtcgcgacagcaacggaattcgagctcggtacccggggatcctct

SEQ ID NO: 27514 - protein, 447 aa, Hordeum vulgare
MGKEKIHISIVVIGHVDSGKSTTTGHLIYKLGGIDKRVIERFEKEAAEMNKRSFKYAWVLDKLKAERERGITIDIALWKFETTKYSCTVIDAPGHRDFIKNMITGTSQADCAVLIIDSTTGVFQAGISKDGQTREHALLAFTLGVKQMICCCNKMDATTPKYSKSRYDEIVKEVSSYLKKVGYNPDKVPFVPISGFEGDNMIERSSNLDWYKGPTLLEALDQINEPKRPSDKPLHLPLQDVYKIGGIGTVPVGRVETGVIKPGMVVTFGPTGLTTEVKSVEVHHESLLEALPGDNVGFNVKNVAVKDLKRGYVASNSKDDPAKEAANFTAQVIIMNHPGQISNGYAPVLDCHTSHIAVKFAEIQTKIDRRSGKELEAAPKFLKNGDAGFVKMIPTKPMVVETFAQYPPLGRFAVRDMRQTVAVGVIKSVEKKEPTGAKVTKAAIKKK

SEQ ID NO: 27515 - DNA, 1377 bp, Rhizomucor racemosus
  CDS (1)..(1377)
atgggtaaagagaagactcacgttaacgttgtcgttattggtcacgtcgattccggtaagtccaccaccactggtcacttgatttacaagtgtggtggtatcgacaagcgtaccatcgaagagttcgagaaggaagctgctgaactcggtaagggttccttcaagtacgcctgggttcttgacaaactcaaggctgaacgtgagcgtggtatcaccatcgatattgctctctggaagttcgagacccccaagtacaatgtcactgtcattgatgctcctggccatcgtgatttcatcaagaacatgattactggtacttctcaagctgattgtgctattcttatcattgctggtggtactggtgaattcgaagctggtatctccaaggatggtcaaacccgtgagcacgctcttcttgccttcaccttggggttccgtcaattgattgttgctatcaacaagatggataccaccaagtggtctcaagatcgttacaacgaaatcgtcaaggaagtttccggtttcatcaagaagattggtttcaaccccaagtctgttcccttcgtccccatctctggctggcacggtgataacatgttggatgaatccaccaacatgccctggttcaagggatggaacaaggagaccaaggctggttccaagaccggtaagactctcctcgaagccatcgatgctattgagccccctgtccgtccctccgacaagcctctccgtcttcccctccaagatgtctacaagattggtggtattggtacagttcccgttggtcgtgttgagactggtactatcaaggctggtatggttgtcaactttgctcccgctgctgtcaccaccgaagtcaagtccgtcgaaatgcaccacgaaaccctcactgaaggtctccccggtgacaacgtcggtttcaacgtcaagaacgtctccgtcaaggatatccgtcgtggtaacgtctgttccgactccaagaacgatcccgccaaggaatctgcctctttcaccgctcaagttattatcttgaaccaccccggtcaaatctctgctggttacgcaccagttctcgattgtcacactgctcacatcgcctgtaagttctctgaactcattgagaagattgatcgtcgttccggtaagaagatggaggatagccccaagttcgtcaagtctggtgattccgctatcgtcaagatggttccctccaagcccatgtgtgtcgaagcttacactgactatcctcctcttggtcgtttcgctgtccgtgatatgcgtcaaaccgtcgctgtcggtgtcatcaaggccgtcgagaaggttgacaaggctggtaaggtcaccaaggccgctgccaaggcttccaagaaataa

SEQ ID NO: 27516 - protein, 458 aa, Rhizomucor racemosus
MGKEKTHVNVVVIGHVDSGKSTTTGHLIYKCGGIDKRTIEEFEKEAAELGKGSFKYAWVLDKLKAERERGITIDIALWKFETPKYNVTVIDAPGHRDFIKNMITGTSQADCAILIIAGGTGEFEAGISKDGQTREHALLAFTLGFRQLIVAINKMDTTKWSQDRYNEIVKEVSGFIKKIGFNPKSVPFVPISGWHGDNMLDESTNMPWFKGWNKETKAGSKTGKTLLEAIDAIEPPVRPSDKPLRLPLQDVYKIGGIGTVPVGRVETGTIKAGMVVNFAPAAVTTEVKSVEMHHETLTEGLPGDNVGFNVKNVSVKDIRRGNVCSDSKNDPAKESASFTAQVIILNHPGQISAGYAPVLDCHTAHIACKFSELIEKIDRRSGKKMEDSPKFVKSGDSAIVKMVPSKPMCVEAYTDYPPLGRFAVRDMRQTVAVGVIKAVEKVDKAGKVTKAAAKASKK

SEQ ID NO: 27517 - DNA, 1383 bp, Schizosaccharomyces pombe
  CDS (1)..(1383)
atgggcaaggaaaagggacatattaacgtcgttgttatcggtcacgtcgattctggtaagtctaccaccactggtcacctgatttacaagtgcggtggtattgacaagcgtaccattgaaaaattcgagaaggaagccaccgagttgggtaagggttccttcaagtacgcctgggttttggacaagctcaaggccgagcgtgaacgtggtatcactatcgacattgccctttggaagttcgagactcccaagtacaatgttactgtcattgatgcccccggtcaccgtgatttcatcaagaacatgattaccggtacttctcaagctgactgtgctgtccttattattggtggtggtactggtgagttcgaggctggtatctccaaggatggtcaaacccgtgagcacgctttgcttgcttacaccttgggtgtcaagcaacttattgttgccgtcaacaagatggacaccactggctggtcccaagctcgtttcgaggaaatcgttaaggagacctccaacttcatcaagaaggtcggtttcaaccccaagaccgttcctttcgtccctgtctccggtttccaaggtgataacatgattgagcccaccaccaacatgccctggtaccaaggctggcaaaaggagaccaaggctggtgtcgtcaagggtaagactcttttggaggctattgactccattgagccccctgcacgtcccactgacaagcctcttcgtctcccccttcaagatgtttacaagatcggtggtattggtacagttcccgtcggtcgtgttgagactggtgttatcaagcccggtatgattgtcaccttcgctcccgctggtgtcactaccgaagtcaagtctgttgagatgcaccacgagtctctcgacgctggtcttcccggtgacaacgttggtttcaacgttaagaacgtttccgtcaaggatattcgccgtggtaacgtctgtggtgactccaagaacgatcctcccatgggttgtgctagcttcaccgctcaagtcatcattcttaaccaccccggtcaaatctctgctggttactctcctgttttggattgccacactgctcacattgcttgcaagttcgctgagctcattgagaagattgaccgtcgttccggtaagaagattgaggagtcccccaagtttgtcaagtctggtgatgcttgcattgctaagatggttccttccaagcctatgtgtgttgaagctttcactgactacgctcctcttggtcgtttcgctgtccgtgacatgcgtcaaaccgtcgctgtcggtgtcatcaaggccgttgagaaggttgcccctggtgccgctaaggtcactaaggccgctgttaaggctggcgccaagaagtaa

SEQ ID NO: 27518 - protein, 460 aa, Schizosaccharomyces pombe
MGKEKGHINVVVIGHVDSGKSTTTGHLIYKCGGIDKRTIEKFEKEATELGKGSFKYAWVLDKLKAERERGITIDIALWKFETPKYNVTVIDAPGHRDFIKNMITGTSQADCAVLIIGGGTGEFEAGISKDGQTREHALLAYTLGVKQLIVAVNKMDTTGWSQARFEEIVKETSNFIKKVGFNPKTVPFVPVSGFQGDNMIEPTTNMPWYQGWQKETKAGVVKGKTLLEAIDSIEPPARPTDKPLRLPLQDVYKIGGIGTVPVGRVETGVIKPGMIVTFAPAGVTTEVKSVEMHHESLDAGLPGDNVGFNVKNVSVKDIRRGNVCGDSKNDPPMGCASFTAQVIILNHPGQISAGYSPVLDCHTAHIACKFAELIEKIDRRSGKKIEESPKFVKSGDACIAKMVPSKPMCVEAFTDYAPLGRFAVRDMRQTVAVGVIKAVEKVAPGAAKVTKAAVKAGAKK

SEQ ID NO: 27519 - DNA, 1344 bp, Daucus carota
  CDS (1)..(1344)
atgggtaaggaaaagattcatatcagtattgtggtcattggccatgtcgactctggaaagtctacaaccactggtcatcttatctacaagcttggtggtattgacaagcgtgtcatcgagagatttgagaaagaagctgctgagatgaacaaacgttcattcaagtacgcatgggtgcttgacaaacttaaggctgagcgtgaacgtggtatcaccatcgatattgccctgtggaagtttgagaccaccaagtactactgcacagtcattgatgctccaggacatcgtgatttcattaagaacatgattactggaacctctcaggctgattgtgctgtccttattattgactccaccaccggaggttttgaagctggtatctccaaggacgggcaaactcgtgagcatgctttacttgcatttacccttggtgtcaagcagatgatctgttgctgcaacaagatggatgctacaacccccaagtattccaagtctagatttgaggaaattgtcaaggaggtgtcatcttacttgaagaaggttgggtacaaccccgacaaaattgctttcattcccatctctggatttgaaggtgacaacatgattgataggtctacaaaccttgactggtacaagggcccaactcttctcgaagcccttgaccagatttctgagcccaagagaccatcagacaagcctcttcgtctcccacttcaggatgtttacaagattggaggtattggaactgtgccagtgggacgtgttgaaactggtgtgatcaagcccggtatggttgtgactttcggtccttcagggctgaccactgaagtcaagtccgttgagatgcatcatgaggctctacaagaggctcttcctggtgacaatgttggattcaatgttaagaatgttgctgtcaaggatctcaagcgtgggtatgttgcctccaactctaaggatgatcccgccaaagaggctgccaacttcactgctcaagttatcatcatgaaccaccctggtcagatcggtaatggttatgctccagtgcttgattgccacacttctcacattgctgttaagtttgctgaaatccagaccaagattgatcgtcgatctggtaaggaacttgagaaggagcccaagtttttgaagaatggtgatgctggtttcgttaagatgattccaaccaagcccatggtggtcgagaccttcatgtcctaccctccacttggaaggtttgctgttcgtgacatgaggcagactgttgctgtgggagtcatcaagagtgtggagaagaaggatcctaccggagccaaggtcaccaaggctgcaatcaagaagaaatga

SEQ ID NO: 27520 - protein, 447 aa, Daucus carota
MGKEKIHISIVVIGHVDSGKSTTTGHLIYKLGGIDKRVIERFEKEAAEMNKRSFKYAWVLDKLKAERERGITIDIALWKFETTKYYCTVIDAPGHRDFIKNMITGTSQADCAVLIIDSTTGGFEAGISKDGQTREHALLAFTLGVKQMICCCNKMDATTPKYSKSRFEEIVKEVSSYLKKVGYNPDKIAFIPISGFEGDNMIDRSTNLDWYKGPTLLEALDQISEPKRPSDKPLRLPLQDVYKIGGIGTVPVGRVETGVIKPGMVVTFGPSGLTTEVKSVEMHHEALQEALPGDNVGFNVKNVAVKDLKRGYVASNSKDDPAKEAANFTAQVIIMNHPGQIGNGYAPVLDCHTSHIAVKFAEIQTKIDRRSGKELEKEPKFLKNGDAGFVKMIPTKPMVVETFMSYPPLGRFAVRDMRQTVAVGVIKSVEKKDPTGAKVTKAAIKKK

SEQ ID NO: 27521 - DNA, 1389 bp, Drosophila melanogaster
  CDS (1)..(1389)
atgggcaaggagaagatccatattaacattgtggtcattggccatgtggactccggcaagtcgacgaccaccggccacttgatctacaaatgcggcggcatcgacaagcgtacgattgagaagttcgagaaggaggcccaggaaatgggaaaaggctcctttaagtacgcctgggtactggacaagctgaaggcagagcgggagcggggcatcaccatcgacattgccctatggaagttcgagacgtccaagtactatgtgaccatcatcgatgcccctggtcacagggatttcatcaagaacatgattaccggtacctctcaggccgattgtgcggtgctgatcgtcgccgccggaactggagagttcgaggccgggatctcgaagaacggccagacccgcgagcacgcccttctggcattcacgctgggcgtgaagcagcttattgtgggcgtcaacaagatggactccactgagccgccgtacagcgaggcccgctacgaggagatcaagaaggaggtgtcctcgtacatcaagaagatcggctacaatccggcctcggtggccttcgtgcccatctccggatggcacggcgacaatatgctggagccgtccgagaagatgccctggttcaagggatggtccgtggagcgcaaggaaggcaaggcagagggcaagtgcttgatcgacgcgctggacgcgatccttccaccccagcgtcccaccgacaagccgctgcgcctgccgctccaggacgtctacaagatcggaggcatcggaaccgtaccagtaggtcgtgtggagactggtctcctcaagccaggcatggtcgtcaactttgcgccggtcaacctggtcaccgaagtaaagtctgtggagatgcaccacgaggctctcaccgaagccatgcccggcgacaacgttggcttcaacgtgaagaacgtgtccgtgaaggagctccgtcgtggctatgtggccggcgattccaagaacaatcctcctaggggagcagccgactttaccgctcaggtgattgtgctcaaccatccgggccagatcgccaatgggtacactcccgtcttggattgccacacggcgcacattgcctgcaagttttccgagatcaaggagaagtgcgaccgccgtacgggcaagaccaccgagacggagccgaaggctatcaagtccggggatgcggccatcattgtgctggtgcccagcaagccgttgtgcgtagagagcttccaggagttcccaccgctgggacggttcgctgtgcgcgacatgaggcagaccgtggccgtgggcgtcatcaagtcggtgaactttaaagagacgacctcgggcaaggtgacaaaagccgctgagaaggcacagaagaagaaataa

SEQ ID NO: 27522 - protein, 462 aa, Drosophila melanogaster
MGKEKIHINIVVIGHVDSGKSTTTGHLIYKCGGIDKRTIEKFEKEAQEMGKGSFKYAWVLDKLKAERERGITIDIALWKFETSKYYVTIIDAPGHRDFIKNMITGTSQADCAVLIVAAGTGEFEAGISKNGQTREHALLAFTLGVKQLIVGVNKMDSTEPPYSEARYEEIKKEVSSYIKKIGYNPASVAFVPISGWHGDNMLEPSEKMPWFKGWSVERKEGKAEGKCLIDALDAILPPQRPTDKPLRLPLQDVYKIGGIGTVPVGRVETGLLKPGMVVNFAPVNLVTEVKSVEMHHEALTEAMPGDNVGFNVKNVSVKELRRGYVAGDSKNNPPRGAADFTAQVIVLNHPGQIANGYTPVLDCHTAHIACKFSEIKEKCDRRTGKTTETEPKAIKSGDAAIIVLVPSKPLCVESFQEFPPLGRFAVRDMRQTVAVGVIKSVNFKETTSGKVTKAAEKAQKKK

SEQ ID NO: 27523 - DNA, 1344 bp, Hordeum vulgare
  CDS (1)..(1344)
atgggcaaagaaaagatccacatcagcattgtggtcattggccatgtcgactctggcaagtcaaccacgactggccatctcatctacaagcttggaggcattgacaagcgtgtgatcgagagttttgagaaggaagccgctgagatgaacaagaggtcattcaagtatgcctgggttcttgacaagctcaaggctgagcgtgagagaggtatcaccattgatattgctctgtggaagtttgagaccaccaagtactcttgcactgtcattgatgctcctggtcaccgtgatttcatcaagaacatgatcaccgggacctcccaggctgattgtgctgtgcttatcattgactccaccactggtggttttgaggctggtatctctaaggatggccagacacgtgagcatgctctccttgctttcactcttggtgtgaagcacatgatttgctgctgcaacaagatggacgccaccactcccaagtactcgaagtcccgttacgatgaaattgtcaaggaagtctcttcatacctgaagaaggtcggctacaaccctgacaaggttcccttcgtccccatctctgggtttgagggtgataacatgatcgagaggtcctccaaccttgactggtacaagggccctaccctgcttgaggcgcttgaccagatcaatgagcccaagaggccctcagagaagcccctgcgtcttccccttcaggatgtctacaagattggtggcattggaactgtgccagtgggacgtgttgagactggagtcatcaagccaggcatggttgtcacctttggccctactggcctgaccactgaggtcaagtctgttgagatgcaccatgagtctctcctggaggcgcttcctggtgacaatgttggcttcaacgtcaagaacgtggctgtcaaggatctcaagcgtgggtatgttgcttccaactccaaggacgaccctgccaaggaggctgccaacttcactgcccaggtcatcatcatgaaccaccctggccagatcagcaacggttatgcccctgtgctggactgccacacatcccacatcgccgtcaagttcgccgagatccagaccaagatcgacaggcggtcgggcaaggagctggaggcagcgcccaagtttctcaagaatggtgatgctgggttcgtcaagatgattccaaccaagcccatggtggtggagacctttgcccagtaccctcctctgggtcggtttgccgtgcgtgacatgaggcagacggttgctgtgggtgtgatcaagagcgtggagaagaaggagccgaccggcgccaaggttaccaaggctgcgatcaagaagaaatga

SEQ ID NO: 27524 - protein, 447 aa, Hordeum vulgare
MGKEKIHISIVVIGHVDSGKSTTTGHLIYKLGGIDKRVIESFEKEAAEMNKRSFKYAWVLDKLKAERERGITIDIALWKFETTKYSCTVIDAPGHRDFIKNMITGTSQADCAVLIIDSTTGGFEAGISKDGQTREHALLAFTLGVKHMICCCNKMDATTPKYSKSRYDEIVKEVSSYLKKVGYNPDKVPFVPISGFEGDNMIERSSNLDWYKGPTLLEALDQINEPKRPSEKPLRLPLQDVYKIGGIGTVPVGRVETGVIKPGMVVTFGPTGLTTEVKSVEMHHESLLEALPGDNVGFNVKNVAVKDLKRGYVASNSKDDPAKEAANFTAQVIIMNHPGQISNGYAPVLDCHTSHIAVKFAEIQTKIDRRSGKELEAAPKFLKNGDAGFVKMIPTKPMVVETFAQYPPLGRFAVRDMRQTVAVGVIKSVEKKEPTGAKVTKAAIKKK

SEQ ID NO: 27525 - DNA, 1377 bp, Rhizomucor racemosus
  CDS (1)..(1377)
atgggtaaagagaagactcacgttaacgtcgtcgtcattggtcacgtcgattccggtaaatctactactactggtcacttgatttacaagtgtggtggtattgataagcgtaccatcgagaagttcgagaaggaagctgccgaactcggtaagggttctttcaagtacgcctgggtccttgataaacttaaggctgaacgtgagcgtggtatcaccattgatatcgctctctggaagttcgagacccccaagtacaacgttactgttattgatgctcccggccatcgtgatttcatcaagaacatgattactggtacttctcaagctgattgtgctattcttatcattgctggtggtactggtgaattcgaagctggtatctccaaggatggtcaaacccgtgagcacgctcttcttgccttcaccttgggtttccgtcaattgattgttgctatcaacaagatggataccaccaagtggtctcaagatcgttacaacgaaatcgtcaaggaagtttccggtttcatcaagaagattggtttcaaccccaagtctgttcccttcgtccccatctctggctggcacggtgataacatgttggatgaatccaccaacatgccctggttcaagggatggaacaaggagaccaaggctggttccaagaccggtaagactctcctcgaagccatcgatgctattgagccccctgtccgtccttccgacaagcctctccgtcttcccctccaagatgtctacaagattggtggtattggtacagttcccgttggtcgtgttgagactggtactatcaaggctggtatggttgtcaactttgctcccgctgctgtcaccaccgaagtcaagtccgtcgaaatgcatcacgaaaccctcactgaaggtctccccggtgacaacgtcggtttcaacgtcaagaacgtctccgtcaaggatatccgtcgtggtaacgtctgttccgactccaagaacgatcccgctaaggaatctgcctctttcaccgctcaagttattatcttgaaccaccccggtcaaatctctgctggttacgcaccagttctcgattgtcacactgctcacatcgcctgtaagttctctgaactcattgagaagattgatcgtcgttccggtaagaagatggaggattctcccaagttcgtcaagtctggtgattccgctatcgtcaagatggttccctccaagcccatgtgtgtcgaagcttacactgactatcctcctcttggtcgtttcgctgtccgtgatatgcgtcaaaccgtcgctgtcggtgtcatcaaggctgtcgagaaggttgacaaggctggtaaggtcaccaaggccgctgccaaggcttccaagaaataa

SEQ ID NO: 27526 - protein, 458 aa, Rhizomucor racemosus
MGKEKTHVNVVVIGHVDSGKSTTTGHLIYKCGGIDKRTIEKFEKEAAELGKGSFKYAWVLDKLKAERERGITIDIALWKFETPKYNVTVIDAPGHRDFIKNMITGTSQADCAILIIAGGTGEFEAGISKDGQTREHALLAFTLGFRQLIVAINKMDTTKWSQDRYNEIVKEVSGFIKKIGFNPKSVPFVPISGWHGDNMLDESTNMPWFKGWNKETKAGSKTGKTLLEAIDAIEPPVRPSDKPLRLPLQDVYKIGGIGTVPVGRVETGTIKAGMVVNFAPAAVTTEVKSVEMHHETLTEGLPGDNVGFNVKNVSVKDIRRGNVCSDSKNDPAKESASFTAQVIILNHPGQISAGYAPVLDCHTAHIACKFSELIEKIDRRSGKKMEDSPKFVKSGDSAIVKMVPSKPMCVEAYTDYPPLGRFAVRDMRQTVAVGVIKAVEKVDKAGKVTKAAAKASKK

SEQ ID NO: 27527 - DNA, 1383 bp, Schizosaccharomyces pombe
  CDS (1)..(1383)
atgggcaaagaaaagggacatattaacgtcgttgttatcggtcacgtcgattctggtaagtctaccaccactggtcacttgatttacaagtgcggtggtattgacaagcgtaccattgaaaaattcgagaaggaagccaccgagttgggtaagggttccttcaagtacgcctgggttttggacaagctcaaggccgagcgtgaacgtggtatcaccatcgacattgccctttggaagttcgagactcccaagtacaatgttactgtcattgatgcccccggtcaccgtgatttcatcaagaacatgattaccggtacttctcaagctgactgtgctatccttattattggtggtggtactggtgagttcgaggctggtatctccaaggatggtcaaacccgtgagcacgctttgcttgcttacaccttgggtgtcaagcaacttattgttgccgtcaacaagatggacaccactggctggtcccaagctcgtttcgaggaaatcgttaaggagacctctaacttcatcaagaaggtcggtttcaaccccaagaccgttcccttcgtccctgtctccggtttccaaggtgataacatgattgagcccaccaccaacatgccctggtaccaaggctggcaaaaggagaccaaggctggtgtcgtcaagggtaagactcttttggaggctattgactccattgagccccctgcacgtcccactgacaagcctcttcgtcttccccttcaagatgtttacaagatcggtggtattggtacagttcccgtcggtcgtgtcgagactggtgttatcaagcccggtatgattgtcaccttcgctcccgctggtgtcactaccgaagtcaagtctgttgagatgcaccacgagtctctcgacgctggtcttcccggtgacaacgttggtttcaacgttaagaacgtttccgtcaaggatattcgccgtggtaatgtctgtggtgactccaagaatgatcctcccatgggttgtgctagcttcaccgctcaagtcatcattcttaaccaccccggtcaaatctctgctggttactctcctgttttggattgccacactgctcacattgcttgcaagttcgctgagctcattgagaagattgaccgtcgttccggtaagaagattgaggagtcccccaagttcgtcaagtctggtgatgcttgcattgctaagatggttccttccaagcctatgtgtgttgaagctttcactgactacgctcctcttggtcgtttcgctgtccgtgacatgcgtcaaaccgtcgctgtcggtgtcatcaaagctgtcgagaaggttgctcctggtgccgctaaggttaccaaggccgctgttaaggctggtgctaagaaataa

SEQ ID NO: 27528 - protein, 460 aa, Schizosaccharomyces pombe
MGKEKGHINVVVIGHVDSGKSTTTGHLIYKCGGIDKRTIEKFEKEATELGKGSFKYAWVLDKLKAERERGITIDIALWKFETPKYNVTVIDAPGHRDFIKNMITGTSQADCAILIIGGGTGEFEAGISKDGQTREHALLAYTLGVKQLIVAVNKMDTTGWSQARFEEIVKETSNFIKKVGFNPKTVPFVPVSGFQGDNMIEPTTNMPWYQGWQKETKAGVVKGKTLLEAIDSIEPPARPTDKPLRLPLQDVYKIGGIGTVPVGRVETGVIKPGMIVTFAPAGVTTEVKSVEMHHESLDAGLPGDNVGFNVKNVSVKDIRRGNVCGDSKNDPPMGCASFTAQVIILNHPGQISAGYSPVLDCHTAHIACKFAELIEKIDRRSGKKIEESPKFVKSGDACIAKMVPSKPMCVEAFTDYAPLGRFAVRDMRQTVAVGVIKAVEKVAPGAAKVTKAAVKAGAKK

SEQ ID NO: 27529 - DNA, 1374 bp, Rhizomucor racemosus
  CDS (1)..(1374)
atgggtaaggagaagactcacgttaacgtcgtcgtcattggtcacgtcgattccggtaaatctactactactggtcacttgatttacaagtgtggtggtattgataagcgtaccatcgagaagttcgagaaggaagctgccgaactcggtaagggttctttcaagtacgcttgggtccttgataaacttaaggctgaacgtgagcgtggtatcaccattgatatcgctctctggaagttcgagacccccaagtacaacgtcaccgttattgatgctcccggtcatcgtgatttcatcaagaacatgattactggtacttctcaagccgattgtgccattcttattattgctggtggtactggtgaattcgaagctggtatctccaaggatggtcaaacccgtgagcacgctcttcttgccttcaccttgggtgtccgtcaattgattgttgctatcaacaagatggataccaccaagtggtctcaagatcgttacaacgaaatcgtcaaggaagtttccggtttcatcaagaagattggtttcaaccccaagtctgttcccttcgtccccatctctggctggcacggtgataacatgttggatgaatccaccaacatgccctggttcaagggatggaacaaggagaccaaggctggttccaagaccggtaagactctcctcgaagccatcgatgctattgagccccctgtccgtccttccgacaagcctctccgtcttcccctccaagatgtctacaagattggtggtattggtacagttcccgttggtcgtgttgagactggtactatcaaggctggtatggttgtcaactttgctcccgctgctgtcaccaccgaagtcaagtccgtcgaaatgcaccacgaaaccctcactgaaggtctccccggtgacaacgttggtttcaacgtcaagaacgtctccgtcaaggatatccgtcgtggtaacgtctgttccgactccaagaacgatcccgctaaggaatctgcctctttcaccgctcaagttatcatcttgaaccaccccggtcaaatctctgctggttacgcaccagttctcgattgtcacactgctcacatcgcctgtaagttctctgaactcattgagaagattgatcgtcgttccgagaagatggaggattctcctaagtttgtcaagtctggtgattccgctatcgtcaagatggttccctccaagcccatgtgtgtcgaagcttacactgactatcctcctcttggtcgtttcgctgtccgtgatatgcgtcaaaccgtcgctgtcggtgtcatcaaggccgtcgagaaggttgacaaggctggtaaggtcaccaaggccgctgccaaggcttccaagaaataa

SEQ ID NO: 27530 - protein, 457 aa, Rhizomucor racemosus
MGKEKTHVNVVVIGHVDSGKSTTTGHLIYKCGGIDKRTIEKFEKEAAELGKGSFKYAWVLDKLKAERERGITIDIALWKFETPKYNVTVIDAPGHRDFIKNMITGTSQADCAILIIAGGTGEFEAGISKDGQTREHALLAFTLGVRQLIVAINKMDTTKWSQDRYNEIVKEVSGFIKKIGFNPKSVPFVPISGWHGDNMLDESTNMPWFKGWNKETKAGSKTGKTLLEAIDAIEPPVRPSDKPLRLPLQDVYKIGGIGTVPVGRVETGTIKAGMVVNFAPAAVTTEVKSVEMHHETLTEGLPGDNVGFNVKNVSVKDIRRGNVCSDSKNDPAKESASFTAQVIILNHPGQISAGYAPVLDCHTAHIACKFSELIEKIDRRSEKMEDSPKFVKSGDSAIVKMVPSKPMCVEAYTDYPPLGRFAVRDMRQTVAVGVIKAVEKVDKAGKVTKAAAKASKK

SEQ ID NO: 27531 - DNA, 1377 bp, Absidia glauca
  CDS (1)..(1377)
atgggtaaagaaaagactcacgttaacgtcgttgtcattggtcacgtcgattctggtaaatccaccaccactggtcatttgatctacaagtgcggtggtattgacaagcgtaccattgaaaagttcgaaaaggaagctgctgaactcggtaagggttccttcaagtacgcctgggtgttggacaagctcaaggccgaacgtgaacgtggtatcaccatcgatatcgctctctggaagttcgaaacccccaagtaccacgtcaccgtcattgacgcccctggccatcgtgatttcatcaagaacatgattactggtacttctcaagctgattgcggtattcttatcattgctgccggtactggtgaattcgaagctggtatctccaaggatggtcaaacccgtgaacacgctttgttggctttcaccctcggtgtccgtcaattgatcgtcgccattaacaagatggattccaccaagtggtccgaacaacgcttcaacgaaatcatcaaggaagtgtctggcttcatcaagaagatcggtttcaaccccaagtctgtccccttcgtccccatctctggctggcacggtgacaacatgttggaagaatctaccaacatgccctggtacaagggatggaacaaggaaaccaaggctggtgccaagtctggcaagactctcttggatgccatcgatgctattgatcctcctcaacgtccttccgacaagcccctccgtctccctcttcaagatgtgtacaagatcggtggtattggtactgtccccgtcggtcgtgtcgaaactggtgtcatcaaggccggtatggtcgtcaccttcgctcccgctaacgtcaccactgaagtcaagtccgtcgaaatgcatcacgaacaattggttgaaggtctccccggtgacaacgtcggtttcaacgtcaagaacgtctccgtcaaggatatccgtcgtggtaacgtctgctctgactccaagaacgaccccgccaaggaagccggctccttcactgcccaagtcattgtccttaaccatcctggtcaaatcggtgctggttacgctcctgtcttggattgccacactgctcacattgcctgtaagttcgccgaactcttggaaaagatcgatcgtcgttccggtaagaagctcgaagatgctcccaagttcgtcaagtctggtgattccgctatcgtcaagatgatcccctccaagcccatgtgtgtcgaagcttacactgactaccctcctcttggtcgtttcgccgtccgtgatatgcgtcaaaccgtcgctgttggtgtcatcaaggccgtcgaaaaggttgacaaggctggcaaggtcaccaaggctgctgccaaggctggcgagaaataa

SEQ ID NO: 27532 - protein, 458 aa, Absidia glauca
MGKEKTHVNVVVIGHVDSGKSTTTGHLIYKCGGIDKRTIEKFEKEAAELGKGSFKYAWVLDKLKAERERGITIDIALWKFETPKYHVTVIDAPGHRDFIKNMITGTSQADCGILIIAAGTGEFEAGISKDGQTREHALLAFTLGVRQLIVAINKMDSTKWSEQRFNEIIKEVSGFIKKIGFNPKSVPFVPISGWHGDNMLEESTNMPWYKGWNKETKAGAKSGKTLLDAIDAIDPPQRPSDKPLRLPLQDVYKIGGIGTVPVGRVETGVIKAGMVVTFAPANVTTEVKSVEMHHEQLVEGLPGDNVGFNVKNVSVKDIRRGNVCSDSKNDPAKEAGSFTAQVIVLNHPGQIGAGYAPVLDCHTAHIACKFAELLEKIDRRSGKKLEDAPKFVKSGDSAIVKMIPSKPMCVEAYTDYPPLGRFAVRDMRQTVAVGVIKAVEKVDKAGKVTKAAAKAGEK

SEQ ID NO: 27533 - DNA, 1383 bp, Ajellomyces capsulata
  CDS (1)..(1383)
atgggtaaggaagacaagactcacattaacctcgtcgtcatcggccacgtcgattcgggcaaatctaccaccactggtcatttgatctacaaatgcggtggtattgacagccgtaccattgagaagttcgaaaaggaagccgaagagttgggcaagaaatccttcaaatatgcgtgggtccttgacaaactgaagtctgagcgtgagcgtggtatcaccatcgatattgccctctggaaattcgagactccgaagtacagtgtcactgtcattgatgctcccggccatcgtgacttcatcaagaacatgatcactggtacctcccaggctgactgcgctatcctcatcattgctgccggtactggtgagttcgaggctggtatctccaaggatggccagactcgtgagcacgctctgcttgctttcacccttggtgtgaggcaactcatcgttgccatcaacaagatggacaccaccaagtggtccgagtcccgtttcaacgaaatcatcaaggaggtttccaacttcatcaagaaggtcggatataaccccaaggctgttcccttcgtgccaatctctggtttcgagggtgacaacatgattgaaccctcccccaactgcacatggtacaagggctggaacaaggagactgcctctggcaagtcttctggtaaaacccttctcgatgccattgacgccattgaacccccaacccgtcctaccgataagcccctccgtcttcccctccaggatgtgtacaaaatctctggtattggcactgttcccgtcggacgtgttgagactggtgtcatcaagcccggtatggtcgtgactttcgctccctccaacgtcaccactgaagtcaagtccgtcgaaatgcaccaccaacaactccaggctggttaccctggcgacaacgtcggcttcaacgtcaagaacgtttcagtcaaggaagtccgccgtggcaacgttgctggcgactccaaaaatgatccccctaagggctgcgaatccttcaatgcccaggtcatcgtccttaaccaccccggccaggttggcgctggttatgccccagtcctcgactgccacactgcccacattgcttgcaagttctctgagcttattgagaagatcgaccgccgtaccggaaagtctgttgagaacaaccccaagttcatcaagtctggtgatgctgctatcgtcaagatggttccctccaagcccatgtgcgtggagcccttcactgactatccccctcttggacgtttcgctgtccgtgacatgagacaaaccgtcgctgtcggtgtcatcaagtccgtcatcaagtctgacaagactgctggcaaggtcaccaaggccgcgcagaaggccaccaagaaataa

SEQ ID NO: 27534 - protein, 460 aa, Ajellomyces capsulata
MGKEDKTHINLVVIGHVDSGKSTTTGHLIYKCGGIDSRTIEKFEKEAEELGKKSFKYAWVLDKLKSERERGITIDIALWKFETPKYSVTVIDAPGHRDFIKNMITGTSQADCAILIIAAGTGEFEAGISKDGQTREHALLAFTLGVRQLIVAINKMDTTKWSESRFNEIIKEVSNFIKKVGYNPKAVPFVPISGFEGDNMIEPSPNCTWYKGWNKETASGKSSGKTLLDAIDAIEPPTRPTDKPLRLPLQDVYKISGIGTVPVGRVETGVIKPGMVVTFAPSNVTTEVKSVEMHHQQLQAGYPGDNVGFNVKNVSVKEVRRGNVAGDSKNDPPKGCESFNAQVIVLNHPGQVGAGYAPVLDCHTAHIACKFSELIEKIDRRTGKSVENNPKFIKSGDAAIVKMVPSKPMCVEPFTDYPPLGRFAVRDMRQTVAVGVIKSVIKSDKTAGKVTKAAQKATKK

SEQ ID NO: 27535 - DNA, 1397 bp, Apis mellifera
  CDS (1)..(1386)
atgggtaaggagaagattcatataaacatcgtggtgatcggccacgttgattcgggcaagtcgacgactaccggtcatctgatttacaaatgcggcggcatcgacaagcgtaccatcgaaaagttcgagaaggaggctcaagaaatgggcaagggctcgttcaagtacgcctgggtgttggacaagctgaaggctgaacgcgagcgtggtatcacgatcgatatcgccctgtggaagttcgagactgcgaaatattacgtgacgatcatagacgcgcctgggcatcgcgatttcatcaaaaatatgatcaccgggacgagtcaggccgattgtgccgtgttaatagtcgcggctggtataggtgaattcgaagctggtatctcgaagaacggacagacgcgcgaacacgctttgctggcgttcacgcttggggtcaagcagttgatcgttggagtgaacaagatggacatgaccgatcccccgtattcggaggcccgtttcgaggagatcaagaaagaggtgtcatcgtacataaaaaagatcggttacaacacagcctcggtcgcgttcgtaccgatctccggatggcacggcgacaacatgttggaaccctcgccgaagacaccgtggtacaagggatggaaagtggagcgcaaagatggtaacgctgacggaaagaccctgatcgaagccctcgacgctatattaccgccgtccagacctaccgataaggctcttcgtttaccgcttcaggacgtttataagatcggtggtatcggtactgtaccggtcggtcgggtggagaccggtattttgaaaccaggtatgctggtaacattcgctccagcagcgctcaccaccgaagtgaaatcggtcgagatgcatcacgaggcattgacggaggcgttacccggggacaacgttggcttcaacgtgaagaacatttctgtgaaagagttgaggcgtggttacgtggcgggagattcgaaaaatcaaccgccacggggggcagccgatttcacagcgcaggtgatcgtcctcaatcatcctgggcagataagcaacggttatacaccggtgctcgattgtcacaccgctcatatcgcttgcaaatttgcggagatcaaggagaaatgcgaccgccgtaccggcaagaccaccgaggagaatccgaagagcatcaagagcggagacgccgcgatcgtgatgttgcaacctactaagccgatgtgcgtcgaagctttccaggaattccctccgcttggtcgcttcgcggttcgcgacatgcgtcagactgtcgctgtgggcgtcattaagagtgtcacctttaaagatacccagggcaaggtcacaaaggccgcggagaaagcccagaagaaaaagtaaccatcaaggct

SEQ ID NO: 27536 - protein, 461 aa, Apis mellifera
MGKEKIHINIVVIGHVDSGKSTTTGHLIYKCGGIDKRTIEKFEKEAQEMGKGSFKYAWVLDKLKAERERGITIDIALWKFETAKYYVTIIDAPGHRDFIKNMITGTSQADCAVLIVAAGIGEFEAGISKNGQTREHALLAFTLGVKQLIVGVNKMDMTDPPYSEARFEEIKKEVSSYIKKIGYNTASVAFVPISGWHGDNMLEPSPKTPWYKGWKVERKDGNADGKTLIEALDAILPPSRPTDKALRLPLQDVYKIGGIGTVPVGRVETGILKPGMLVTFAPAALTTEVKSVEMHHEALTEALPGDNVGFNVKNISVKELRRGYVAGDSKNQPPRGAADFTAQVIVLNHPGQISNGYTPVLDCHTAHIACKFAEIKEKCDRRTGKTTEENPKSIKSGDAAIVMLQPTKPMCVEAFQEFPPLGRFAVRDMRQTVAVGVIKSVTFKDTQGKVTKAAEKAQKKK

SEQ ID NO: 27537 - DNA, 1350 bp, Arabidopsis thaliana
  CDS (1)..(1350)
atgggaaaagagaagtttcacatcaacattgtggtcattggccacgtcgattctggaaagtcgaccaccactgggcacttgatctacaagttgggtggtattgacaagcgtgtcattgagaggttcgagaaggaggctgctgagatgaacaagaggtccttcaagtacgcatgggttttggacaaacttaaggctgagcgtgagcgtggtatcaccattgacattgctctctggaagttcgagaccaccaagtactactgcactgtcattgatgctcctggccatcgtgatttcatcaagaacatgatcactggtacctcccaggctgattgtgctgtccttatcattgactccaccactggtggttttgaggctggtatctccaaggatggtcagacccgtgagcacgctctacttgctttcacccttggtgtcaagcagatgatctgctgttgtaacaagatggatgccactacccccaagtactccaaggccaggtacgatgaaatcatcaaggaggtgtcttcctacttgaagaaggttggttacaaccccgacaaaatcccatttgtgcccatctctggatttgagggtgacaacatgattgagaggtccaccaaccttgactggtacaagggaccaactctccttgaggctcttgaccagatcaacgagcccaagaggccgtcagacaagccccttcgtctcccacttcaggatgtctacaagattggtggtattggaacggtgccagtgggacgtgttgagactggtatgatcaagcctggtatggttgtgacctttgctcccacaggattgaccactgaggtcaagtctgttgagatgcaccacgagtctcttcttgaggcacttccaggtgacaacgttgggttcaatgttaagaatgttgctgtcaaggatcttaagagagggtacgtcgcatccaactccaaggatgaccctgccaagggtgctgctaacttcacctcccaggtcatcatcatgaaccaccctggtcagattggtaacggttacgccccagtcctggattgccacacctctcacattgcagtcaagttctctgagatcttgaccaagattgacaggcgttctggtaaggagattgagaaggagcctaaattcttgaagaatggtgatgctggtatggtgaagatgactccaaccaagcccatggttgtggagaccttctctgagtacccaccacttggacgtttcgctgtgagggacatgaggcagactgttgcagtcggtgttatcaagagtgttgacaagaaggacccaactggagccaaggttaccaaggctgcagtcaagaagggtgccaagtga

SEQ ID NO: 27538 - protein, 449 aa, Arabidopsis thaliana
MGKEKFHINIVVIGHVDSGKSTTTGHLIYKLGGIDKRVIERFEKEAAEMNKRSFKYAWVLDKLKAERERGITIDIALWKFETTKYYCTVIDAPGHRDFIKNMITGTSQADCAVLIIDSTTGGFEAGISKDGQTREHALLAFTLGVKQMICCCNKMDATTPKYSKARYDEIIKEVSSYLKKVGYNPDKIPFVPISGFEGDNMIERSTNLDWYKGPTLLEALDQINEPKRPSDKPLRLPLQDVYKIGGIGTVPVGRVETGMIKPGMVVTFAPTGLTTEVKSVEMHHESLLEALPGDNVGFNVKNVAVKDLKRGYVASNSKDDPAKGAANFTSQVIIMNHPGQIGNGYAPVLDCHTSHIAVKFSEILTKIDRRSGKEIEKEPKFLKNGDAGMVKMTPTKPMVVETFSEYPPLGRFAVRDMRQTVAVGVIKSVDKKDPTGAKVTKAAVKKGAK

SEQ ID NO: 27539 - DNA, 1389 bp, Artemia salina
  CDS (1)..(1389)
atgggaaaagaaaagattcacatcaacattgtcgtcattggtcacgtagattctggtaaatccacaacaactggacatttgatctacaaatgtggtggtatcgacaagagaaccattgaaaagttcgaaaaggaagcccaagaaatgggcaaaggctccttcaaatatgcctgggtattggacaaacttaaagctgagcgtgagcgtggtatcacaattgacattgccctttggaaattcgaaactgctaagtactatgttacaattatagatgctccaggccatcgtgattttatcaagaacatgatcactggcacatcccaggctgattgtgctgtcctgattgttgctgctggtgtcggtgaattcgaagccggtatctctaagaacggtcagacacgtgaacatgctctgcttgcctacacccttggtgtcaaacaacttattgttggcgttaacaagatggattctactgaaccccctttcagtgaggctcgttttgaggaaatcaaaaaggaagtctcggcttacattaagaaaattggttacaatccagctgctgttgctttcgtaccaatttctggatggcatggtgacaacatgctggaggcctctgaccggctcccatggtacaagggatggaacattgaacgtaaagagggcaaagctgacggtaagacccttttggatgctcttgatgctattctgcctccatctcgcccgactgagaagcccctgcgtcttccacttcaggatgtttacaagattggaggtattggaacagtacctgtgggtcgggttgaaactggtatcattaagccaggtatgatagtcacatttgccccagccaacataaccactgaagtcaaatccgtcgaaatgcaccacgaatcccttgaacaggcatctccaggtgataacgttggtttcaatgtcaaaaacgtttcagtcaaagaacttcgtcgtggctacgtcgcctcagattcaaagaacaatccagccagaggctctcaagatttctttgctcaggttattgtcttgaaccaccctggtcagatctcaaacggttacactcctgtcttggactgccacacagctcacattgcttgcaagtttgctgagattaaagagaagtgtgacagacgtactggcaaaacaactgaagctgagccaaaatttatcaagtcaggtgatgcggccatgatcactttggtaccttccaagccgttgtgtgttgaagccttttccgacttcccacctcttggtcgatttgctgtccgtgacatgagacaaacagtcgctgtcggagttatcaagtccgtcaacttcaaggaccccaccgccggcaaggtcaccaaagccgcagaaaaggccggtaagaagaagtga

SEQ ID NO: 27540 - protein, 462 aa, Artemia salina
MGKEKIHINIVVIGHVDSGKSTTTGHLIYKCGGIDKRTIEKFEKEAQEMGKGSFKYAWVLDKLKAERERGITIDIALWKFETAKYYVTIIDAPGHRDFIKNMITGTSQADCAVLIVAAGVGEFEAGISKNGQTREHALLAYTLGVKQLIVGVNKMDSTEPPFSEARFEEIKKEVSAYIKKIGYNPAAVAFVPISGWHGDNMLEASDRLPWYKGWNIERKEGKADGKTLLDALDAILPPSRPTEKPLRLPLQDVYKIGGIGTVPVGRVETGIIKPGMIVTFAPANITTEVKSVEMHHESLEQASPGDNVGFNVKNVSVKELRRGYVASDSKNNPARGSQDFFAQVIVLNHPGQISNGYTPVLDCHTAHIACKFAEIKEKCDRRTGKTTEAEPKFIKSGDAAMITLVPSKPLCVEAFSDFPPLGRFAVRDMRQTVAVGVIKSVNFKDPTAGKVTKAAEKAGKKK

SEQ ID NO: 27541 - DNA, 1380 bp, Arxula adeninivorans
  CDS (1)..(1380)
atgggaaaggaaaagactcacgttaacgtcgttgtcattggacacgtcgactctggaaagtccaccaccactggtcaccttatctacaagtgcggtggtatcgacaagcgaaccatcgagaagttcgagaaggaggccgccgagctcggaaagggttccttcaagtacgcttgggtgcttgacaagcttaaggccgagcgtgagagggttatcaccattgacattgctctgtggaagttcgagacccccaagtactacgtcactgtcattgacgcccctggtcaccgtgatttcatcaagaacatgatcactggtacctcccaggccgactgtgccattctcattatcgccggtggtaccggagagttcgaggctggtatctccaaggacggtcagacccgtgagcacgctctgcttgctttcacccttggtgtccgtcagctgattgttgccatcaacaagatggactccgtcaactggtccgaggaccgatacaatgagattgtgaaggagacttccaacttcatcaagaaggtcggtttcaaccccaaggctgttcctttcgtgcccatctctggatggaacggagacaacatgattgaggccaccaccaacgcctcctggtacaagggatggcacaaggagaccaaggagggtaaggccactggtaagacccttcttgaggccatcgacgctgtcgaccctcctacccgtccttctgacaagcccctgcgtctccctctgcaggatgtctacaagatcggtggtatcggaactgtgcccgtcggtcgtgtcgagactggtgtcatcaagcccggtatggttgtcaccttcgcccccgctggtgtgaccactgaagtcaagtccgtcgagatgcaccacgagcagctgcccgagggtctgcccggtgacaacgtcggattcaacgtcaagaacgtctccgtcaaggagatccgacgaggaaacgttgctggtgactccaagaacgatcctcctaagggatgcgactctttcaccgctcaggtcatcatcttcaaccaccctggtcagatctctgccggatactctcccgtgcttgactgtcacactgcccacattgcttgccgattcgatgagctgatcgagaagatcgaccgtcgttccggaaagaaggttgaggactctcccaagttcgtcaaggctggtgatgctgccatcgtccgcatgattccttccaagcccatgtgcgttgagaccttcactgagtacccccctcttggacgattcgccgtccgtgacatgcgtcagaccgttgctgtcggtgtcatcaagtcggtcgagaagtctgacaagggtgccggaaaggtcaccaaggctgcccagaaggccgccaagaaataa

SEQ ID NO: 27542 - protein, 459 aa, Arxula adeninivorans
MGKEKTHVNVVVIGHVDSGKSTTTGHLIYKCGGIDKRTIEKFEKEAAELGKGSFKYAWVLDKLKAERERVITIDIALWKFETPKYYVTVIDAPGHRDFIKNMITGTSQADCAILIIAGGTGEFEAGISKDGQTREHALLAFTLGVRQLIVAINKMDSVNWSEDRYNEIVKETSNFIKKVGFNPKAVPFVPISGWNGDNMIEATTNASWYKGWHKETKEGKATGKTLLEAIDAVDPPTRPSDKPLRLPLQDVYKIGGIGTVPVGRVETGVIKPGMVVTFAPAGVTTEVKSVEMHHEQLPEGLPGDNVGFNVKNVSVKEIRRGNVAGDSKNDPPKGCDSFTAQVIIFNHPGQISAGYSPVLDCHTAHIACRFDELIEKIDRRSGKKVEDSPKFVKAGDAAIVRMIPSKPMCVETFTEYPPLGRFAVRDMRQTVAVGVIKSVEKSDKGAGKVTKAAQKAAKK

SEQ ID NO: 27543 - DNA, 1377 bp, Ashbya gossypii
  CDS (1)..(1377)
atgggtaaggaaaagactcacgttaacgttgtcgtcatcggtcacgtcgactctggtaagtctactaccaccggtcacttgatctacaagtgtggtggtattgacaagagaaccatcgagaagttcgagaaggaggctgccgagttgggtaagggttctttcaagtacgcctgggttttggacaaattgaaggctgagagagagagaggtatcaccatcgacattgcgttgtggaagttcgagactccaaagtaccacgtcactgtcattgacgccccaggccacagagacttcatcaagaacatgattaccggtacttctcaagctgactgtgccatcttgatcattgctggtggtgtcggtgagttcgaggctggtatctccaaggacggtcagaccagagagcacgctttgttggcttacaccttgggtgtcaagcagttgatcgttgccatcaacaagatggactccgtcaagtgggacgagtccagataccaggagattgtcaaggagacctccaacttcatcaagaaggtcggttacaaccctaagactgttccattcgttccaatctccggctggaacggtgacaacatgattgaggccaccaccaacgccccatggtacaagggctgggagaaggagaccaaggctggtgccgtcaagggtaagaccttgttggaggccattgacgccattgagccacctgtcagaccaactgacaaggcattgagattgccattgcaggatgtctacaagatcggtggtattggtacggttccagtcggcagagtcgagaccggtgtcatcaagccaggtatggttgttaccttcgccccatccggtgtcaccactgaagtcaagtccgtcgagatgcaccacgagcaattggaggagggtgtcccaggtgacaacgttggtttcaacgtcaagaacgtctccgtcaaggagatcagaagaggtaacgtttgcggtgactccaagaacgacccaccaaaggctgctgagtccttcaacgctaccgtcattgtcttgaaccacccaggtcaaatctctgccggttactctccagtcttggactgtcacactgcccacattgcttgtaagttcgacgagttgttggagaagaacgacagaagaaccggtaagaagttggaagactctccaaagttcctaaaggccggtgacgctgccatggtcaagtttgtcccatccaagccaatgtgtgttgaggctttcaccgactacccaccattgggtagattcgctgtcagagacatgagacagaccgttgctgtcggtgtcatcaagtctgttgtcaagtccgacaaggctggtaaggtcaccaaggccgcccaaaaggctggtaagaaatag

SEQ ID NO: 27544 - protein, 458 aa, Ashbya gossypii
MGKEKTHVNVVVIGHVDSGKSTTTGHLIYKCGGIDKRTIEKFEKEAAELGKGSFKYAWVLDKLKAERERGITIDIALWKFETPKYHVTVIDAPGHRDFIKNMITGTSQADCAILIIAGGVGEFEAGISKDGQTREHALLAYTLGVKQLIVAINKMDSVKWDESRYQEIVKETSNFIKKVGYNPKTVPFVPISGWNGDNMIEATTNAPWYKGWEKETKAGAVKGKTLLEAIDAIEPPVRPTDKALRLPLQDVYKIGGIGTVPVGRVETGVIKPGMVVTFAPSGVTTEVKSVEMHHEQLEEGVPGDNVGFNVKNVSVKEIRRGNVCGDSKNDPPKAAESFNATVIVLNHPGQISAGYSPVLDCHTAHIACKFDELLEKNDRRTGKKLEDSPKFLKAGDAAMVKFVPSKPMCVEAFTDYPPLGRFAVRDMRQTVAVGVIKSVVKSDKAGKVTKAAQKAGKK

SEQ ID NO: 27545 - DNA, 1383 bp, Aspergillus oryzae
  CDS (1)..(1383)
atgggtaaggaagacaagcagcacatcaacatcgtcgttatcggccacgtcgattccggcaagtccaccaccactggtcacttgatctacaagtgtggtggtatcgaccagcgtaccatcgagaagttcgagaaggaagccgctgagctcggtaagggttccttcaagtacgcctgggttcttgacaagctcaagtccgagcgtgagcgtggtatcaccatcgatatcgccctctggaagttccagacctccaagtatgaggtcaccgtcattgatgcccccggtcaccgtgacttcatcaagaacatgatcactggtacttcccaggctgactgcgctatcctcatcattgcctccggtactggtgaattcgaggctggtatctccaaggatggtcagacccgtgagcacgctctgctcgctttcaccctcggtgtccgtcagctcatcgttgccctcaacaagatggacacctgcaagtggtctcaggatcgttacaacgaaatcgttaaggagacttccaacttcatcaagaaggtcggatacaaccccaagagcgttcctttcgtccccatctccggtttcaacggtgacaacatgattgaggcctccaccaactgcccctggtacaagggctgggagaaggagaccaaggctggcaagtccaccggtaagacccttctcgaggccatcgatgccatcgagccccccgtccgtcccaccgacaagcctctccgtcttcccctccaggatgtctacaagatctctggtatcggtactgtgcccgtcggtcgtgtcgagactggtgtcatcaagcctggtatggtcgttactttcgctcctgccaacgtgaccactgaagtcaagtccgttgaaatgcaccaccagcagctccaggccggtaaccccggtgacaacgttggtttcaacgtcaagaacgtctccgtcaaggaagtccgccgtggtaacgttgccggtgactccaagaacgacccccctgctggctgcgattccttcaacgcccaggtcatcgtccttaaccaccccggtcaggtcggcaacggttacgctcccgtcctggactgccacaccgctcacattgcttgcaagttcgctgagctccttgagaagattgaccgccgtaccggtaaatctgttgaggacaagcccaagttcatcaagtctggtgatgctgccatcgtcaagatgattccctccaagcccatgtgtgtggagtctttcactgacttcccccctcttggtcgtttcgctgtccgtgacatgcgtcaaactgttgccgtcggagttatcaagtcggttgagaagaacactggcggttctggcaaggtcaccaaggccgcccagaaggctggcaagaaataa

SEQ ID NO: 27546 - protein, 460 aa, Aspergillus oryzae
MGKEDKQHINIVVIGHVDSGKSTTTGHLIYKCGGIDQRTIEKFEKEAAELGKGSFKYAWVLDKLKSERERGITIDIALWKFQTSKYEVTVIDAPGHRDFIKNMITGTSQADCAILIIASGTGEFEAGISKDGQTREHALLAFTLGVRQLIVALNKMDTCKWSQDRYNEIVKETSNFIKKVGYNPKSVPFVPISGFNGDNMIEASTNCPWYKGWEKETKAGKSTGKTLLEAIDAIEPPVRPTDKPLRLPLQDVYKISGIGTVPVGRVETGVIKPGMVVTFAPANVTTEVKSVEMHHQQLQAGNPGDNVGFNVKNVSVKEVRRGNVAGDSKNDPPAGCDSFNAQVIVLNHPGQVGNGYAPVLDCHTAHIACKFAELLEKIDRRTGKSVEDKPKFIKSGDAAIVKMIPSKPMCVESFTDFPPLGRFAVRDMRQTVAVGVIKSVEKNTGGSGKVTKAAQKAGKK

SEQ ID NO: 27547 - DNA, 1380 bp, Aureobasidium pullulans
  CDS (1)..(1380)
atgggtaaggaaaagtcccacatcaacgtcgtcgttatcggccacgtcgactccggtaagtcgaccaccaccggtcacttgatctacaagtgcggtggtatcgacaagcgtaccatcgagaagttcgagaaggaagccgccgaactcggcaagggttccttcaagtacgcctgggtcctcgacaagctgaagtctgagcgtgagcgtggtatcactatcgatatcgctctgtggaagttcgagacccccaagtacatggtcaccgtcatcgatgcccccggtcaccgtgatttcatcaagaacatgatcactggtacctcccaggctgactgcgccattctcatcattgccgccggtactggtgagttcgaggctggtatctccaaggatggccagactcgtgagcacgcccttctcgcctacacccttggtgtcaagcagctcatcgtcgctatcaacaagatggacaccaccaagtggtctgaggcccgttaccaggagatcatcaaggagacctccggtttcatcaagaaggtcggctacaaccccaagcacgttccctttgtccccatctcgggtttcaacggtgacaacatgattgaggtttcttccaactgcccctggtacaagggttgggagaaggagaccaaggccaaggccactggtaagactctcctcgaggccattgacgccatcgaccctccttcgcgccccaccgacaagcccctccgtcttcccctccaggatgtctacaagatcggtggtattggcacggtgcccgtcggccgtgtcgagaccggtaccatcaagggtggtatggtcgtcaccttcgcccccgctggtgtcaccactgaggtcaagtccgtcgagatgcaccacgagcagctctccgagggtctccccggtgacaacgtcggcttcaacgtcaagaacgtctccgtcaaggagatccgtcgtggtaacgttgccggtgactccaagaacgacccccccaagggttgcgactccttcaacgcccaggtcatcgtcctcaaccaccccggtcaggtcggtgctggttacgcacccgtcctcgattgccacactgcccacatcgcctgcaagttctccgagcttgttgagaagattgaccgccgtaccggcaagtccgttgaggccgcccccaagttcatcaagtctggtgacgccgccatcgtcaagatggttccctccaagcctatgtgtgttgaggccttcactgactaccctcctctcggtcgtttcgccgtccgtgacatgagacagaccgtcgctgtcggtgtcatcaagtccgtcgccaagtccgacaagcagggtgccggtaaggttaccaaggccgctgtcaaggctggcaagaagtaa

SEQ ID NO: 27548 - protein, 459 aa, Aureobasidium pullulans
MGKEKSHINVVVIGHVDSGKSTTTGHLIYKCGGIDKRTIEKFEKEAAELGKGSFKYAWVLDKLKSERERGITIDIALWKFETPKYMVTVIDAPGHRDFIKNMITGTSQADCAILIIAAGTGEFEAGISKDGQTREHALLAYTLGVKQLIVAINKMDTTKWSEARYQEIIKETSGFIKKVGYNPKHVPFVPISGFNGDNMIEVSSNCPWYKGWEKETKAKATGKTLLEAIDAIDPPSRPTDKPLRLPLQDVYKIGGIGTVPVGRVETGTIKGGMVVTFAPAGVTTEVKSVEMHHEQLSEGLPGDNVGFNVKNVSVKEIRRGNVAGDSKNDPPKGCDSFNAQVIVLNHPGQVGAGYAPVLDCHTAHIACKFSELVEKIDRRTGKSVEAAPKFIKSGDAAIVKMVPSKPMCVEAFTDYPPLGRFAVRDMRQTVAVGVIKSVAKSDKQGAGKVTKAAVKAGKK

SEQ ID NO: 27549 - DNA, 1392 bp, Bombyx mori
  CDS (1)..(1392)
atgggcaaggaaaagactcacattaacattgtcgtcatcggacacgtcgactccggcaagtccaccaccactggtcacttgatctacaaatgtggtggtattgacaaacgtaccatcgagaagttcgagaaggaggcccaggaaatgggtaaaggatccttcaaatatgcttgggtattggacaaactaaaggctgagcgtgagcgtggtatcacaatcgatattgctctctggaagttcgaaactagcaagtactatgttaccatcattgatgctcctggacacagagatttcatcaagaacatgatcacaggaacctctcaggctgattgcgctgtgctcatcgtagctgccggtaccggtgaattcgaagctggtatctctaagaacggtcaaacccgtgagcatgccttgctcgctttcaccctcggtgtcaaacagctcatcgtaggagtaaacaaaatggattccactgaaccaccatacagtgagcccagatttgaggaaatcaagaaggaagtatcctcatacatcaagaagattggctacaacccagctgctgtcgctttcgtgcccatttctggatggcacggagacaacatgttggagccttcaaccaaaatgccttggttcaagggatggcaggtggagcgtaaggaaggcaaagctgacggaaaatccctcattgaagctctcgatgccatcctgccacctgcccgccccactgacaagcccctgcgtcttcccctgcaagacgtatacaaaatcggtggtattggtaccgtgcccgtcggcagagttgaaactggtgtgttgaaaccaggtaccattgttgtctttgcccccgccaacatcactactgaagtcaagtctgtggagatgcaccacgaagctctccaagaagctgtacctggagacaatgtaggtttcaacgtaaagaacgtgtccgtcaaggaattgcgtcgtggttatgttgctggtgactccaaaaacaacccacctaagggtgctgcagattttacagctcaagtcattgtgcttaaccatcctggtcaaatctcaaacggttacacaccagtcttggattgccacactgcccacattgcctgcaaatttgcagaaatcaaagaaaaagttgaccgtcgtactggtaaatctactgaagtcaacccaaaatccatcaagtctggagatgcagccattgtcaacttggtaccttccaagcctctatgtgtagagtccttccaggaattcccacccctcggtcgttttgctgtccgtgacatgaggcagacagttgctgtcggagtcatcaaggctgtcaacttcaaggaggctggtggtggcaaggtcactaaagctgccgaaaaggccaccaagggcaagaagtag

SEQ ID NO: 27550 - protein, 463 aa, Bombyx mori
MGKEKTHINIVVIGHVDSGKSTTTGHLIYKCGGIDKRTIEKFEKEAQEMGKGSFKYAWVLDKLKAERERGITIDIALWKFETSKYYVTIIDAPGHRDFIKNMITGTSQADCAVLIVAAGTGEFEAGISKNGQTREHALLAFTLGVKQLIVGVNKMDSTEPPYSEPRFEEIKKEVSSYIKKIGYNPAAVAFVPISGWHGDNMLEPSTKMPWFKGWQVERKEGKADGKSLIEALDAILPPARPTDKPLRLPLQDVYKIGGIGTVPVGRVETGVLKPGTIVVFAPANITTEVKSVEMHHEALQEAVPGDNVGFNVKNVSVKELRRGYVAGDSKNNPPKGAADFTAQVIVLNHPGQISNGYTPVLDCHTAHIACKFAEIKEKVDRRTGKSTEVNPKSIKSGDAAIVNLVPSKPLCVESFQEFPPLGRFAVRDMRQTVAVGVIKAVNFKEAGGGKVTKAAEKATKGKK

SEQ ID NO: 27551 - DNA, 1377 bp, Candida albicans
  CDS (1)..(1377): transl_table=12
atgggtaaagaaaaaactcacgttaacgttgttgttattggtcacgtcgattccggtaaatctactaccaccggtcacttaatttacaagtgtggtggtatcgataaaagaaccattgaaaaattcgaaaaagaagctgctgaattgggtaaaggttctttcaaatacgcttgggtcttggacaaattgaaggctgaaagagaaagaggtatcaccattgatattgctttgtggaaattcgaaactccaaaataccacgttaccgtcattgatgctccaggtcacagagatttcatcaagaatatgatcactggtacttctcaagctgattgtgctattttgattattgctggtggtactggtgaattcgaagccggtatttctaaggatggtcaaaccagagaacacgctttgttggcttacactttgggtgtcaaacaattgattgttgctgtcaacaagatggactctgtcaaatgggacaaaaacagatttgaagaaatcatcaaggaaacctccaacttcgtcaagaaggttggttacaacccaaagactgttccattcgttccaatctctggttggaatggtgacaacatgattgaaccatccaccaactgtccatggtacaagggttgggaaaaggaaaccaaatccggtaaagttactggtaagaccttgttagaagctattgacgctattgaaccaccaaccagaccaaccgacaaaccattgagattgccattgcaagatgtttacaagattggtggtattggtactgtgccagtcggtagagttgaaactggtatcatcaaagccggtatggttgttactttcgccccagctggtgttaccactgaagtcaagtccgttgaaatgcatcacgaacaattggctgaaggtgttccaggtgacaatgttggtttcaacgttaagaacgtttccgttaaagaaattagaagaggtaacgtttgtggtgactccaagaacgatccaccaaagggttgtgactctttcaatgcccaagtcattgttttgaaccatccaggtcaaatctctgctggttactctccagtcttggattgtcacactgcccacattgcttgtaaattcgacactttggttgaaaagattgacagaagaactggtaagaaattggaagaaaatccaaaattcgtcaaatccggtgatgctgctatcgtcaagatggtcccaaccaaaccaatgtgtgttgaagctttcactgactacccaccattaggtagattcgctgtcagagatatgagacaaaccgttgctgttggtgtcatcaaatctgttgaaaaatccgacaaagctggtaaagttaccaaggctgctcaaaaagctgctaagaaataa

SEQ ID NO: 27552 - protein, 458 aa, Candida albicans
MGKEKTHVNVVVIGHVDSGKSTTTGHLIYKCGGIDKRTIEKFEKEAAELGKGSFKYAWVLDKLKAERERGITIDIALWKFETPKYHVTVIDAPGHRDFIKNMITGTSQADCAILIIAGGTGEFEAGISKDGQTREHALLAYTLGVKQLIVAVNKMDSVKWDKNRFEEIIKETSNFVKKVGYNPKTVPFVPISGWNGDNMIEPSTNCPWYKGWEKETKSGKVTGKTLLEAIDAIEPPTRPTDKPLRLPLQDVYKIGGIGTVPVGRVETGIIKAGMVVTFAPAGVTTEVKSVEMHHEQLAEGVPGDNVGFNVKNVSVKEIRRGNVCGDSKNDPPKGCDSFNAQVIVLNHPGQISAGYSPVLDCHTAHIACKFDTLVEKIDRRTGKKLEENPKFVKSGDAAIVKMVPTKPMCVEAFTDYPPLGRFAVRDMRQTVAVGVIKSVEKSDKAGKVTKAAQKAAKK

SEQ ID NO: 27553 - DNA, 1383 bp, Coccidioides immitis
  CDS (1)..(1383)
atgggtaaggaagagaagacacacatcaacttggtcgtcatcggccacgtcgactccggcaagtcgaccaccaccggtcacttgatctacaagtgcggtggtattgacaaccgtaccattgaaaagttcgagaaggaagccgaagagttgggcaagaagtccttcaaatatgcctgggttcttgacaaactaaaggccgagcgtgagcgtggtatcaccatcgatatcgccctctggaagttcgagacccccaagtaccacgtcactgtcatcgatgcccctggccatcgtgacttcatcaagaacatgattactggtacctcccaggctgattgcgctatccttatcattgctgccggtactggtgagttcgaagctggtatctccaaggatggccagacccgtgagcacgctctgcttgccttcactctcggtgtgaagcagctcatcgtcgctatcaacaagatggacagcaccaactggtccgagcctcgtttcaacgaaatcgtcaaggaagtctccaacttcatcaagaaggtcggatacaaccccaaggctgttccattcgtccccatctctggtttcgaaggtgacaacatgattcaaccctccaccaacgctccttggtacaagggctggaacaaggagaccgcctctggcaagcactctggcaagaccctcctcgacgccattgatgccatcgaccccccaacccgccccaccgagaagcccctccgtctcccacttcaggatgtgtacaagatctctggtatcggaacagtcccagtcggccgtgtcgaaaccggtgttatcaagcctggtatggttgtgaccttcgctccttccaacgtcaccactgaagtcaagtccgtcgaaatgcaccaccagcagctcacccagggtaaccctggtgacaacgttggcttcaacgtcaagaacgtctctgtcaaggaagtccgccgcggtaacgtcgctggtgactccaagaacgacccaccaaagggctgcgactccttcaacgcccaggtcatcgtcctcaaccaccctggtcaagtcggtgctggttatgccccagtccttgactgccacactgcccacattgcttgcaagttctccgagctcctcgagaagatcgaccgccgtaccggtaaatccgttgagaacaaccccaagttcatcaagtctggtgatgccgctatcgtcaagatggttccatccaagcccatgtgcgttgaggctttcactgactacccacctctcggtcgtttcgccgtccgtgacatgagacagactgtcgctgtcggtgtcatcaagtccgttgagaagtctgagaagactggtggcaaggtcaccaaggctgctcagaaggctgctaagaaataa

SEQ ID NO: 27554 - protein, 460 aa, Coccidioides immitis
MGKEEKTHINLVVIGHVDSGKSTTTGHLIYKCGGIDNRTIEKFEKEAEELGKKSFKYAWVLDKLKAERERGITIDIALWKFETPKYHVTVIDAPGHRDFIKNMITGTSQADCAILIIAAGTGEFEAGISKDGQTREHALLAFTLGVKQLIVAINKMDSTNWSEPRFNEIVKEVSNFIKKVGYNPKAVPFVPISGFEGDNMIQPSTNAPWYKGWNKETASGKHSGKTLLDAIDAIDPPTRPTEKPLRLPLQDVYKISGIGTVPVGRVETGVIKPGMVVTFAPSNVTTEVKSVEMHHQQLTQGNPGDNVGFNVKNVSVKEVRRGNVAGDSKNDPPKGCDSFNAQVIVLNHPGQVGAGYAPVLDCHTAHIACKFSELLEKIDRRTGKSVENNPKFIKSGDAAIVKMVPSKPMCVEAFTDYPPLGRFAVRDMRQTVAVGVIKSVEKSEKTGGKVTKAAQKAAKK

SEQ ID NO: 27555 - DNA, 1380 bp, Cryptococcus neoformans
  CDS (1)..(1380)
atgggtaaggacaagctgcacgtcaacgtcgttgttatcggtcacgtcgactccggtaagtcgaccaccaccggtcacttgatctacaagtgcggtggtatcgacaagcgaaccattgagaagttcgagaaggaggctcaagagctcggaaagtcttctttcaagtacgcttgggttcttgacaagcttaaggccgagcgagagcgaggtatcaccatcgacattgctctttggaagttcgagacccccaggtaccaggtcaccgtcattgacgcccccggtcaccgagacttcatcaagaacatgatcaccggtacctcccaggctgactgtgccatcctcatcattgccaccggtatcggtgagttcgaggccggtatctccaaggacggtcagacccgagagcacgccctcctcgccttcaccctcggtgtcaggcagctcattgttgcttgcaacaagatggacacctgcaagtggtccgaggaccgattcaacgaaatcgtcaaggagaccaacggtttcatcaagaaggttggttacaaccccaaggctgtccccttcgtccccatctctggttggcacggtgacaacatgttggaggagaccaccaacatgccctggtacaagggatggaccaaggagaccaagtctggtgtttccaagggtaagaccctcctcgaggccatcgacgccatcgagccccctacccgacccaccgacaagcccctccgtctccctctccaggacgtctacaagatcggtggtatcggcacagtccctgtcggccgagtcgagaccggtgtcatcaaggccggtatggtcgtcaagttcgcccccaccaacgtcaccactgaagtcaagtccgttgagatgcaccacgagcagatccccgagggtcttcccggagacaacgttggtttcaacgtcaagaacgtttccatcaaggacatccgacgaggtaacgtctgtggtgactccaagaacgacccccctatggaggctgcttctttcaacgcccaggttatcgtccttaaccaccctggtcagatcggtgccggttacacccccgttctcgactgtcacactgcccacattgcctgcaagtttgctgagttgatcgagaagattgaccgacgaaccggtaaggtcatggaggccgcccccaagttcgtcaagtctggtgacgccgccattgtcaagcttgttgcccagaagcccctctgtgttgagacctacgccgactacccccctcttggtcgattcgccgtccgagacatgcgacagaccgttgccgttggtgttatcaagagcgtggacaagaccgagaagggtggcaaggtcaccaaggctgctgagaaggctgccaagaagaagtaa

SEQ ID NO: 27556 - protein, 459 aa, Cryptococcus neoformans
MGKDKLHVNVVVIGHVDSGKSTTTGHLIYKCGGIDKRTIEKFEKEAQELGKSSFKYAWVLDKLKAERERGITIDIALWKFETPRYQVTVIDAPGHRDFIKNMITGTSQADCAILIIATGIGEFEAGISKDGQTREHALLAFTLGVRQLIVACNKMDTCKWSEDRFNEIVKETNGFIKKVGYNPKAVPFVPISGWHGDNMLEETTNMPWYKGWTKETKSGVSKGKTLLEAIDAIEPPTRPTDKPLRLPLQDVYKIGGIGTVPVGRVETGVIKAGMVVKFAPTNVTTEVKSVEMHHEQIPEGLPGDNVGFNVKNVSIKDIRRGNVCGDSKNDPPMEAASFNAQVIVLNHPGQIGAGYTPVLDCHTAHIACKFAELIEKIDRRTGKVMEAAPKFVKSGDAAIVKLVAQKPLCVETYADYPPLGRFAVRDMRQTVAVGVIKSVDKTEKGGKVTKAAEKAAKKK

SEQ ID NO: 27557 - DNA, 1344 bp, Zea mays
  CDS (1)..(1344)
atgggtaaggagaagactcacatcaacattgtggtcattggccatgtcgactctggcaagtcgaccaccactggccacctgatctacaagcttggaggtattgacaagcgagtgattgagaggttcgagaaagaggctgccgagatgaacaagcggtcattcaagtatgcgtgggtgcttgacaagctcaaggctgagcgtgagagaggtattacaattgatattgccctgtggaagttcgagaccaccaagtactactgcactgttattgatgccccgggacaccgtgacttcatcaagaatatgatcactggcacttcccaagctgactgtgctgttcttatcattgactcaaccactggtggttttgaggctggtatctccaaggatggccagacccgtgagcatgctctccttgctttcacacttggtgtgaagcagatgatttgctgctgcaacaagatggatgctactacacccaagtattcaaaggcccgttatgatgagattgtgaaggaagtctcttcctacctgaagaaggttggatacaaccctgataagatccacttcgttccaatctctggttttgaaggtgacaacatgattgagaggtccaccaaccttgactggtacaagggcccaaccctacttgaggctctggacttgatcaatgagccaaagaggccttcagacaagcccctgcgtctcccccttcaggatgtgtacaagattggtggtattggaactgtccctgttggacgtgttgagactggtgtcattaagcctggtatggttgttacttttgggcctactggtcttactactgaggttaagtccgttgagatgcaccatgaggctctccaggaggcccttcccggtgacaatgttggcttcaacgtgaagaatgttgctgtgaaggatctgaagcgtgggtatgtggcctccggctccaaggatgaccctgccaaggaggctgctagctttacctcccaggtcatcatcatgaaccaccctggccagattggcaatggctatgccccagttctggactgccacacctcacacattgctgtcaagtttgctgagctcgttaccaagattgataggcgatccggcaaggagctggagaaggagcccaaatttctcaagaacggtgatgctggtatggtgaagatggttcccactaagcccatggtggtggagaccttttctcagtatcctcctcttggtcgatttgctgtccgtgacatgaggcaaacggtggctgtcggagtcatcaagagtgtggagaagaaggacccaactggagccaaggtgacgaaggctgctgccaagaagaaatga

SEQ ID NO: 27558 - protein, 447 aa, Zea mays
MGKEKTHINIVVIGHVDSGKSTTTGHLIYKLGGIDKRVIERFEKEAAEMNKRSFKYAWVLDKLKAERERGITIDIALWKFETTKYYCTVIDAPGHRDFIKNMITGTSQADCAVLIIDSTTGGFEAGISKDGQTREHALLAFTLGVKQMICCCNKMDATTPKYSKARYDEIVKEVSSYLKKVGYNPDKIHFVPISGFEGDNMIERSTNLDWYKGPTLLEALDLINEPKRPSDKPLRLPLQDVYKIGGIGTVPVGRVETGVIKPGMVVTFGPTGLTTEVKSVEMHHEALQEALPGDNVGFNVKNVAVKDLKRGYVASGSKDDPAKEAASFTSQVIIMNHPGQIGNGYAPVLDCHTSHIAVKFAELVTKIDRRSGKELEKEPKFLKNGDAGMVKMVPTKPMVVETFSQYPPLGRFAVRDMRQTVAVGVIKSVEKKDPTGAKVTKAAAKKK

SEQ ID NO: 27559 - DNA, 1350 bp, Manihot esculenta
  CDS (1)..(1350)
atgggtaaggagaaggttcacatcaacatcgtggtcattggccatgtcgactctggcaagtccaccaccactggccatctcatctacaagcttggaggtattgacaagcgtgtgattgagaggtttgagaaggaagctgctgagatgaacaagaggtcattcaagtatgcctgggtgcttgacaagctcaaggccgagcgtgaacgtggtatcaccattgatattgccttatggaagtttgagaccaccaagtactattgcactgtcattgatgctcctgggcatcgtgactttattaagaatatgattactggtacctcacaggctgactgtgctgtccttattattgattccaccactggtggttttgaagccggtatttccaaggacggtcaaacccgtgagcacgcccttcttgcttttacccttggtgtcaaacaaatgatttgctgctgtaacaagatggatgccaccacccccaagtactccaaggctaggtacgatgaaattgtcaaggaagtctcctcctacctcaagaaggttggatacaacccggataagattccttttgttcccatctctgggtttgaaggtgacaatatgattgagagatcaaccaacctcgattggtacaagggcccaactcttcttgaagctctggaccagatccaggagcccaagaggccctcagacaagcctctccgtctcccacttcaggatgtttacaagattggtggtattggaactgtgccagtgggtcgtgtggaaactggtatcctgaagcctggaatggttgtgaccttcggacctactggtctgacgactgaagttaagtctgttgagatgcatcatgaggctctccaggaggccctccctggtgacaatgttgggttcaacgtgaagaacgttgcagtgaaagatctgaagagaggaattgttgcatcaaactctaaggatgatcctgccaaggaagctgccaactttacatcgcaggtcatcatcatgaaccaccctggtcagattggaaatggttatgccccagtgctggattgccacacctcccacattgctgtgaagtttgctgaaatcttgaccaagattgatcgtaggtctggcaaagagcttgagaaggagcccaagtttttgaaaaatggtgatgctgggttcgtgaagatgattccgaccaagcccatggttgtggagactttctctgcgtaccctccactgggtagattcgctgttagggacatgcgccagacggttgctgttggtgtgatcaagagtgttgagaagaaagacccaagtggagctaaagtcaccaagtctgctgccaagaagggagggaaatga

SEQ ID NO: 27560 - protein, 449 aa, Manihot esculenta
MGKEKVHINIVVIGHVDSGKSTTTGHLIYKLGGIDKRVIERFEKEAAEMNKRSFKYAWVLDKLKAERERGITIDIALWKFETTKYYCTVIDAPGHRDFIKNMITGTSQADCAVLIIDSTTGGFEAGISKDGQTREHALLAFTLGVKQMICCCNKMDATTPKYSKARYDEIVKEVSSYLKKVGYNPDKIPFVPISGFEGDNMIERSTNLDWYKGPTLLEALDQIQEPKRPSDKPLRLPLQDVYKIGGIGTVPVGRVETGILKPGMVVTFGPTGLTTEVKSVEMHHEALQEALPGDNVGFNVKNVAVKDLKRGIVASNSKDDPAKEAANFTSQVIIMNHPGQIGNGYAPVLDCHTSHIAVKFAEILTKIDRRSGKELEKEPKFLKNGDAGFVKMIPTKPMVVETFSAYPPLGRFAVRDMRQTVAVGVIKSVEKKDPSGAKVTKSAAKKGGK

SEQ ID NO: 27561 - DNA, 1383 bp, Neurospora crassa
  CDS (1)..(1383)
atgggcaaggaggacaagactcacatcaacgtcgtcgttatcggccacgtcgattccggcaagtctaccactaccggtcacttgatctacaagtgcggtggtatcgacaagcgtaccatcgagaagttcgagaaggaagccgctgagctcggtaagggttccttcaagtatgcctgggttcttgacaagctcaaggccgagcgtgagcgtggtatcaccatcgatatcgccctctggaagttcgagactcccaagtactacgtcaccgtcatcgatgcccccggtcatcgtgatttcatcaagaacatgatcactggtacctcccaggctgattgcgctatcctcatcattgccgccggtactggtgagttcgaggctggtatctccaaggatggccagacccgtgagcacgctctgctcgcctacaccctcggtgtcaagcagctcattgttgccatcaacaagatggacaccacccagtggtcccagactcgtttcgaggagatcatcaaggagaccaagaacttcatcaagaaggttggctacaaccccgctggtgtcgctttcgtccccatctccggcttcaacggcgacaacatgcttgagccctccaccaactgcccctggtacaagggttgggagaaggagaccaaggccggcaaggccactggcaagaccctcctcgaggccatcgacgccattgagccccccaagcgtcctaccgacaagcccctccgtcttcccctccaggatgtctacaagatcggtggtatcggcacagtgcccgtcggccgtatcgagactggtgtcctcaagcccggtatggtcgttaccttcgctccttccaacgtcaccactgaagtcaagtccgtcgagatgcaccacgagcagcttgctcagggtgtccccggtgacaacgtcggcttcaacgtgaagaacgtttccgtcaaggatatccgccgtggtaacgttgccggtgactccaagaacgacccccctgctggcgccgcctctttcaccgcccaggtcatcgttctcaaccaccccggtcaggtcggtgccggctacgcccccgtcctcgactgccacactgcccacattgcctgcaagttcgccgagctcctcgagaagatcgaccgccgtactggtaaggctgttgaggcctcccccaagttcatcaagtctggtgatgctgccatcgtcaagatgattccctccaagcccatgtgcgttgaggctttcaccgactaccctcccctcggccgtttcgccgtccgtgacatgcgtcagaccgtcgccgtcggtgtcatcaaggccgtcgacaagtccaccgctgccgctggcaaggtcaccaagtccgctgccaaggccgccaagaagtaa

SEQ ID NO: 27562 - protein, 460 aa, Neurospora crassa
MGKEDKTHINVVVIGHVDSGKSTTTGHLIYKCGGIDKRTIEKFEKEAAELGKGSFKYAWVLDKLKAERERGITIDIALWKFETPKYYVTVIDAPGHRDFIKNMITGTSQADCAILIIAAGTGEFEAGISKDGQTREHALLAYTLGVKQLIVAINKMDTTQWSQTRFEEIIKETKNFIKKVGYNPAGVAFVPISGFNGDNMLEPSTNCPWYKGWEKETKAGKATGKTLLEAIDAIEPPKRPTDKPLRLPLQDVYKIGGIGTVPVGRIETGVLKPGMVVTFAPSNVTTEVKSVEMHHEQLAQGVPGDNVGFNVKNVSVKDIRRGNVAGDSKNDPPAGAASFTAQVIVLNHPGQVGAGYAPVLDCHTAHIACKFAELLEKIDRRTGKAVEASPKFIKSGDAAIVKMIPSKPMCVEAFTDYPPLGRFAVRDMRQTVAVGVIKAVDKSTAAAGKVTKSAAKAAKK

SEQ ID NO: 27563 - DNA, 1344 bp, Pisum sativum
  CDS (1)..(1344)
atgggtaaggaaaaggttcacattaacattgttgtcattggacatgtcgactctggaaaatcaaccacgactgtccatgtcatctacaagcttggaggtattgacaagcgtgtgatcgagaggtttgagaaggaagctgatgaaatgaacaagcgttcattcaagtatgcctggttgcttgacaagcttaaggccgagcgtgaaagaggaattaccattgatattgccttgttgaaatttgaaaccaccaagtactactccactgtcatggatgcacctggacatcgtgactttatcaagaacatgattactggaacctcccaggctgattgtgctgtccttattattgattccaccactggtggttttgaagccggtatctctaaggatgggcagacccgtgaacatgcactacttgcctttactcttggagtgaagcagatgatttgttgttgtaacaagatggatgctaccacccctaagtactccaagggcaggtatgaggaaatcgtgaaggaagtttcttcctacttgaaagaggttggttacaacccagacaaaattcccttcgttcccatctctggttttgagggagacaacatgattgagaggtccaccaaccttgactggtacaagggaccaactctacttgatgctcttgacaacatcaatgagccaaagagaccctcagacaagcccctcaggcttccattgcaagatgtttacaagattggtggtattggaactgtgccagtgggacgtgttgaaactggtgttgtgaagcccggtatgcttgtaacttttgctcctactggtttgacaactgaggttaagtccgttgagatgcaccacgaggctctcaccgaggctcttccaggagacaatgttcgattcaatgttaagaatgttgcagtcaaggatctcaagcatggtttggttgcttccaactccaaggatgaccctgccaaggatgctgccaacttcacgtcccaggtcatcatcatgaaccaccctggacagattggaaatggttatgcaccagttcttgattgccacacctctcacattgctgtcaagtttgctgagcttatcaccaagattgacaggcgatctggtaaggagattgagaaggagcccaagtttttgaagaatggtgatgccggtatggttaagatgattccaaccaagcccatggtggtggaaacttttgctgagtatcctcctcttggtcgttttgctgtgagggacatgagacaaactgttgctgtcggagtcatcaagagtgtggagaagaaggacccaactggagccaaggtcaccaaagcagcagccaagaagaagtga

SEQ ID NO: 27564 - protein, 447 aa, Pisum sativum
MGKEKVHINIVVIGHVDSGKSTTTVHVIYKLGGIDKRVIERFEKEADEMNKRSFKYAWLLDKLKAERERGITIDIALLKFETTKYYSTVMDAPGHRDFIKNMITGTSQADCAVLIIDSTTGGFEAGISKDGQTREHALLAFTLGVKQMICCCNKMDATTPKYSKGRYEEIVKEVSSYLKEVGYNPDKIPFVPISGFEGDNMIERSTNLDWYKGPTLLDALDNINEPKRPSDKPLRLPLQDVYKIGGIGTVPVGRVETGVVKPGMLVTFAPTGLTTEVKSVEMHHEALTEALPGDNVRFNVKNVAVKDLKHGLVASNSKDDPAKDAANFTSQVIIMNHPGQIGNGYAPVLDCHTSHIAVKFAELITKIDRRSGKEIEKEPKFLKNGDAGMVKMIPTKPMVVETFAEYPPLGRFAVRDMRQTVAVGVIKSVEKKDPTGAKVTKAAAKKK

SEQ ID NO: 27565 - DNA, 1389 bp, Piriformospora indica
  CDS (1)..(1389)
atgggtaaagaaaaggctcacgttaacgtcgtcgtcatcggccacgtcgattccggaaagtcgaccaccactggccatctgatctacaagtgcggtggcattgacaagcgaacgattgaaaagttcgagaaggaagctgccgagcttggaaagggctcgttcaagtatgcttgggtgctcgacaagctcaaggccgagcgtgagcgtggtatcaccatcgatatcgctctctggaagtccgagacccccaaatacatggtcactgtcattgatgcccccggccaccgtgactttatcaagaacatgattaccggtacctcgcaggctgattgcgctatcctcatcatcgccggtggtaccggtgagttcgaggctggtatctccaaggatggccagactcgtgagcatgctttgctcgcctttaccctcggtgtccgacagctcatcgtcgctgtcaacaagatggacaccaccaactggtctgaggcccgcttcaacgaaatcgtcaaggaaacctccaacttcatcaagaaggtcggatacaaccccaagacggtcgccttcgtccccatctctggctggcacggtgacaacatgctcgagccctccaccaacatgccctggtacaagggatggtcgaaggaggtcaagggctcgtcgagtcctgccaccggcaagaccctcgtcgacgccatcgacgccatcgaacccccagtccgcccgtccgacaagcccctccgtctcccactccaggatgtgtacaagattggtggtattggtacggtcccagtcggtcgtgtcgaaactggtatcatcaagcccggcatggtcgtctcctttgctccctcgaacgtcaccactgaagtcaagtccgtcgaaatgcaccacgagcagctcgctgagggcttgcccggagacaacgtcggcttcaacgtcaagaacgtgtcggtcaaggatatccgccgtggagacgtcgcttcggactcgaagaacgaccccgccaaggaggctgcatctttcaacgctcaagtcatcgtcttgaaccaccccggtcagattggcgctggttacgccccagtcttggactgccacaccgctcacattgcctgcaagttctccgagctcatcgagaagattgatcgccgaactggcaagaccatggaagccgcccccaagtttgtcaagtctggtgacgctgccattgtcaagctcgtcccgagcaagccaatgtgtgtggagagctacaacgagtacccaccacttggtcgtttcgccgtccgtgacatgaggcagactgttgccgtcggtgtcatcaagtcggttgagaagaccgagggcaagggtggcaaggttacgaagagcgcggaaaaggctgccaagaagaagtaa

SEQ ID NO: 27566 - protein, 462 aa, Piriformospora indica
MGKEKAHVNVVVIGHVDSGKSTTTGHLIYKCGGIDKRTIEKFEKEAAELGKGSFKYAWVLDKLKAERERGITIDIALWKSETPKYMVTVIDAPGHRDFIKNMITGTSQADCAILIIAGGTGEFEAGISKDGQTREHALLAFTLGVRQLIVAVNKMDTTNWSEARFNEIVKETSNFIKKVGYNPKTVAFVPISGWHGDNMLEPSTNMPWYKGWSKEVKGSSSPATGKTLVDAIDAIEPPVRPSDKPLRLPLQDVYKIGGIGTVPVGRVETGIIKPGMVVSFAPSNVTTEVKSVEMHHEQLAEGLPGDNVGFNVKNVSVKDIRRGDVASDSKNDPAKEAASFNAQVIVLNHPGQIGAGYAPVLDCHTAHIACKFSELIEKIDRRTGKTMEAAPKFVKSGDAAIVKLVPSKPMCVESYNEYPPLGRFAVRDMRQTVAVGVIKSVEKTEGKGGKVTKSAEKAAKKK

SEQ ID NO: 27567 - DNA, 1383 bp, Podospora anserina
  CDS (1)..(1383)
atgggcaaggaggacaagactcacatcaacgtcgtcgttatcggccacgtcgattccggcaagtcgaccaccactggtcacttgatctacaagtgcggtggtattgacaagcgtaccatcgagaagttcgagaaggaagctgctgagctcggcaagggctctttcaagtatgcctgggttcttgacaagttgaaggccgagcgtgagcgtggtatcaccatcgatattgccctctggaagttcgagacccccaagtactatgtcaccgtcattgatgcccccggccatcgtgatttcatcaagaacatgattactggtacttcccaggccgattgcgccattctcatcattgccgccggtactggtgagttcgaggctggtatctccaaggatggccagacccgtgagcacgctctcctcgcctacaccctcggtgtgaagcagctcatcgtcgccatcaacaagatggacaccaccaagtggtccgaggcccgcttcaacgagatcatcaaggagacctccaacttcatcaagaaggtcggctacaaccccaagactgttgccttcgtccccatctccggtttcaacggcgacaacatgcttgaggcttccaccaactgcccctggtacaagggctgggagaaggaggtcaagggtggcaaggccaccggcaagaccctccttgaggccatcgactccatcgagccccccaagcgtcccaccgacaagcccctccgtcttcccctccaggatgtctacaagatcggcggtatcggcacagtccctgtcggccgtatcgagactggtatcctcaagcccggtatggtcgttaccttcgctccttccaacgtcaccactgaagtcaagtccgtcgagatgcaccacgagcagctcgctgagggtgttcccggtgacaacgttggtttcaacgtgaagaacgtctccgtcaaggaaatccgccgtggcaacgttgccggtgactccaagaacgacccccccatgggcgccgcctctttcgatgcccaggtcatcgtcctcaaccaccccggccaggtcggtgctggttacgcccccgtcctcgattgccacactgcccacatcgcctgcaagttctctgagctcctgcagaagatcgaccgccgtactggtaaggccgttgaggagagccccaagttcatcaagtctggtgatgctgccatcgtcaagatggttccctccaagcccatgtgcgttgaggctttcactgagtaccctcccctcggtcgtttcgccgtccgtgacatgcgtcagaccgtcgctgtcggtgtcatcaagaaggtcgagaaggccgctgctggttccggcaaggttaccaagtccgctgccaaggctggcaagaaataa

SEQ ID NO: 27568 - protein, 460 aa, Podospora anserina
MGKEDKTHINVVVIGHVDSGKSTTTGHLIYKCGGIDKRTIEKFEKEAAELGKGSFKYAWVLDKLKAERERGITIDIALWKFETPKYYVTVIDAPGHRDFIKNMITGTSQADCAILIIAAGTGEFEAGISKDGQTREHALLAYTLGVKQLIVAINKMDTTKWSEARFNEIIKETSNFIKKVGYNPKTVAFVPISGFNGDNMLEASTNCPWYKGWEKEVKGGKATGKTLLEAIDSIEPPKRPTDKPLRLPLQDVYKIGGIGTVPVGRIETGILKPGMVVTFAPSNVTTEVKSVEMHHEQLAEGVPGDNVGFNVKNVSVKEIRRGNVAGDSKNDPPMGAASFDAQVIVLNHPGQVGAGYAPVLDCHTAHIACKFSELLQKIDRRTGKAVEESPKFIKSGDAAIVKMVPSKPMCVEAFTEYPPLGRFAVRDMRQTVAVGVIKKVEKAAAGSGKVTKSAAKAGKK

SEQ ID NO: 27569 - DNA, 1386 bp, Podospora curvicolla
  CDS (1)..(1386)
atgggcaaggaggacaagactcacatcaacgtcgtcgttatcggccacgtcgattccggcaagtcgaccaccactggtcacttgatctacaagtgcggtggtattgacaagcgtaccatcgagaagttcgagaaggaagctgctgagctcggcaagggctctttcaagtatgcctgggttcttgacaagttgaaggccgagcgtgagcgtggtatcaccattgatatcgccctctggaagttcgagacccccaagtactatgtcaccgtcatcgatgcccccggccatcgtgatttcatcaagaacatgattactggtacttcccaggccgattgcgccattctcatcattgccgccggtactggtgagttcgaggctggtatctccaaggatggccagacccgtgagcacgctctcctcgcctacaccctcggtgtgaagcagctcatcgtcgccatcaacaagatggacaccaccaaatggtccgaggcccgcttcaacgagatcatcaaggagacctccaacttcatcaagaaggtcggctacaaccccaagactgttgccttcgtccccatctccggtttcaacggcgacaacatgcttgaggcttccaccaactgcccctggtacaagggttgggagaaggaggtcaagggtggcaaggctactggcaagaccctcctcgaggccatcgactccatcgagccccccaagcgtcccaccgacaagcccctccgtcttccccttcaggacgtttacaagatcggcggtatcggcacagtccctgtcggccgtatcgagactggtatcctcaagcccggtatggtcgttaccttcgccccttccaacgtcaccactgaagtcaagtccgtcgagatgcaccacgagcagctctctgagggtgtccccggtgacaacgttggtttcaacgtgaagaacgtctccgtcaaggaaatccgccgtggcaacgttgccggtgactccaagaacgacccccctcttggcgccgcttctttcgatgcccaggtcatcgtcctcaaccaccccggccaggtcggtgctggttacgcccccgtcctcgattgccacactgcccacatcgcctgcaagttcgctgagctcctgcagaagatcgatcgccgtactggtaaggctgttgaggagagccctaagttcatcaagtctggtgatgctgccatcgtcaagatgattccctccaagcccatgtgcgttgaggctttcactgagtaccctcccctcggtcgtttcgctgtccgtgacatgcgtcagaccgtcgctgtcggtgtcatcaagaaggtcgagaaggccgctgctggttccggcaaggtcaccaagtccgctgccaaggctggtggcaagaaataa

SEQ ID NO: 27570 - protein, 461 aa, Podospora curvicolla
MGKEDKTHINVVVIGHVDSGKSTTTGHLIYKCGGIDKRTIEKFEKEAAELGKGSFKYAWVLDKLKAERERGITIDIALWKFETPKYYVTVIDAPGHRDFIKNMITGTSQADCAILIIAAGTGEFEAGISKDGQTREHALLAYTLGVKQLIVAINKMDTTKWSEARFNEIIKETSNFIKKVGYNPKTVAFVPISGFNGDNMLEASTNCPWYKGWEKEVKGGKATGKTLLEAIDSIEPPKRPTDKPLRLPLQDVYKIGGIGTVPVGRIETGILKPGMVVTFAPSNVTTEVKSVEMHHEQLSEGVPGDNVGFNVKNVSVKEIRRGNVAGDSKNDPPLGAASFDAQVIVLNHPGQVGAGYAPVLDCHTAHIACKFAELLQKIDRRTGKAVEESPKFIKSGDAAIVKMIPSKPMCVEAFTEYPPLGRFAVRDMRQTVAVGVIKKVEKAAAGSGKVTKSAAKAGGKK

SEQ ID NO: 27571 - DNA, 1392 bp, Puccinia graminis
  CDS (1)..(1392)
atgggtaaagagaaaaaccacgtcaacgtcgtcgtcatcggacatgtcgattctggtaaatccaccaccaccggccacttgatctacaagtgcggtggtattgacaagcgaacgatcgaaaagttcgagaaggaagccgccgaactgggtaaaggatccttcaagtacgcatgggtgcttgacaagctgaaagccgagcgtgagcgtggtatcaccatcgacattgccttgtggaagtttgaaacccccaagtactacgtcaccgtcattgatgcccccggacatcgtgattttatcaaaaacatgatcactggtacctcccaagccgattgtgctatcctcatcatcgccgccggtactggtgaattcgaagctggtatctccaaggatggccagactcgtgaacacgccctcctagccttcacccttggtgtccgacaactcatcgttgccatcaacaagatggacaccaccaaatggtccgagcagaggtttgaaatcgtcaaggaaacctccaactttgtcaagaaggtcgggtacaaccccaaatctatcgcctttgtccccatctcgggatggcacggtgacaacatgttggaggagtccaccaacatgggctggttcaagggatggaccaaggagaccaaggctggtgtttccaaaggaaagaccctcctcgatgctattgatgccatcgaacctccaagccgacccaccgacaagcccctccgacttcctctccaggatgtctacaagattggtggtatcggtacggtacctgttggtcgtgttgaaaccggtaccatcaaagctggtatggttgttaccttcgcccctgccaacgtgacgactgaagtcaagtctgttgagatgcaccacgaacaattggaggctggtatgccaggtgacaatgtcggtttcaacgtcaagaacgtttccgtcaaggatatccgtcgaggaaatgtttgcggtgacaccaaatgtgaccccccgaaggaagccgcatccttcgttgcccaggtcatcgttttgaaccaccccggtcaaatcggaaatggttactgccccgtacttgattgtcacaccgcccacattgcatgcaagttcgacactctccagcagaagatcgaccgacgtactggtaaggctttggaagaggcccccaaattcgtcaaatccggtgacgcttgccttgtcaagatggtcccttccaaggccatgtgtgtcgagcccttcgccgactacccccctctcggtcgtttcgccgtccgtgacatgagacagactgttgccgtcggtgtcatcaagagcgtcgagaagacggatggcaaggccggaaaggtcaccaaggccgccgtcaagccggtgccaagaagtagttacgctcggtag

SEQ ID NO: 27572 - protein, 463 aa, Puccinia graminis
MGKEKNHVNVVVIGHVDSGKSTTTGHLIYKCGGIDKRTIEKFEKEAAELGKGSFKYAWVLDKLKAERERGITIDIALWKFETPKYYVTVIDAPGHRDFIKNMITGTSQADCAILIIAAGTGEFEAGISKDGQTREHALLAFTLGVRQLIVAINKMDTTKWSEQRFEIVKETSNFVKKVGYNPKSIAFVPISGWHGDNMLEESTNMGWFKGWTKETKAGVSKGKTLLDAIDAIEPPSRPTDKPLRLPLQDVYKIGGIGTVPVGRVETGTIKAGMVVTFAPANVTTEVKSVEMHHEQLEAGMPGDNVGFNVKNVSVKDIRRGNVCGDTKCDPPKEAASFVAQVIVLNHPGQIGNGYCPVLDCHTAHIACKFDTLQQKIDRRTGKALEEAPKFVKSGDACLVKMVPSKAMCVEPFADYPPLGRFAVRDMRQTVAVGVIKSVEKTDGKAGKVTKAAVKPVPRSSYAR

SEQ ID NO: 27573 - DNA, 1383 bp, Schizophyllum commune
  CDS (1)..(1383)
atgggaaaggagaagctccacgttaacgtcgtcgtcatcggtcacgtcgactccggcaagtcgaccaccaccggccatctcatctacaagtgcggtggtatcgacaagcgtacgatcgagaagttcgagaaggaggccgctgagcttggcaagggttccttcaagtatgcgtgggtgcttgacaagctcaaggctgagcgtgagcgtggtatcaccattgatatcgccctctggaagttcgagaccccgaagtacatggtcaccgtcatcgacgccccgggtcaccgtgacttcatcaagaacatgatcaccggtacctcccaggctgactgcgctatcctcaccatcgccggtggcactggtgaattcgaggctggtatctccaaggatggccagacccgcgagcacgctctccttgccttcaccctcggtgtccgtcagctcatcgtcgccgtcaacaagatggacacgaccaagtggagcgaggaccgtttcaacgaaatcgtcaaggagacctccaccttcatcaagaaggtcggctacaacccgaagaccgtcgccttcgtcccgatctccggctggcacggcgacaacatgttggaggagtccaccaacatgccgtggtacaagggctggaccaaggagaccaaggctggtgtcgtcaagggcaagaccctcctcgatgccatcgacgccatcgagccccccgttcgtccctccgacaagcccctccgtctccccctccaggacgtctacaagatcggtggtattgggacggtgcccgtcggccgtgtcgagaccggtatcatcaaggccggcatggtcgtcaccttcgccccctccaacgtcaccactgaggtcaagtccgtcgagatgcaccacgagcagctcgctgagggcaagccgggtgacaacgtcgggttcaacgtcaagaacgtctccgtcaaggacattcgccgtggcaacgtcgcgtctgactccaagaacgaccccgcgaaggaggcggcgtccttcaacgcccaggtcatcgttctcaaccaccccggtcagatcggcgctggctacgcacccgttctcgattgccacaccgcgcacattgcctgcaagttcgccgagctgctcgagaagatcgatcgccggacgggtaagtcgctcgaggcgagccccaagttcgtcaagtccggcgacgcctgcatcgtcaagctcgtcccgagcaagccgatgtgcgttgagtcctacaacgagtacccgccccttggtcgtttcgctgtccgcgacatgaggcagacggttgccgtcggcatcatcaagtcggtcgacaagactgacaagtccggtggcaaggtcaccaagtccgccgagaaggccgccaagaagaagtaa

SEQ ID NO: 27574 - protein, 460 aa, Schizophyllum commune
MGKEKLHVNVVVIGHVDSGKSTTTGHLIYKCGGIDKRTIEKFEKEAAELGKGSFKYAWVLDKLKAERERGITIDIALWKFETPKYMVTVIDAPGHRDFIKNMITGTSQADCAILTIAGGTGEFEAGISKDGQTREHALLAFTLGVRQLIVAVNKMDTTKWSEDRFNEIVKETSTFIKKVGYNPKTVAFVPISGWHGDNMLEESTNMPWYKGWTKETKAGVVKGKTLLDAIDAIEPPVRPSDKPLRLPLQDVYKIGGIGTVPVGRVETGIIKAGMVVTFAPSNVTTEVKSVEMHHEQLAEGKPGDNVGFNVKNVSVKDIRRGNVASDSKNDPAKEAASFNAQVIVLNHPGQIGAGYAPVLDCHTAHIACKFAELLEKIDRRTGKSLEASPKFVKSGDACIVKLVPSKPMCVESYNEYPPLGRFAVRDMRQTVAVGIIKSVDKTDKSGGKVTKSAEKAAKKK

SEQ ID NO: 27575 - DNA, 1347 bp, Solanum lycopersicum
  CDS (1)..(1347)
atgggtaaagagaagattcacatcagcattgtggtcattggtcatgttgactctggaaagtcgactaccactggtcacttgatctacaagcttggtggtattgacaagcgtgttattgagaggttcgagaaggaagctgctgagatgaacaagaggtcattcaagtatgcctgggtgcttgacaaacttaaggcagaacgtgagcgtggtatcaccattgatattgctttgtggaagtttgagaccactaagtactactgcactgttattgatgcccccggccacagggatttcatcaagaacatgatcactggtacctctcaggctgactgtgctgttctcattattgactccactactggtggttttgaagctggtatctccaaagatggtcagacccgtgaacatgcattgcttgctttcacccttggtgtcaagcaaatgatctgctgctgtaacaagatggatgctaccacccccaagtactccaaggctaggtatgatgaaatcgtgaaggaagtttcttcctacctcaagaaggttggttacaaccctgacaaaatcccctttgttccaatctctggttttgaaggagacaacatgattgagaggtctaccaacctcgactggtacaagggaccaaccctccttgaggctcttgaccagattaacgagcccaagaggccatcagacaaacccctccgtcttccacttcaggatgtttacaagattggtggtattggaactgtccctgttggtcgcgttgagactggtgtgatcaagcctggtatggttgtgacctttggccctactggtttgacaactgaagtcaagtctgttgagatgcaccacgaagctctccaggaggcactccctggtgacaatgttgggttcaatgttaagaatgttgctgttaaggatcttaagcgtggttatgttgcctcaaactccaaggatgacccagccaagggggcagccagcttcactgcccaggtcatcatcatgaaccatcctggccagattggaaatggatatgctccagtgcttgattgtcacacttcccacattgctgtcaagtttgctgagatcttgaccaagattgacaggcgttcaggtaaggaacttgagaaggagcctaagttcttgaagaacggtgatgctggtatggttaagatgattcccaccaagcccatggttgttgagacctttgctgaataccctccattgggtcgttttgctgtgagggacatgaggcagactgttgctgttggtgttgtcaagaatgttgacaagaaggacccaactggtgccaaggtgaccaaggctgcccagaagaaggggaagtga

SEQ ID NO: 27576 - protein, 448 aa, Solanum lycopersicum
MGKEKIHISIVVIGHVDSGKSTTTGHLIYKLGGIDKRVIERFEKEAAEMNKRSFKYAWVLDKLKAERERGITIDIALWKFETTKYYCTVIDAPGHRDFIKNMITGTSQADCAVLIIDSTTGGFEAGISKDGQTREHALLAFTLGVKQMICCCNKMDATTPKYSKARYDEIVKEVSSYLKKVGYNPDKIPFVPISGFEGDNMIERSTNLDWYKGPTLLEALDQINEPKRPSDKPLRLPLQDVYKIGGIGTVPVGRVETGVIKPGMVVTFGPTGLTTEVKSVEMHHEALQEALPGDNVGFNVKNVAVKDLKRGYVASNSKDDPAKGAASFTAQVIIMNHPGQIGNGYAPVLDCHTSHIAVKFAEILTKIDRRSGKELEKEPKFLKNGDAGMVKMIPTKPMVVETFAEYPPLGRFAVRDMRQTVAVGVVKNVDKKDPTGAKVTKAAQKKGK

SEQ ID NO: 27577 - DNA, 1383 bp, Sordaria macrospora
  CDS (1)..(1383)
atgggtaaggaagacaaggctcacatcaacgtcgtcgttatcggccacgtcgattccggcaagtccaccactaccggtcacctgatctacaagtgcggtggtatcgacaagcgtaccatcgagaagttcgagaaggaagccgctgagctcggcaagggttccttcaagtatgcctgggttcttgacaagctcaaggccgagcgtgagcgtggtatcaccatcgatatcgccctctggaagttcgagactcccaagtactacgtcaccgtcatcgatgcccccggccatcgtgatttcatcaagaacatgatcactggtacctcccaggctgattgcgctattctcatcattgccgctggtactggtgagttcgaggctggtatctccaaggatggccagactcgtgagcacgctcttctcgcctacaccctcggtgtcaagcagctcatcgttgccatcaacaagatggacaccacccagtggtcccaggctcgtttcgaggagatcatcaaggagaccaagaacttcatcaagaaggtcggctacaaccccgccaccgtcgctttcgtccccatctccggcttcaacggcgacaacatgcttgaggcctccaccaactgcccctggtacaagggttgggagaaggagaccaaggccggcaagtccactggcaagaccctcctcgaggccatcgacgccattgagcagcccaagcgcccgaccgacaagcccctccgtcttcccctccaggatgtctacaagatcggcggtatcggcacagtgcccgtcggccgtatcgagactggtgtcctcaagcccggtatggtcgttaccttcgctccttccaacgtcaccactgaagtcaagtccgtcgagatgcaccacgagcagcttgctcagggtgttcccggtgacaacgtcggcttcaacgtgaagaacgtttccgtcaaggatatccgtcgtggtaacgttgccggtgactccaagaacgacccccctgtcggcgctgcctctttcaccgcccaggtcatcgtccttaaccaccccggtcaggtcggtgccggctacgctcccgtcctcgattgccacactgcccacattgcctgcaagttcgccgagctcctcgagaagatcgatcgccgtactggtaaggctgttgagacttctcccaagttcatcaagtctggtgatgctgccatcgtcaagatgattccctccaagcccatgtgcgtcgaggctttcaccgactaccctcccctcggtcgtttcgccgtccgtgacatgcgtcagaccgtcgctgtcggtgtcatcaaggccgtcgacaagacccaggctgtcgctggcaaggtcaccaagtctgctgccaaggctgccaagaagtaa

SEQ ID NO: 27578 - protein, 460 aa, Sordaria macrospora
MGKEDKAHINVVVIGHVDSGKSTTTGHLIYKCGGIDKRTIEKFEKEAAELGKGSFKYAWVLDKLKAERERGITIDIALWKFETPKYYVTVIDAPGHRDFIKNMITGTSQADCAILIIAAGTGEFEAGISKDGQTREHALLAYTLGVKQLIVAINKMDTTQWSQARFEEIIKETKNFIKKVGYNPATVAFVPISGFNGDNMLEASTNCPWYKGWEKETKAGKSTGKTLLEAIDAIEQPKRPTDKPLRLPLQDVYKIGGIGTVPVGRIETGVLKPGMVVTFAPSNVTTEVKSVEMHHEQLAQGVPGDNVGFNVKNVSVKDIRRGNVAGDSKNDPPVGAASFTAQVIVLNHPGQVGAGYAPVLDCHTAHIACKFAELLEKIDRRTGKAVETSPKFIKSGDAAIVKMIPSKPMCVEAFTDYPPLGRFAVRDMRQTVAVGVIKAVDKTQAVAGKVTKSAAKAAKK

SEQ ID NO: 27579 - DNA, 1344 bp, Glycine max
  CDS (1)..(1344)
atgggtaaggaaaaggttcacatcagtattgtggtcattggccatgtcgactctgggaaatccactaccactggtcacctgatttacaagcttggaggcattgacaagcgtgttattgagaggtttgagaaggaagctgctgagatgaataagaggtctttcaagtatgcctgggtgctggacaaacttaaggctgagcgtgaaagaggaatcaccattgatattgctttgtggaagtttgaaacaacaaagtattattgcacagttattgatgcgcctggacatagggatttcattaagaatatgattactgggacatcccaagctgactgtgctgttcttatcattgattcgaccactggtggttttgaagctggtatttccaaggatggacagactcgtgaacatgctctgctttcattcacccttggtgtgaaacagatgatttgctgctgtaacaaaatggatgctactacacccaagtattccaaggccaggtatgatgaaattgtgaaggaagtctcttcctacttgaagaaagtaggatacaaccctgacaagattccttttgttcctatctctggttttgagggagacaacatgattgagaggtccacaaaccttgactggtacaagggtccaactctgcttgatgcacttgaccagattagtgagcccaagaggccctctgacaagcccctcaggcttccccttcaggatgtgtacaagattggaggtattggaactgtgccagtgggacgtgttgagaccggtgtcttgaagcctggaatggtggtgacttttgcaccaactggactgacaactgaagtcaagtctgtggagatgcaccatgaatctcttacagaggcacatcctggtgacaatgtgggattcaatgttaagaatgttgctgttaaggatttgaagcgtggttatgttgcctcaaactcaaaggatgaccctgcaaaggaggctgctaacttcacagcccaagtcatcatcattaaccaccctggtcagattggaaatggctatgcccctgtcctcgactgccacacttctcacattgctgtcaagtttgctgaactcatgaccaagattgacaggcgatccggcaaagagcttgagaaggagcccaagtttttgaagaacggtgatgctggttttgttaagatgattccaaccaaacccatggttgttgaaactttctccgagtatcctccacttggtaggtttgctgttagggacatgcgtcaaactgttgctgtgggagtcatcaagaacgttgagaagaaggatcctaccggagccaaggtcaccaaggctgcccagaagaagaagtga

SEQ ID NO: 27580 - protein, 447 aa, Glycine max
MGKEKVHISIVVIGHVDSGKSTTTGHLIYKLGGIDKRVIERFEKEAAEMNKRSFKYAWVLDKLKAERERGITIDIALWKFETTKYYCTVIDAPGHRDFIKNMITGTSQADCAVLIIDSTTGGFEAGISKDGQTREHALLSFTLGVKQMICCCNKMDATTPKYSKARYDEIVKEVSSYLKKVGYNPDKIPFVPISGFEGDNMIERSTNLDWYKGPTLLDALDQISEPKRPSDKPLRLPLQDVYKIGGIGTVPVGRVETGVLKPGMVVTFAPTGLTTEVKSVEMHHESLTEAHPGDNVGFNVKNVAVKDLKRGYVASNSKDDPAKEAANFTAQVIIINHPGQIGNGYAPVLDCHTSHIAVKFAELMTKIDRRSGKELEKEPKFLKNGDAGFVKMIPTKPMVVETFSEYPPLGRFAVRDMRQTVAVGVIKNVEKKDPTGAKVTKAAQKKK

SEQ ID NO: 27581 - DNA, 1344 bp, Nicotiana tabacum
  CDS (1)..(1344)
atgggtaaagagaaatttcacatcaacattgtggtcattggccacgtcgactctggtaagtccactaccactggtcacttgatctacaagcttggtggtattgacaagcgtgtcattgagaggtttgagaaagaagctgctgagatgaacaagaggtcattcaagtatgcctgggtgcttgacaagctcaaggctgagcgtgagcgtggtatcaccattgatattgccttgtggaagtttgagaccaccaagtactactgcactgtgattgatgctcctggacacagggacttcatcaagaatatgattactggtacctcccaagctgactgtgctgtcctgattattgactccaccactggtggttttgaagctggtatctctaaggatggacagacccgtgaacatgcattgcttgctttcacccttggtgtcaagcaaatgatttgctgctgtaacaagatggatgctaccacccccaagtactccaaggctaggtatgatgaaatcgtgaaggaggtttcttcctacctcaagaaggtaggatacaaccctgataaaatcccctttgtccccatctctggtttcgagggtgataacatgatcgaaagatcaaccaaccttgactggtacaagggcccaactcttcttgaggctcttgaccagatcaatgacgccaagaggccctcagacaagcccctcaggctcccacttcaggatgtgtacaagattggtggtattggtactgtccctgttggtcgtgtggaaaccggtgtcctcaagcctggtatggttgtgacttttggtcccactggtctgaccactgaagttaaatctgttgagatgcaccacgaagctcttcaggaggcacttcctggtgacaatgttggattcaacgtcaagaacgttgcagttaaggatctcaagcgtgggtttgttgcttcaaactccaaggatgacccagctaagggtgctgccagctttacctcccaagtcatcatcatgaaccatccaggacagattggaaatggatatgctccagtgcttgactgccacacctcccacattgctgtcaagtttgcagaaattttgaccaagatcgacaggcgttctggtaaggagattgagaaggagcccaagttcttgaagaatggtgatgctggtatggttaagatgattcccaccaagcccatggttgttgagaccttctctgagtacccaccattgggacgttttgctgtgagggacatgcgtcaaactgttgctgttggtgttatcaagaacgttgacaagaaggacccaactggtgccaaggtcaccaaggctgctcagaagaagaaatga

SEQ ID NO: 27582 - protein, 447 aa, Nicotiana tabacum
MGKEKFHINIVVIGHVDSGKSTTTGHLIYKLGGIDKRVIERFEKEAAEMNKRSFKYAWVLDKLKAERERGITIDIALWKFETTKYYCTVIDAPGHRDFIKNMITGTSQADCAVLIIDSTTGGFEAGISKDGQTREHALLAFTLGVKQMICCCNKMDATTPKYSKARYDEIVKEVSSYLKKVGYNPDKIPFVPISGFEGDNMIERSTNLDWYKGPTLLEALDQINDAKRPSDKPLRLPLQDVYKIGGIGTVPVGRVETGVLKPGMVVTFGPTGLTTEVKSVEMHHEALQEALPGDNVGFNVKNVAVKDLKRGFVASNSKDDPAKGAASFTSQVIIMNHPGQIGNGYAPVLDCHTSHIAVKFAEILTKIDRRSGKEIEKEPKFLKNGDAGMVKMIPTKPMVVETFSEYPPLGRFAVRDMRQTVAVGVIKNVDKKDPTGAKVTKAAQKKK

SEQ ID NO: 27583 - DNA, 1383 bp, Trichoderma reesei
  CDS (1)..(1383)
atgggtaaggaggacaagactcacatcaacgtggtcgtcatcggccacgtcgactccggcaagtctaccaccactggtcacttgatctaccagtgcggtggtatcgacaagcgtaccattgagaagttcgagaaggaagccgccgaactcggcaagggttccttcaagtacgcgtgggttcttgacaagctcaaggccgagcgtgagcgtggtatcaccatcgacattgccctctggaagttcgagactcccaagtactatgtcaccgtcattgacgctcccggccaccgtgacttcatcaagaacatgatcactggtacttcccaggccgactgcgctatcctcatcatcgctgccggtactggtgagttcgaggctggtatctccaaggatggccagacccgtgagcacgctctgctcgcctacaccctgggtgtcaagcagctcatcgtcgccatcaacaagatggacactgccaactgggccgaggctcgttaccaggaaatcatcaaggagacttccaacttcatcaagaaggtcggcttcaaccccaaggccgttgctttcgtccccatctccggcttcaacggtgacaacatgctcaccccctccaccaactgcccctggtacaagggctgggagaaggagaccaaggctggcaagttcaccggcaagaccctccttgaggccatcgactccatcgagccccccaagcgtcccacggacaagcccctgcgtcttcccctccaggacgtctacaagatcggtggtatcggaacagttcccgtcggccgtatcgagactggtgtcctcaagcccggtatggtcgttaccttcgctccctccaacgtcaccactgaagtcaagtccgtcgagatgcaccacgagcagctcgctgagggccagcctggtgacaacgttggtttcaacgtgaagaacgtttccgtcaaggaaatccgccgtggcaacgttgccggtgactccaagaacgacccccccatgggcgccgcttctttcaccgcccaggtcatcgtcatgaaccaccccggccaggtcggtgccggctacgcccccgtcctcgactgccacactgcccacattgcctgcaagttcgccgagctcctcgagaagatcgaccgccgtaccggtaaggctaccgagtctgcccccaagttcatcaagtctggtgactccgccatcgtcaagatgatcccctccaagcccatgtgcgttgaggctttcaccgactaccctcccctgggtcgtttcgccgtccgtgacatgcgccagaccgtcgctgtcggtgtcatcaaggccgtcgagaagtcctctgccgccgccgccaaggtcaccaagtccgctgccaaggccgccaagaaataa

SEQ ID NO: 27584 - protein, 460 aa, Trichoderma reesei
MGKEDKTHINVVVIGHVDSGKSTTTGHLIYQCGGIDKRTIEKFEKEAAELGKGSFKYAWVLDKLKAERERGITIDIALWKFETPKYYVTVIDAPGHRDFIKNMITGTSQADCAILIIAAGTGEFEAGISKDGQTREHALLAYTLGVKQLIVAINKMDTANWAEARYQEIIKETSNFIKKVGFNPKAVAFVPISGFNGDNMLTPSTNCPWYKGWEKETKAGKFTGKTLLEAIDSIEPPKRPTDKPLRLPLQDVYKIGGIGTVPVGRIETGVLKPGMVVTFAPSNVTTEVKSVEMHHEQLAEGQPGDNVGFNVKNVSVKEIRRGNVAGDSKNDPPMGAASFTAQVIVMNHPGQVGAGYAPVLDCHTAHIACKFAELLEKIDRRTGKATESAPKFIKSGDSAIVKMIPSKPMCVEAFTDYPPLGRFAVRDMRQTVAVGVIKAVEKSSAAAAKVTKSAAKAAKK

SEQ ID NO: 27585 - DNA, 1344 bp, Vicia faba
  CDS (1)..(1344)
atgggtaaagaaaaggttcacattaacattgtcgtcattggacatgtcgactctggaaaatcaaccaccactggtcacttgatctacaagctaggaggtattgacaagcgtgtgattgagaggtttgagaaggaagctgctgaaatgaacaaacgttcattcaagtatgcatgggttcttgacaagcttaaggctgagcgtgaaagaggtattaccattgatattgccttgtggaaatttgaaacctcgaagtactactgcacagtcattgatgctcctggacatcgtgattttatcaagaacatgattactggaacctcccaggctgattgtgctgtcctcattattgattccaccactggaggttttgaggctggtatctctaaggatgggcagactcgtgaacacgctcttcttgcttttactcttggagtgaaacagatgatctgttgttgtaacaagatggatgctaccacccctaagtactccaagggcaggtatgaagaaattgtgaaggaagtttcttcctacttgaagaaggttggatacaacccagacaaaattccattcgttcccatttctggttttgagggtgacaacatgattgagaggtccaccaaccttgactggtacaagggaccaactctccttgatgctcttgacaacatcaacgagcccaagagaccctcagacaagccactcaggcttccattgcaagatgtttacaagattggtggtattggaatcgtgccagtgggacgtgttgaaaccggtgttgtgaagcccggtatgcttgtgacttttgctcctaccggtttgacaactgaggttaagtctgttgagatgcaccacgaggctctcactgaggctcttccaggagacaatgtcggattcaatgttaagaatgttgcagtcaaggatctcaagcgtggttttgttgcatccaactccaaggatgaccctgccaaggaagctgccaacttcacctcccaagtcatcatcatgaaccatcctggacagatcggaaacggttatgcaccagtgctagattgccatacctctcacattgctgtgaagtttgctgaacttatcaccaagattgacaggcgatctggtaaggagattgagaaggagcccaagtttttgaagaatggtgatgcaggtatggttaagatgattcccaccaagcccatggttgtggaaacttttgccgagtatcctccacttggtcgttttgctgttagggacatgagacaaactgttgctgtcggagtcatcaagagtgtggagaagaaggacccaactggagccaaggtcaccaaagctgcagccaagaagaagtga

SEQ ID NO: 27586 - protein, 447 aa, Vicia faba
MGKEKVHINIVVIGHVDSGKSTTTGHLIYKLGGIDKRVIERFEKEAAEMNKRSFKYAWVLDKLKAERERGITIDIALWKFETSKYYCTVIDAPGHRDFIKNMITGTSQADCAVLIIDSTTGGFEAGISKDGQTREHALLAFTLGVKQMICCCNKMDATTPKYSKGRYEEIVKEVSSYLKKVGYNPDKIPFVPISGFEGDNMIERSTNLDWYKGPTLLDALDNINEPKRPSDKPLRLPLQDVYKIGGIGIVPVGRVETGVVKPGMLVTFAPTGLTTEVKSVEMHHEALTEALPGDNVGFNVKNVAVKDLKRGFVASNSKDDPAKEAANFTSQVIIMNHPGQIGNGYAPVLDCHTSHIAVKFAELITKIDRRSGKEIEKEPKFLKNGDAGMVKMIPTKPMVVETFAEYPPLGRFAVRDMRQTVAVGVIKSVEKKDPTGAKVTKAAAKKK

SEQ ID NO: 27587 - DNA, 1344 bp, Triticum aestivum
  CDS (1)..(1344)
atgggtaaggagaagactcacatcaacatcgtggtcattggccatgtcgactctggcaagtcgacgaccactggccacctgatctacaagcttggaggcattgacaagcgtgtcatcgagaggttcgagaaggaagccgctgagatgaacaagaggtctttcaagtacgcgtgggtgcttgacaagctcaaggccgagcgtgagagaggtatcaccatcgatattgctctctggaagttcgagaccaccaagtactactgcaccgtcattgatgcccctggtcaccgtgacttcatcaagaacatgatcaccggtacctcccaggctgactgtgctgttctcatcatcgactccaccactggtggttttgaggctggtatctccaaggatggccagacacgtgagcacgccctccttgctttcactcttggagtgaagcagatgatctgctgctgcaacaagatggacgccaccactcccaagtactcaaaggcgcgttatgaagaaattgtcaaggaggtctcttcctacctgaagaaggtcggctacaaccctgacaaggttcccttcgtccccatctctgggtttgagggtgacaacatgattgagaggtccaccaaccttgactggtacaagggcccaacccttcttgaggcgcttgaccagatcaacgagcccaagaggccctcagacaagcccctccgtcttcccctccaggacgtttacaagattggtggcattggaactgtgcctgttggccgtgttgagactggtgtcatcaagcctggtatggttgtcacctttggtcccactggtctgacaactgaggtcaagtccgttgagatgcaccatgagtctctcctggaggcgcttcctggtgacaacgttggcttcaatgtcaagaatgttgccgtgaaggatctgaagcgtggttttgttgcatccaactccaaggatgaccctgccaaggaggcagccaacttcacctcccaggtcatcatcatgaaccaccctggtcagattggcaacggctacgccccagtgctggactgccacacctcgcacattgctgtcaagtttgctgagctggtgaccaagatcgacaggcgatctggtaaggagctggaggccctgcccaagttcctcaagaatggtgatgctggcatagtgaagatgattcccaccaagcccatggttgtggagacctttgctacttacccacctcttggtcgttttgctgtccgtgacatgaggcaaactgtggctgttggtgtcatcaagggtgtggagaagaaggacccaaccggcgccaaggtgaccaaggctgccatcaagaagaaatga

SEQ ID NO: 27588 - protein, 447 aa, Triticum aestivum
MGKEKTHINIVVIGHVDSGKSTTTGHLIYKLGGIDKRVIERFEKEAAEMNKRSFKYAWVLDKLKAERERGITIDIALWKFETTKYYCTVIDAPGHRDFIKNMITGTSQADCAVLIIDSTTGGFEAGISKDGQTREHALLAFTLGVKQMICCCNKMDATTPKYSKARYEEIVKEVSSYLKKVGYNPDKVPFVPISGFEGDNMIERSTNLDWYKGPTLLEALDQINEPKRPSDKPLRLPLQDVYKIGGIGTVPVGRVETGVIKPGMVVTFGPTGLTTEVKSVEMHHESLLEALPGDNVGFNVKNVAVKDLKRGFVASNSKDDPAKEAANFTSQVIIMNHPGQIGNGYAPVLDCHTSHIAVKFAELVTKIDRRSGKELEALPKFLKNGDAGIVKMIPTKPMVVETFATYPPLGRFAVRDMRQTVAVGVIKGVEKKDPTGAKVTKAAIKKK

SEQ ID NO: 27589 - DNA, 1383 bp, Yarrowia lipolytica
  CDS (1)..(1383)
atgggaaaggaaaagactcacgttaacctcgttgtcatcggtcacgtcgatgccggtaagtccaccaccactggtcaccttatctacaagtgcggtggtatcgataagcgaaccatcgagaagttcgagaaggaggccgacgagcttggaaagggttctttcaagtacgcttgggttcttgacaagcttaaggctgagcgagagcgaggtatcaccattgatattgctctctggaagttccagacccctaagtactacgtcaccgttattgatgctcccggtcaccgagatttcatcaagaacatgatcaccggtacctcccaggccgactgtgccatcctcatcattgctggtggtgttggtgagttcgaggctggtatctccaaggacggtcagacccgagagcacgctctgctcgctttcaccctcggtgtcaagcagctgattgttgccatcaacaagatggactccgtcaagtggtctcaggatcgatacaacgagatctgcaaggagaccgccaacttcgtcaagaaggttggttacaaccctaagtctgtcccctttgtccctatttccggatggaacggtgacaacatgattgaggcctccaccaactgtgactggtacaagggctggaccaaggagaccaaggccggtgaggtcaagggtaagaccctccttgaggccattgacgccattgagccccccgtgcgaccctccgacaagcccctccgacttcctctccaggatgtctacaagatcggtggtatcggcacagtgcccgttggccgagtcgagaccggtgttatcaaggccggtatggttgttaccttcgctcccgccaacgtgaccactgaggtcaagtctgtcgagatgcaccacgagatcctccccgacggaggtttccccggtgacaacgttggcttcaacgtcaagaacgtttccgtcaaggatatccgacgaggtaacgttgccggtgactccaagaacgacccccctaagggctgcgactctttcaacgctcaggtcattgttcttaaccaccccggtcagatcggtgctggttacgctcccgttcttgattgccacactgcccacattgcctgcaagttcgacaccctgatcgagaagatcgaccgacgaaccggtaagaagatggaggactcccccaagttcatcaagtctggtgatgccgccattgtcaagatggtcccctccaagcccatgtgtgttgaggccttcactgagtacccccctcttggtcgattcgccgtccgagacatgcgacagaccgttgctgtcggtgtcatcaagtccgtcgagaagtccgacaaggctggtggaaaggtcaccaaggctgcccagaaggctgccaagaaataa

SEQ ID NO: 27590 - protein, 460 aa, Yarrowia lipolytica
MGKEKTHVNLVVIGHVDAGKSTTTGHLIYKCGGIDKRTIEKFEKEADELGKGSFKYAWVLDKLKAERERGITIDIALWKFQTPKYYVTVIDAPGHRDFIKNMITGTSQADCAILIIAGGVGEFEAGISKDGQTREHALLAFTLGVKQLIVAINKMDSVKWSQDRYNEICKETANFVKKVGYNPKSVPFVPISGWNGDNMIEASTNCDWYKGWTKETKAGEVKGKTLLEAIDAIEPPVRPSDKPLRLPLQDVYKIGGIGTVPVGRVETGVIKAGMVVTFAPANVTTEVKSVEMHHEILPDGGFPGDNVGFNVKNVSVKDIRRGNVAGDSKNDPPKGCDSFNAQVIVLNHPGQIGAGYAPVLDCHTAHIACKFDTLIEKIDRRTGKKMEDSPKFIKSGDAAIVKMVPSKPMCVEAFTEYPPLGRFAVRDMRQTVAVGVIKSVEKSDKAGGKVTKAAQKAAKK

SEQ ID NO: 27591 - DNA, 1377 bp, Saccharomyces cerevisiae
  CDS (1)..(1377)
atgggtaaagagaagtctcacattaacgttgtcgttatcggtcatgtcgattctggtaagtctaccactaccggtcatttgatttacaagtgtggtggtattgacaagagaaccatcgaaaagttcgaaaaggaagccgctgaattaggtaagggttctttcaagtacgcttgggttttggacaagttaaaggctgaaagagaaagaggtatcactatcgatattgctttgtggaagttcgaaactccaaagtaccaagttaccgttattgatgctccaggtcacagagatttcatcaagaacatgattactggtacttctcaagctgactgtgctatcttgattattgctggtggtgtcggtgaattcgaagccggtatctctaaggatggtcaaaccagagaacacgctttgttggctttcaccttgggtgttagacaattgattgttgctgtcaacaagatggactccgtcaaatgggacgaatccagattccaagaaattgtcaaggaaacctccaactttatcaagaaggttggttacaacccaaagactgttccattcgtcccaatctctggttggaacggtgacaacatgattgaagctaccaccaacgctccatggtacaagggttgggaaaaggaaaccaaggccggtgtcgtcaagggtaagactttgttggaagccattgacgccattgaacaaccatctagaccaactgacaagccattgagattgccattgcaagatgtttacaagattggtggtattggtactgtgccagtcggtagagttgaaaccggtgtcatcaagccaggtatggttgttacttttgccccagctggtgttaccactgaagtcaagtccgttgaaatgcatcacgaacaattggaacaaggtgttccaggtgacaacgttggtttcaacgtcaagaacgtttccgttaaggaaatcagaagaggtaacgtctgtggtgacgctaagaacgatccaccaaagggttgcgcttctttcaacgctaccgtcattgttttgaaccatccaggtcaaatctctgctggttactctccagttttggattgtcacactgctcacattgcttgtagattcgacgaattgttggaaaagaacgacagaagatctggtaagaagttggaagaccatccaaagttcttgaagtccggtgacgctgctttggtcaagttcgttccatctaagccaatgtgtgttgaagctttcagtgaatacccaccattaggtagattcgctgtcagagacatgagacaaactgtcgctgtcggtgttatcaagtctgttgacaagactgaaaaggccgctaaggttaccaaggctgctcaaaaggctgctaagaaataa

SEQ ID NO: 27592 - protein, 458 aa, Saccharomyces cerevisiae
MGKEKSHINVVVIGHVDSGKSTTTGHLIYKCGGIDKRTIEKFEKEAAELGKGSFKYAWVLDKLKAERERGITIDIALWKFETPKYQVTVIDAPGHRDFIKNMITGTSQADCAILIIAGGVGEFEAGISKDGQTREHALLAFTLGVRQLIVAVNKMDSVKWDESRFQEIVKETSNFIKKVGYNPKTVPFVPISGWNGDNMIEATTNAPWYKGWEKETKAGVVKGKTLLEAIDAIEQPSRPTDKPLRLPLQDVYKIGGIGTVPVGRVETGVIKPGMVVTFAPAGVTTEVKSVEMHHEQLEQGVPGDNVGFNVKNVSVKEIRRGNVCGDAKNDPPKGCASFNATVIVLNHPGQISAGYSPVLDCHTAHIACRFDELLEKNDRRSGKKLEDHPKFLKSGDAALVKFVPSKPMCVEAFSEYPPLGRFAVRDMRQTVAVGVIKSVDKTEKAAKVTKAAQKAAKK

SEQ ID NO: 27593 - DNA, 1365 bp, Arabidopsis thaliana
  CDS (1)..(1365)
atggcgtccgttgttcttcgaaaccctagctcgaagcgccttgttccattctcttcccagatctactctcgctgtggtgcttccgttacttcctcttactcgatctctcattctatcggtggagatgatctctcttcctctaccttcggaacctcctccttctggagatccatggccacttttactcgaaataaacctcatgtaaatgttggaactattgggcatgttgatcatggcaagaccactttaactgctgcaatcacaaaggttcttgctgaggagggcaaagctaaagctattgcctttgatgaaattgataaagctcctgaagagaagaagagaggaattactattgccacggctcatgtggagtatgaaactgcaaagcgtcactatgctcatgtggattgccctggacacgcagattatgttaaaaatatgattactggagctgcgcaaatggatggcggaattcttgtggtttcaggaccagatggacccatgccgcagacaaaggaacatattctacttgcacgccaggttggtgttccctcacttgtgtgcttcttgaacaaagttgatgtggtggatgaccctgagctcttggagcttgtcgagatggaactacgtgagctcctcagcttctacaagtttcctggggatgatattcccatcatccgaggatctgctctgtccgcattacagggcaccaatgatgaaattggaaggcaagctatattaaagctgatggatgctgttgatgaatatatacctgaccctgttcgcgtccttgacaagcctttcttgatgccaattgaagatgttttctcaattcaaggacgtggaactgttgcaaccggtcgtatcgaacagggagtcattaaagtgggtgaagaagttgagatattgggtttacgtgaggggggtgttccactgaaatcgactgtaactggggttgagatgttcaagaagattttggataatggacaggctggtgataatgtaggacttcttctgcgtgggctaaagagagaagacattcagcgtggaatggtgattgctaagcctggttcatgcaagacatacaagaagtttgaagcagagatttacgtgctcacaaaggatgaaggtggacgtcacactgcatttttctctaactacaggcctcagttttacttgaggactgcagatatcactggcaaagtggaattacccgaaaacgtgaagatggttatgcctggtgacaatgtcacagctgttttcgagttaatcatgcctgtcccactcgaaacaggtcaaagatttgccttaagggaaggaggtagaacagttggagctggtgttgtatcaaaagtgatgacctaa

SEQ ID NO: 27594 - protein, 454 aa, Arabidopsis thaliana
MASVVLRNPSSKRLVPFSSQIYSRCGASVTSSYSISHSIGGDDLSSSTFGTSSFWRSMATFTRNKPHVNVGTIGHVDHGKTTLTAAITKVLAEEGKAKAIAFDEIDKAPEEKKRGITIATAHVEYETAKRHYAHVDCPGHADYVKNMITGAAQMDGGILVVSGPDGPMPQTKEHILLARQVGVPSLVCFLNKVDVVDDPELLELVEMELRELLSFYKFPGDDIPIIRGSALSALQGTNDEIGRQAILKLMDAVDEYIPDPVRVLDKPFLMPIEDVFSIQGRGTVATGRIEQGVIKVGEEVEILGLREGGVPLKSTVTGVEMFKKILDNGQAGDNVGLLLRGLKREDIQRGMVIAKPGSCKTYKKFEAEIYVLTKDEGGRHTAFFSNYRPQFYLRTADITGKVELPENVKMVMPGDNVTAVFELIMPVPLETGQRFALREGGRTVGAGVVSKVMT

SEQ ID NO: 27595 - DNA, 1185 bp, Pasteurella multocida
  CDS (1)..(1185): transl_table=11
gtgtctaaagaaaaatttgaacgtacaaaaccgcacgtaaacgtgggtacaatcggccacgttgaccatggtaaaacaactttaaccgcagcaatcacaaccgtattagcaaaacactacggtggtgcagctcgtgcattcgaccaaatcgataacgcgccagaagaaaaagcgcgtggtatcaccatcaacacatcacacgttgaatacgatacaccaactcgtcactacgcacacgttgactgtccaggacacgcggactatgtgaaaaacatgattaccggtgcagctcaaatggacggtgctatcttagttgttgcggcaactgacggtcctatgccacaaacacgtgagcacatccttttaggtcgccaagtaggtgttccttacatcatcgtattcttaaacaaatgcgacatggtggatgatgaagaattattagaattagttgaaatggaagtgcgtgaacttctttctcaatatgatttcccaggtgatgatacaccaatcgtacgtggttcagcgttacaagcgttaaacggtgtagctgagtgggaagagaaaattcttgagttagccaaccacttagatacttacattccagagccacaacgtgcaatcgaccaaccgttccttcttccgattgaagacgtgttctcaatttctggtcgtggtacagtagtaacaggtcgtgttgagcgtggtatcatccgtacaggtgaagaggttgaaattgttggtattaaagcgacaacgaagaccacagtaacaggtgttgagatgttccgtaaattattagacgaaggtcgtgcgggtgagaacgttggtgctttattacgtggtactaaacgtgaagaaatcgaacgtggtcaagtgttagcgaaaccgggttcaatcacgccacacactgattttgaatcagaagtttacgtgttatcaaaagaggaaggtggtcgtcatacaccattcttcaaaggttaccgtccacagttctacttccgtacaacggacgtaacaggtacaatcgaattaccggaaggtgttgagatggtgatgcctggtgataacatcaagatgactgtaagtttgattcacccaatcgcgatggaccaaggtttacgctttgcgattcgtgaaggtggtcgtacagtaggtgcgggtgttgtagcgaaaattatcaaataa

SEQ ID NO: 27596 - protein, 394 aa, Pasteurella multocida [sequence omitted]

SEQ ID NO: 27597 - DNA, 1194 bp, Pseudomonas putida
  CDS (1)..(1194): transl_table=11
atggctaaggaaaagtttgatcgttcccttccccacgttaacgtcggcactatcggccacgttgaccacggtaagaccactctgaccgcagctctgactcgcgtttgctccgaagttttcggttcggcaatcgttgagttcgacaagatcgactcggctccggaagaaaaagcgcgcggtatcaccatcaacaccgctcacgtcgagtacaactcgaccattcgtcactacgctcacgttgactgcccaggtcacgctgactacgtgaagaacatgatcaccggtgctgcccagatggacggcgcgatcctggtttgctcggccgccgatggtccgatgccacaaacccgtgagcacatcctgttgtcccgtcaggtaggcgttccgtacatcgtggtcttcctgaacaaggctgacctggtagacgacgctgagctgctggagctggtcgagatggaagttcgcgacctgctgtccacctacgacttcccaggcgacgacactccgatcatcatcggttccgctcgtatggcgctggaaggcaaagacgacaacgaaatgggcactaccgctgttaagaagctggtagaaactctggacagctacattcctgagccagttcgtgctatcgaccagccgttcctgatgccgatcgaagacgtgttctcgatctcgggtcgtggtaccgttgttaccggtcgtatcgagcgtggcatcgtccgcgttcaggatccgctggaaatcgttggtctgcgtgacaccaccaccaccacctgcaccggtgttgagatgttccgcaagctgctggacgaaggtcgtgctggcgagaactgcggcgttctgctgcgtggtaccaagcgtgacgacgttgagcgtggccaggttctggtcaagccaggttcggtcaagccgcacaccaagttcaccgcagaagtctacgtcctgtcgaaggaagaaggcggccgtcacactccgttcttcaaaggctaccgtccacagttctacttccgtaccactgacgtgaccggtaactgcgaactgccggaaggcgttgaaatggtaatgccaggtgacaacattcagatgactgttaccctgatcaagaccatcgcaatggaagacggtctgcgcttcgctatccgtgaaggcggtcgtaccgtcggcgccggcgtcgtagcaaaaattattgaataa

SEQ ID NO: 27598 - protein, 397 aa, Pseudomonas putida
MAKEKFDRSLPHVNVGTIGHVDHGKTTLTAALTRVCSEVFGSAIVEFDKIDSAPEEKARGITINTAHVEYNSTIRHYAHVDCPGHADYVKNMITGAAQMDGAILVCSAADGPMPQTREHILLSRQVGVPYIVVFLNKADLVDDAELLELVEMEVRDLLSTYDFPGDDTPIIIGSARMALEGKDDNEMGTTAVKKLVETLDSYIPEPVRAIDQPFLMPIEDVFSISGRGTVVTGRIERGIVRVQDPLEIVGLRDTTTTTCTGVEMFRKLLDEGRAGENCGVLLRGTKRDDVERGQVLVKPGSVKPHTKFTAEVYVLSKEEGGRHTPFFKGYRPQFYFRTTDVTGNCELPEGVEMVMPGDNIQMTVTLIKTIAMEDGLRFAIREGGRTVGAGVVAKIIE

SEQ ID NO: 27599 - DNA, 1440 bp, Glycine max
  CDS (1)..(1440)
atggcagtttcttcagcaacagcttcctccaaactcatactattgccccatgcatcatcatcctcttcccttaattccacacccttccgctcctccaccaccaacacccacaaactaacccctctctcctcctccttcctccaccccaccaccgtcctccgccgcaccccttcttccaccaccaccccgcgtcgcaccttcaccgtccgcgccgcccgcggcaaattcgagcgcaagaagccccacgtgaacatcggcaccatcggccacgtggaccacggcaagaccacccttaccgctgccctgaccatggctcttgccgccctaggcaacagcgcccccaaaaaatacgacgagatcgacgccgccccggaggagcgcgcccgaggcatcaccatcaacaccgccaccgtggagtacgagaccgagaaccgccactacgcccacgtggactgccccggccacgctgactacgtgaaaaacatgatcaccggcgcagcccagatggacggcgccatattagtcgtctccggcgccgacggccccatgccccaaaccaaagaacacataatattagcgaaacaagtcggtgtccccaacatggtcgtgttcttaaacaagcaagaccaagtcgacgacgaagagcttctccaactagtggagatagaagtccgcgaccttctgagctcctacgaattccccggtgacgatacccccattgtctcgggctccgcgctcttagccctagaagcactcatggccaaccctgcaatcaaacgcggcgacaacgagtgggtcgacaagattttccaactcatggacgaggtcgacaactacattcccatcccccagcgccagaccgacctccccttcctcctcgccgtcgaagacgtcttctccatcaccggccgtggcaccgtcgccactggccgtgtagagcgtggcaccatcaaagtaggggaaactgttgaccttgtaggtttgagagaaacaaggaacacaaccgtcacaggtgtagaaatgttccagaagattctagacgaagccctggctggagacaacgtggggctgttgcttagaggggttcagaagactgacattcagaggggaatggtgttggctaaaccaggcacgattacgccgcacaccaagttctcagcgattgtttatgttttgaagaaagaagaaggtggtaggcattcacctttctttgcagggtataggcctcagttttacatgaggaccaccgatgtgactgggaaggttacgtctatcatgaatgataaggatgaggagtccacgatggtgctgcccggtgaccgtgtcaagatggtggtggagcttattgttcctgtggcttgcgaacagggaatgaggtttgctattagggaaggtgggaagaccgttggtgctggtgttatccaatccattattgagtga

SEQ ID NO: 27600 - protein, 479 aa, Glycine max
MAVSSATASSKLILLPHASSSSSLNSTPFRSSTTNTHKLTPLSSSFLHPTTVLRRTPSSTTTPRRTFTVRAARGKFERKKPHVNIGTIGHVDHGKTTLTAALTMALAALGNSAPKKYDEIDAAPEERARGITINTATVEYETENRHYAHVDCPGHADYVKNMITGAAQMDGAILVVSGADGPMPQTKEHIILAKQVGVPNMVVFLNKQDQVDDEELLQLVEIEVRDLLSSYEFPGDDTPIVSGSALLALEALMANPAIKRGDNEWVDKIFQLMDEVDNYIPIPQRQTDLPFLLAVEDVFSITGRGTVATGRVERGTIKVGETVDLVGLRETRNTTVTGVEMFQKILDEALAGDNVGLLLRGVQKTDIQRGMVLAKPGTITPHTKFSAIVYVLKKEEGGRHSPFFAGYRPQFYMRTTDVTGKVTSIMNDKDEESTMVLPGDRVKMVVELIVPVACEQGMRFAIREGGKTVGAGVIQSIIE

SEQ ID NO: 27601 - DNA, 1194 bp, Streptomyces coelicolor
  CDS (1)..(1194): transl_table=11
gtggcgaaggcgaagttcgagcggactaagccgcacgtcaacatcggcaccatcggtcacatcgaccacggtaagacgaccctcacggccgccattaccaaggtgctgcacgacgcgtacccggacatcaacgaggcgtcggcgttcgaccagatcgacaaggctcccgaagagcgccagcgcggtatcaccatctcgatcgcgcacgtcgagtaccagaccgaggcgcgtcactacgcccacgtcgactgccccggtcacgccgactacatcaagaacatgatcacgggtgccgcgcagatggacggcgccatcctcgtggtcgccgccaccgacggcccgatgccgcagaccaaggagcacgtgctcctggcccgccaggtcggcgttccgtacatcgtggtcgccctgaacaaggccgacatggtggacgacgaggagatcctggagctcgtcgagctcgaggtgcgtgagctcctctccgagtacgagttcccgggcgacgacgttcccgtcgtcaaggtctccgctctgaaggccctcgagggcgacaaggagtggggcaactcggtcctcgagctcatgaaggccgtggacgaggccatcccggagcccgagcgcgacgtcgacaagccgttcctgatgccgatcgaggacgtcttcaccatcaccggtcgcggtacggtcgtcaccggccgcatcgagcgtggtgtcctcaaggtcaacgagaccgtcgacatcatcggcatcaagaccgagaagaccaccaccacggtcaccggcatcgagatgttccgcaagctcctcgacgagggccaggccggtgagaacgtcggtctgctgcttcgcggcatcaagcgcgaggacgtcgagcgcggccaggtcatcatcaagccgggctcggtcaccccgcacaccgagttcgaggcccaggcctacatcctgtcgaaggacgagggtggccgtcacacccccttcttcaacaactaccgtccgcagttctacttccgtacgacggacgtgaccggcgtcgtgaccctccccgagggcaccgagatggtcatgccgggtgacaacaccgagatgaaggtggagctcatccagcccgtcgccatggaagagggcctgaagttcgccatccgcgagggtggccggaccgtgggcgccggccaggtcaccaagatcaacaagtaa

SEQ ID NO: 27602 - protein, 397 aa, Streptomyces coelicolor
MAKAKFERTKPHVNIGTIGHIDHGKTTLTAAITKVLHDAYPDINEASAFDQIDKAPEERQRGITISIAHVEYQTEARHYAHVDCPGHADYIKNMITGAAQMDGAILVVAATDGPMPQTKEHVLLARQVGVPYIVVALNKADMVDDEEILELVELEVRELLSEYEFPGDDVPVVKVSALKALEGDKEWGNSVLELMKAVDEAIPEPERDVDKPFLMPIEDVFTITGRGTVVTGRIERGVLKVNETVDIIGIKTEKTTTTVTGIEMFRKLLDEGQAGENVGLLLRGIKREDVERGQVIIKPGSVTPHTEFEAQAYILSKDEGGRHTPFFNNYRPQFYFRTTDVTGVVTLPEGTEMVMPGDNTEMKVELIQPVAMEEGLKFAIREGGRTVGAGQVTKINK

SEQ ID NO: 27603 - DNA, 1194 bp, Streptomyces ramocissimus
  CDS (1)..(1194): transl_table=11
gtggcgaaggcgaagttcgagcggactaagccgcacgtcaacatcggcaccatcggtcacatcgaccacggtaagacgaccctcacggccgccattaccaaggtgctgcacgacgcgtacccggacctgaacgaggccaccccgttcgacaacatcgacaaggctcctgaggagcgtcagcgcggtatcaccatctccatcgcgcacgtcgagtaccagaccgaggcgcgtcactacgcccacgtcgactgcccgggtcacgcggactacatcaagaacatgatcacgggtgcggcgcagatggacggcgccatcctcgtggtcgccgccaccgacggcccgatgccgcagaccaaggagcacgtgctcctggcccgccaggtcggcgttccgtacatcgtggtcgccctgaacaaggccgacatggtggacgacgaggagatcatggagctcgttgagctcgaggtccgtgagctcctctccgagtacgagttcccgggcgacgacctgccggtcgtccgcgtctccgcgctgaaggcgctggagggcgacgctcagtggacgcagtccgtcctcgacctgatgaaggccgtcgacgagtccatcccggagccggagcgcgacgtcgacaagccgttcctcatgccgatcgaggacgtcttcacgatcaccggtcgcggcacggtcgtcaccggccgtatcgagcgtggtgtcctgaaggtcaacgagaccgtcgacatcatcggcatcaagaccgagaagaccaccaccacggtcaccggcatcgagatgttccgcaagctgctcgacgagggccaggccggtgagaacgtcggtctgctgctccgcggcatcaagcgcgaggacgtcgagcgcggccaggtcatcatcaagccgggctcggtcaccccgcacaccgagttcgaggcgcaggcctacatcctctccaaggacgagggtggccgccacacgccgttcttcaacaactaccgcccgcagttctacttccgtaccacggacgtgaccggcgttgtgcacctccccgagggcaccgagatggtcatgccgggcgacaacaccgagatgcgcgtcgagctgatccagcccgtcgccatggaggagggcctgaagttcgccatccgtgagggtggccggaccgtcggcgccggccaggtcaccaagatcgtcaagtaa

SEQ ID NO: 27604 - protein, 397 aa, Streptomyces ramocissimus
MAKAKFERTKPHVNIGTIGHIDHGKTTLTAAITKVLHDAYPDLNEATPFDNIDKAPEERQRGITISIAHVEYQTEARHYAHVDCPGHADYIKNMITGAAQMDGAILVVAATDGPMPQTKEHVLLARQVGVPYIVVALNKADMVDDEEIMELVELEVRELLSEYEFPGDDLPVVRVSALKALEGDAQWTQSVLDLMKAVDESIPEPERDVDKPFLMPIEDVFTITGRGTVVTGRIERGVLKVNETVDIIGIKTEKTTTTVTGIEMFRKLLDEGQAGENVGLLLRGIKREDVERGQVIIKPGSVTPHTEFEAQAYILSKDEGGRHTPFFNNYRPQFYFRTTDVTGVVHLPEGTEMVMPGDNTEMRVELIQPVAMEEGLKFAIREGGRTVGAGQVTKIVK

SEQ ID NO: 27605 - DNA, 1203 bp, Thermoanaerobacter tengcongensis
  CDS (1)..(1203): transl_table=11
atggcaaagcagaaatttgagaggacgaagccgcacgtaaacgtagggacgatagggcacgtagaccatggtaagacgacattgacagcagcgataacattaatactttcgaaagcgggattagcacaggcgaagggatatgacgagatagacaaggcgccagaggagaaggcaaggggtataacaataaacacgacgcacgtagagtatgagacagcgaagaggcactatgcgcacgtagactgtccgggtcacgcggactatgtaaagaacatgataacaggggcagcgcagatggacggagcgatactggtagtatcagcagcagacggtccgatgccgcagacgagggagcacatattattggcaaggcaggtaggagtgccatatatagtagtatttttgaacaaagcggacatggtagacgatccggagttaatagagctagtagagatggaggtaagggacttactgaaccagtacgaatttcctggggatgacacaccgatagtagtaggttcagcgttaaaggcattagagtgtggatgcggcaagagggagtgccagtggtgcggcaagatatgggagttaatggatgtagtagacgaatatataccgacaccggagagggatatagacaagccgttcttgatgccggtagaggacgtatttacgataacgggaagaggtacagttgcgacaggtagagtagagagagggaaagtgaaagtaggggacgaagtagagataataggattgacgacggagtcaaggaagacagtagtgacaggagtagagatgttcaggaagacattagatgaggcacaggcaggagacaacataggggtattgttaagagggatacagagggatgaagtagagagagggcaggtactggcgaaaccagggacgataaagccgcacacgaaatttgaggcacaggtgtacgtattgacgaaggaagagggaggaaggcacacaccatttttcaatggatacaggccgcagttttactttaggacgacagacgtgacgggtacgatacagctaccagagggagtagagatggtaatgccaggagaccacgtgacattgagagtagagcttataacgccgatagcgatggaagaagggcttaagtttgctataagagaaggcggaaggacagttggcgctggtgtcgtatctgctataattgagtag

SEQ ID NO: 27606 - protein, 400 aa, Thermoanaerobacter tengcongensis
MAKQKFERTKPHVNVGTIGHVDHGKTTLTAAITLILSKAGLAQAKGYDEIDKAPEEKARGITINTTHVEYETAKRHYAHVDCPGHADYVKNMITGAAQMDGAILVVSAADGPMPQTREHILLARQVGVPYIVVFLNKADMVDDPELIELVEMEVRDLLNQYEFPGDDTPIVVGSALKALECGCGKRECQWCGKIWELMDVVDEYIPTPERDIDKPFLMPVEDVFTITGRGTVATGRVERGKVKVGDEVEIIGLTTESRKTVVTGVEMFRKTLDEAQAGDNIGVLLRGIQRDEVERGQVLAKPGTIKPHTKFEAQVYVLTKEEGGRHTPFFNGYRPQFYFRTTDVTGTIQLPEGVEMVMPGDHVTLRVELITPIAMEEGLKFAIREGGRTVGAGVVSAIIE

SEQ ID NO: 27607 - DNA, 1185 bp, Vibrio cholerae
  CDS (1)..(1185): transl_table=11
atgtctaaagagaaatttgaacgtacgaaaccgcacgtaaacgttggtactatcggccacgttgaccacggtaaaacaactctaactgcagctatctgtactgtacttgcaaaagtatacggcggtaaagctcgtgacttcgcgtcaatcgacaacgcaccagaagagcgtgagcgtggtattacaatcaatacttctcacgtagagtacgatactccaaaccgtcactacgcacacgtagactgtccaggacacgcggattatgttaagaacatgatcaccggtgcagcacagatggacggcggtatcctagttgtagcggcaactgacggtcgaatgccacaaactcgtgagcacatcctgctgggtcgccaagtaggtattccttacatcatcgtattcatgaacaagtgtgacatggttgacgatgaagagcttctagagctggtagagatggaagttcgtgagctgctgtctgagtacgatttcccaggtgatgacctgccagtaatccaaggttcagcactaggcgcgctaaacggcgaagcacagtgggaagcgaagattgttgagctagcagaagcactggatacttatattccagagccagagcgtgcagtagacatggcattcctgatgccaatcgaagacgtattctcaatccaaggtcgtggtacagtagtaactggccgtatcgagcgcggcatcctgaaagtgggtgacgaagtagcgatcgttggtatcaaagagacagtaaaaacgacctgtacaggtgtagagatgttccgtaagctgcttgacgaaggtcgtgcaggtgagaacgtaggtgcactactacgtggtactaagcgtgaagaagtagagcgtggtcaagtactggcgaagccaggttcaatcacaccacacactaagttcgaatcagaagtatacgtactgtcaaaagatgaaggtggccgtcatactccattcttcaaaggttaccgtccacagttctacttccgtacaactgacgtaacaggcagcatcgagctaccagagggcgtagaaatggtaatgccaggcgacaacgtgaagatggttgtagacctgattgcaccaatcgcgatggacgaaggtctacgcttcgctatccgtgaaggtggccgtactgtaggtgctggtgttgtagctaagatcatcgcttaa

SEQ ID NO: 27608 - protein, 394 aa, Vibrio cholerae
MSKEKFERTKPHVNVGTIGHVDHGKTTLTAAICTVLAKVYGGKARDFASIDNAPEERERGITINTSHVEYDTPNRHYAHVDCPGHADYVKNMITGAAQMDGGILVVAATDGRMPQTREHILLGRQVGIPYIIVFMNKCDMVDDEELLELVEMEVRELLSEYDFPGDDLPVIQGSALGALNGEAQWEAKIVELAEALDTYIPEPERAVDMAFLMPIEDVFSIQGRGTVVTGRIERGILKVGDEVAIVGIKETVKTTCTGVEMFRKLLDEGRAGENVGALLRGTKREEVERGQVLAKPGSITPHTKFESEVYVLSKDEGGRHTPFFKGYRPQFYFRTTDVTGSIELPEGVEMVMPGDNVKMVVDLIAPIAMDEGLRFAIREGGRTVGAGVVAKIIA

SEQ ID NO: 27609 - DNA, 1191 bp, Xanthomonas campestris pv
  CDS (1)..(1191): transl_table=11
atggcaagagctaaatttcttcgcgaaaagctgcacgttaacgtcggcaccatcggtcacgtcgaccatggcaagaccacgttgaccgctgcgctgaccaagatcggtgccgagcgtttcggtggcgagttcaaggcgtacgacgcgatcgacgcagcgccggaagagaaggcgcgtggtatcacgatctcgaccgcgcacgttgaatatgagtccgcagtgcgccattacgcgcacgtcgattgccccggccacgccgactacgtcaagaacatgatcacaggtgctgcgcagatggatggcgcgatcctggtgtgttcggccgctgacggcccgatgccgcagacccgtgagcacatcctgctctcgcgtcaggtcggtgtgccgcacatcgtcgtgttcctgaacaaggccgacatggtcgacgacgccgagctgcttgagctggtcgagatggaagtgcgtgagctcctgagcaagtacgacttcccgggcgacgacaccccgatcatccacggttcggcccgtctggcgctggaaggcgatcagagcgacatcggtgtgccggcgatcctgaagctggtcgaagccctggatacctttattccggatccgacccgcgacgtcgaccgtccgttcctgatgccggtcgaagacgtgttctcgatctcgggtcgtggcaccgtggtgaccggccgtatcgagcgcggcatcatcaaggtcggcgatgaaatcgaaatcgtcggtatccgcgacacgcagaagaccacggtcaccggcgttgaaatgttccgcaagttgctggaccagggccaggcaggcgacaacgccggtctgctgctgcgcggcaccaagcgtgacgacgtggagcgcggccaagtgctgtgcaagccgggttcgatcaagccgcacaccgagttcgaagccgaagtctacgtgctgtcgaaggacgagggcggccgtcacaccccgttcttcaagggctaccgtccgcagttctacttccgcaccaccgacatcactggcgcatgccagctgccggaaggcgtggaaatggtgatgccgggcgataacgtgaagatggtcgtgaccctgatcaacccggtcgcgatggacgaaggtctgcgcttcgcgattcgtgaaggcggtcgtaccgtcggcgccggcgtggttgccaagatcatcaagtaa

SEQ ID NO: 27610 - protein, 396 aa, Xanthomonas campestris pv
MARAKFLREKLHVNVGTIGHVDHGKTTLTAALTKIGAERFGGEFKAYDAIDAAPEEKARGITISTAHVEYESAVRHYAHVDCPGHADYVKNMITGAAQMDGAILVCSAADGPMPQTREHILLSRQVGVPHIVVFLNKADMVDDAELLELVEMEVRELLSKYDFPGDDTPIIHGSARLALEGDQSDIGVPAILKLVEALDTFIPDPTRDVDRPFLMPVEDVFSISGRGTVVTGRIERGIIKVGDEIEIVGIRDTQKTTVTGVEMFRKLLDQGQAGDNAGLLLRGTKRDDVERGQVLCKPGSIKPHTEFEAEVYVLSKDEGGRHTPFFKGYRPQFYFRTTDITGACQLPEGVEMVMPGDNVKMVVTLINPVAMDEGLRFAIREGGRTVGAGVVAKIIK

SEQ ID NO: 27611 - DNA, 1185 bp, Yersinia pestis
  CDS (1)..(1185): transl_table=11
gtgtctaaagaaaaatttgaacgtaccaaaccccatgtaaacgtcggtactatcggccacgttgaccatggtaaaactaccctgacagcagcaatcaccaccgttctggctaaaacctacggcggtagcgctcgtgctttcgatcaaatcgataacgcaccagaagaaaaagcacgtggtatcaccatcaacacttctcacgttgaatatgatactcctgctcgtcactatgcgcacgttgactgcccaggtcacgccgactatgttaaaaacatgatcaccggtgctgctcaaatggatggtgcaatcctggttgttgctgcaactgatggccctatgccacagactcgtgagcacatcctgttgggtcgtcaggttggcgttccttacatcatcgtattcatgaacaaatgtgacatggttgatgatgaagagctgctggaactggtagaaatggaagttcgtgaacttctgtctgcttacgacttccctggcgatgatctgccagttgttcgtggttcagcgctgaaagcactggaaggcgaagctgagtgggaagctaaaatcatcgaactggctggttacctggattcttatatcccagaaccagaacgtgctatcgacaagccgttcctgctgccaatcgaagacgtattctctatctcaggccgtggtactgtagtaactggtcgtgtagagcgcggtatcgttaaagtcggcgaagaagttgaaatcgtcggtatcaaagatactgttaaatctacttgtactggcgttgaaatgttccgcaaattgctggacgaaggccgtgctggtgagaacgttggtgttctgctgcgtggtatcaaacgtgaagatatcgaacgtggtcaagttctggctaaaccaggttctatcaaaccacacactacctttgaatcagaagtttatattctgagcaaagatgaaggcggccgtcatactccgttcttcaaaggctaccgtcctcagttctacttccgtacaactgacgtaaccggtaccatcgaattgccagaaggcgttgaaatggtgatgccaggtgacaacatcaacatgattgttaccctgattcacccaatcgcaatggacgacggcttgcgtttcgcaatccgtgaaggcggccgtactgtaggcgctggtgttgttgctaaagtaatcgcttaa

SEQ ID NO: 27612 - protein, 394 aa, Yersinia pestis
MSKEKFERTKPHVNVGTIGHVDHGKTTLTAAITTVLAKTYGGSARAFDQIDNAPEEKARGITINTSHVEYDTPARHYAHVDCPGHADYVKNMITGAAQMDGAILVVAATDGPMPQTREHILLGRQVGVPYIIVFMNKCDMVDDEELLELVEMEVRELLSAYDFPGDDLPVVRGSALKALEGEAEWEAKIIELAGYLDSYIPEPERAIDKPFLLPIEDVFSISGRGTVVTGRVERGIVKVGEEVEIVGIKDTVKSTCTGVEMFRKLLDEGRAGENVGVLLRGIKREDIERGQVLAKPGSIKPHTTFESEVYILSKDEGGRHTPFFKGYRPQFYFRTTDVTGTIELPEGVEMVMPGDNINMIVTLIHPIAMDDGLRFAIREGGRTVGAGVVAKVIA

SEQ ID NO: 27613 - DNA, 1185 bp, Pasteurella multocida
  CDS (1)..(1185): transl_table=11
atgtctaaagaaaaatttgaacgtacaaaaccgcacgtaaacgtgggtacaatcggccacgttgaccatggtaaaacaactttaaccgcagcaatcacaaccgtattagcaaaacactacggtggtgcagctcgtgcattcgaccaaatcgataacgcgccagaagaaaaagcgcgtggtatcaccatcaacacatcacacgttgaatacgatacaccaactcgtcactacgcacacgttgactgtccaggacacgcggactatgtgaaaaacatgattaccggtgcagctcaaatggacggtgctatcttagttgttgcggcaactgacggtcctatgccacaaacacgtgagcacatccttttaggtcgccaaataggtgttgcttacatcatcgtattcttaaacaaatgcgacatggtggatgatgaagaattattagaattagttgaaatggaagtgcgtgaactcttttctcaatatgatttcccaggtgatgatacaccaatcgtacgtggttcagcgttacaagcgttaaacggtgtagctgagtgggaagagaaaattcttgagttagccaaccacttagatacttacattccagagccacaacgtgcaatcgaccaaccgttccttcttccgattgaagacgtgttctcaatttctggtcgtggtacagtagtaacaggtcgtgttgagcgtggtatcatccgtacaggtgaagaggttgaaattgttggtattaaagcgacaacgaagaccacagtaacaggtgttgagatgttccgtaaattattagacgaaggtcgtgcgggtgagaacgttggtgctttattacgtggtactaaacgtgaagaaatcgaacgtggtcaagtgttagcgaaaccgggttcaatcacgccacacactgattttgaatcagaagtttacgtgttatcaaaagaggaaggtggtcgtcatacaccattcttcaaaggttaccgtccacagttctacttccgtacaacggacgtaacaggtacaatcgaattaccggaaggtgttgagatggtgatgcctggtgataacatcaagatgactgtaagtttgattcacccaatcgcgatggaccaaggtttacgctttgcgattcgtgaaggtggtcgtacagtaggtgcgggtgttgtagcgaaaattatcaaataa

SEQ ID NO: 27614 - protein, 394 aa, Pasteurella multocida
MSKEKFERTKPHVNVGTIGHVDHGKTTLTAAITTVLAKHYGGAARAFDQIDNAPEEKARGITINTSHVEYDTPTRHYAHVDCPGHADYVKNMITGAAQMDGAILVVAATDGPMPQTREHILLGRQIGVAYIIVFLNKCDMVDDEELLELVEMEVRELFSQYDFPGDDTPIVRGSALQALNGVAEWEEKILELANHLDTYIPEPQRAIDQPFLLPIEDVFSISGRGTVVTGRVERGIIRTGEEVEIVGIKATTKTTVTGVEMFRKLLDEGRAGENVGALLRGTKREEIERGQVLAKPGSITPHTDFESEVYVLSKEEGGRHTPFFKGYRPQFYFRTTDVTGTIELPEGVEMVMPGDNIKMTVSLIHPIAMDQGLRFAIREGGRTVGAGVVAKIIK

SEQ ID NO: 27615 - DNA, 1194 bp, Pseudomonas putida
  CDS (1)..(1194): transl_table=11
gtggctaaagaaaaatttgatcgttcccttccccacgttaacgtcggcaccatcggccacgttgaccacggtaagaccactctgaccgcagctctgactcgcgtctgctccgaagttttcggttcggcagtcgttgagttcgacaagatcgactcggctccggaagaaaaagcgcgcggtatcaccatcaacaccgctcacgtcgagtacaactcgaacattcgtcactacgctcacgttgactgcccaggtcacgctgactacgtgaagaacatgatcaccggtgctgcccagatggacggcgcgatcctggtttgctcggccgccgatggtccgatgccgcaaacccgtgagcacatcctgctgtcccgtcaggtaggcgttccgtacatcgtggtcttcctgaacaaggccgacctggtagacgacgctgagctgctggaactggtcgagatggaagttcgcgacctgctgtccacctacgacttcccaggcgacgacactccgatcatcatcggttccgctcgtatggccctggaaggcaaagacgacaacgaaatgggcactaccgctgtcaagaagctggtagaaactctggatgcctacatccctgagccagttcgtgccatcgaccagccgttcctgatgccgatcgaagacgtgttctcgatctcgggtcgtggtaccgttgttaccggtcgtatcgagcgtggcatcgttcgcgttcaggatccgctggaaatcgttggtctgcgtgacaccaccaccaccacctgcaccggtgttgagatgttccgcaagctgctggacgaaggtcgtgctggcgagaactgcggcgttctgctgcgtggtaccaagcgtgacgacgttgagcgtggccaggttctggtcaagccaggttcggtcaagccgcacaccaagttcaccgcagaagtctacgtcctgtcgaaggaagaaggcggccgtcacactccgttcttcaaaggctaccgtccacagttctacttccgtaccactgacgtgaccggtaactgcgaactgccggaaggcgttgaaatggtaatgccaggtgacaacattcagatgactgttaccctgatcaagaccatcgcaatggaagacggtctgcgcttcgctatccgtgaaggcggtcgtaccgtcggcgccggcgttgtggccaaaatcatcgagtaa

SEQ ID NO: 27616 - protein, 397 aa, Pseudomonas putida
MAKEKFDRSLPHVNVGTIGHVDHGKTTLTAALTRVCSEVFGSAVVEFDKIDSAPEEKARGITINTAHVEYNSNIRHYAHVDCPGHADYVKNMITGAAQMDGAILVCSAADGPMPQTREHILLSRQVGVPYIVVFLNKADLVDDAELLELVEMEVRDLLSTYDFPGDDTPIIIGSARMALEGKDDNEMGTTAVKKLVETLDAYIPEPVRAIDQPFLMPIEDVFSISGRGTVVTGRIERGIVRVQDPLEIVGLRDTTTTTCTGVEMFRKLLDEGRAGENCGVLLRGTKRDDVERGQVLVKPGSVKPHTKFTAEVYVLSKEEGGRHTPFFKGYRPQFYFRTTDVTGNCELPEGVEMVMPGDNIQMTVTLIKTIAMEDGLRFAIREGGRTVGAGVVAKIIE

SEQ ID NO: 27617 - DNA, 1440 bp, Glycine max
  CDS (1)..(1440)
atggcaatttcttgggcagcagcaacaacctcaaagctcgcataccctcctcatgtccacttctctccttcaccctcctccaattatctcttccttaaaacccacaaaccctccgccacacacctctcctcttccttcatccaccccaccacaatcctccacctcgccgctgccaacaccaccacccgccgccgctccttcaccgtccgcgccgcccgcggcaagttcgagcgcaagaagccccacgtcaacatcggcaccatcggccacgtcgaccacggtaagaccaccctcaccgccgccctcaccatggccctcgcctccctcggcaatagtgcccctaaaaaatacgacgagatcgacgccgcccccgaggagcgcgcccgcggcatcaccatcaacaccgccaccgtcgagtacgagaccgagaaccgccactacgcccacgtcgactgccccggccacgccgactacgtcaagaacatgatcaccggcgctgcccagatggacggcgccatcctcgtcgtctccggcgccgacggcccaatgccccaaaccaaagaacacattcttttggccaaacaagtcggcgttcccaacattgtcgtcttcctcaacaaacaggaccaggttgatgacgaggagcttcttcagttagtagaattggaggtccgggagcttctttccaagtacgagttccccggagacgatgttccgattatctccggttccgctttgctgtctttggaagctttgatggccaacccgtccatcaagcgcggcgaaaaccaatgggttgataaaatttacgagctcatggaagctgtggatgactacattcccatccctcagcgccaaactgaacttccctttttgctggccattgaggatgttttcaccatcaccggtcgtggaaccgtcgccaccggaagggttgagagaggtactattagggttggagagactgttgatattgttggtgtgaaggacactaggaacaccactgtgactggggtggaaatgtttcagaagattctggatgaggctttggctggggacaatgtgggcttgttgcttaggggtattcagaaaactgatattcagagagggatggttttggctaagcctggaaccattactcctcacaccaagttttctgcaattgtgtatgtcttgaagaaggaagagggtgggaggcactctcccttcttttccggctaccggcctcagttctacatgaggactaccgatgttactggcaaggtaactgaaattatgaatgacaaggatgaagagtccaagatggttatgccgggcgaccgtgttaagctggtggttgaacttattgtgcctgtggcttgtgaacaaggaatgaggtttgctattagagaaggaggcaaaactgttggagctggtgttatccaatccatcattgagtag

SEQ ID NO: 27618 - protein, 479 aa, Glycine max
MAISWAAATTSKLAYPPHVHFSPSPSSNYLFLKTHKPSATHLSSSFIHPTTILHLAAANTTTRRRSFTVRAARGKFERKKPHVNIGTIGHVDHGKTTLTAALTMALASLGNSAPKKYDEIDAAPEERARGITINTATVEYETENRHYAHVDCPGHADYVKNMITGAAQMDGAILVVSGADGPMPQTKEHILLAKQVGVPNIVVFLNKQDQVDDEELLQLVELEVRELLSKYEFPGDDVPIISGSALLSLEALMANPSIKRGENQWVDKIYELMEAVDDYIPIPQRQTELPFLLAIEDVFTITGRGTVATGRVERGTIRVGETVDIVGVKDTRNTTVTGVEMFQKILDEALAGDNVGLLLRGIQKTDIQRGMVLAKPGTITPHTKFSAIVYVLKKEEGGRHSPFFSGYRPQFYMRTTDVTGKVTEIMNDKDEESKMVMPGDRVKLVVELIVPVACEQGMRFAIREGGKTVGAGVIQSIIE

SEQ ID NO: 27619 - DNA, 1194 bp, Streptomyces ramocissimus
  CDS (1)..(1194): transl_table=11
gtggcgaaggcgaagttccagcggaccaaaccgcacgtcaacatcggcaccatcggccacatcgaccacggcaagacgacactcaccgcggcgatcacgaaggtgctgcacgaccggttccccgacctcaacccgttcaccccgttcgaccagatcgacaaggcgcccgaggaacggcagcgcggcatcaccatctcgatcgcccacgtcgagtaccagaccgaggcgcggcactacgcgcacgtcgactgccccggacacgccgactacatcaagaacatgatcaccggcgcggcccagatggacggcgcgatcctggtcgtcgcggccacggacgggccgatgccccagaccaaggaacatgtgctgctggcacggcaggtgggcgtgccctacatcgtcgtcgcgctgaacaagaccgacatggtcgacgacgaggagatcctcgaactcgtggagttggaggtgcgcgagctgctcaccgagtacgagttccccggcgacgacgtcccggtcgtcaaggtgtcggcgctcagggccctggagggcgacccccggtggacccggtcggtactcgaactcctcgacgccgtcgacgagttcgtgcccgagccggtgcgggacgtcgaccggccgttcctgatgccgatcgaggacgtcttcaccatcaccggacgcggcacggtcgtcaccggccggatagagcgcggcacgctgaacgtgaacaccgaggtggagatcatcggcatccacgaacagaggacccggaccacggtcaccggcatcgagatgttccgcaagctcctcgacgagggccgggccggcgagaacgtcggactgctgctgcgcggagtgaagcgggagcaggtcgagcgcggtcaggtcgtcatcaggcccggatcggtcaccccgcacacgcagttcgaggcgcaggcgtacatcctgtccaaggacgagggcggccggcacacgccgttcttcgagaactaccgtccgcagttctacttccgcaccaccgacgtcacgggcgtggtgacgctgccgaagggcaccgagatggtgatgccgggcgacaacaccgccatgcacgtccagctgatccagccgatcgccatggaggaggggctgaagttcgccatccgcgagggcgggcgcacggtcggcgccggccaggtcacgcggatcgtgaagtag

SEQ ID NO: 27620 - protein, 397 aa, Streptomyces ramocissimus
MAKAKFQRTKPHVNIGTIGHIDHGKTTLTAAITKVLHDRFPDLNPFTPFDQIDKAPEERQRGITISIAHVEYQTEARHYAHVDCPGHADYIKNMITGAAQMDGAILVVAATDGPMPQTKEHVLLARQVGVPYIVVALNKTDMVDDEEILELVELEVRELLTEYEFPGDDVPVVKVSALRALEGDPRWTRSVLELLDAVDEFVPEPVRDVDRPFLMPIEDVFTITGRGTVVTGRIERGTLNVNTEVEIIGIHEQRTRTTVTGIEMFRKLLDEGRAGENVGLLLRGVKREQVERGQVVIRPGSVTPHTQFEAQAYILSKDEGGRHTPFFENYRPQFYFRTTDVTGVVTLPKGTEMVMPGDNTAMHVQLIQPIAMEEGLKFAIREGGRTVGAGQVTRIVK

SEQ ID NO: 27621 - DNA, 1185 bp, Vibrio cholerae
  CDS (1)..(1185): transl_table=11
gtgtctaaagaaaaatttgaacgtacgaaaccgcacgtaaacgttggtactatcggccacgttgaccacggtaaaacaactctaactgcagctatctgtactgtacttgcaaaagtatacggcggtaaagctcgtgacttcgcgtcaatcgacaacgcaccagaagagcgtgagcgtggtattacaatcaatacttctcacgtagagtacgatactccaaaccgtcactacgcacacgtagactgtccaggacacgcggattatgttaagaacatgatcaccggtgcagcacagatggacggcggtatcctagttgtagcggcaactgacggtccaatgccacaaactcgtgagcacatcctgctgggtcgccaagtaggtattccttacatcatcgtattcatgaacaagtgtgacatggttgacgatgaagagcttctagagctggtagagatggaagttcgtgagctgctgtctgagtacgatttcccaggtgatgacctgccagtaatccaaggttcagcactaggcgcgctaaacggcgaagcacagtgggaagcgaagattgttgagctagcagaagcactggatacatacattccagagccagagcgtgcagtagacatggcattcctgatgccaatcgaagacgtattctcaatccaaggtcgtggtacagtagtaactggccgtatcgagcgcggcatcctgaaagtgggtgacgaagtagcgatcgttggtatcaaagagacagtaaaaacgacctgtacaggtgtagagatgttccgtaagctgcttgacgaaggtcgtgcaggtgagaacgtaggtgcactgctacgtggtactaagcgtgaagaagtagagcgtggtcaagtactggcgaagccaggttcaatcacaccacacactaagttcgaatcagaagtatacgtactgtcaaaagacgaaggtggccgtcatactccattcttcaaaggttaccgtccacagttctacttccgtacaactgacgtaacaggcagcattgagctaccagaaggcgtagaaatggtaatgccaggcgacaacgtgaagatggttgtagacctgattgcaccaatcgcgatggacgaaggtctacgcttcgctatccgtgaaggtggccgtactgtaggtgctggtgttgtagctaagatcatcgcttaa

SEQ ID NO: 27622 - protein, 394 aa, Vibrio cholerae
MSKEKFERTKPHVNVGTIGHVDHGKTTLTAAICTVLAKVYGGKARDFASIDNAPEERERGITINTSHVEYDTPNRHYAHVDCPGHADYVKNMITGAAQMDGGILVVAATDGPMPQTREHILLGRQVGIPYIIVFMNKCDMVDDEELLELVEMEVRELLSEYDFPGDDLPVIQGSALGALNGEAQWEAKIVELAEALDTYIPEPERAVDMAFLMPIEDVFSIQGRGTVVTGRIERGILKVGDEVAIVGIKETVKTTCTGVEMFRKLLDEGRAGENVGALLRGTKREEVERGQVLAKPGSITPHTKFESEVYVLSKDEGGRHTPFFKGYRPQFYFRTTDVTGSIELPEGVEMVMPGDNVKMVVDLIAPIAMDEGLRFAIREGGRTVGAGVVAKIIA

SEQ ID NO: 27623 - DNA, 1185 bp, Yersinia pestis
  CDS (1)..(1185): transl_table=11
atgtctaaagaaaagtttgaacgtacaaagccgcacgttaatgtgggtactattggccacgttgaccatggtaaaactaccttaactgctgcaatcaccaccgtattggctaaaacctacggcggtagtgctcgtgcattcgaccagatcgacaacgctccggaagaaaaagcgcgtggtatcaccatcaacacttctcacgttgaatatgatactcctgctcgtcactatgcacacgttgactgcccaggtcatgctgactacgttaaaaatatgatcaccggtgctgctcagatggatggagcgatcttggttgttgctgcaaccgatggccctatgccgcagactcgtgagcatatcctgctgggccgccaggttggtgtcccatacattattgtcttcctgaacaaatgtgacatggttgacgatgaagagttgctagagttggttgaaatggaggttcgtgagcttctgtctcaatacgatttcccaggcgacgacactccagtcatccgtggttcagcgttgaaagccctggaaggtgacgctgagtgggaagctaaaattatcgagttggcagaagctctggatagctatattccgcaaccagaacgcgctattgatagaccattcctattgccaattgaagacgtattctctatttctggtcgtggtactgtagttactggtcgtgtagaacgtggtattgttaaggtcggcgaagaagttgaaatcgttggtattatcgatacgattaaaacaacttgtactggcgttgaaatgttccgcaagctgctggatgaaggccgtgctggtgaaaatgttggtgttctgctgcgtggtactaagcgtgacgatgttcagcgtggtcaagtactggcgaaaccaggttctatcaagccacacacgaagtttgagtcagaagtttatattctgagcaaagatgaaggcggccgtcatacaccgttcttcaagggctaccgtcctcagttctacttccgtacaactgacgtgaccggtaccattgagctgccagaaggcgttgaaatggtcatgcctggtgacaacgtaaacatggttgttaacctaattgctcctatcgcaatggatgatggtctgcgcttcgcaattcgtgagggtggccgtactgttggtgctggcgttgttgctaaagtcattgaataa

SEQ ID NO: 27624 - protein, 394 aa, Yersinia pestis
MSKEKFERTKPHVNVGTIGHVDHGKTTLTAAITTVLAKTYGGSARAFDQIDNAPEEKARGITINTSHVEYDTPARHYAHVDCPGHADYVKNMITGAAQMDGAILVVAATDGPMPQTREHILLGRQVGVPYIIVFLNKCDMVDDEELLELVEMEVRELLSQYDFPGDDTPVIRGSALKALEGDAEWEAKIIELAEALDSYIPQPERAIDRPFLLPIEDVFSISGRGTVVTGRVERGIVKVGEEVEIVGIIDTIKTTCTGVEMFRKLLDEGRAGENVGVLLRGTKRDDVQRGQVLAKPGSIKPHTKFESEVYILSKDEGGRHTPFFKGYRPQFYFRTTDVTGTIELPEGVEMVMPGDNVNMVVNLIAPIAMDDGLRFAIREGGRTVGAGVVAKVIE

SEQ ID NO: 27625 - DNA, 1179 bp, Streptomyces coelicolor
  CDS (1)..(1179): transl_table=11
atgtccaagacggcgtacgtccgcaccaaaccgcatctgaacatcggcacgatgggccatgtcgaccacggcaagaccaccctgaccgccgccatcaccaaggtcctcgccgagcgcggggccggcagcaccacccagtacgtttcgttcgaccgcatcgaccgcgccccggaggaggcggcgcgcggcatcaccatcaacatcgcgcacgtcgagtacgaaaccgacacccggcactacgcccacgtcgacatgcccggccacgccgactacgtcaagaacatggtcaccggcgccgcccagctcgacggggcgatcctcgtcgtatccgcgctggacgggatcatgccgcagaccgccgaacacgtgctgctcgcccggcaggtgggcgtcgaccacatcgtggtcgcgctcaacaaggccgacgcgggtgacgaggagctgaccgacctggtcgagctggaggtgcgcgaactgctcaccgcgcacggctacggcggcgacgccgtgcccgtcgtacgggtctcggggctgaaggccctggagggcgacccgcggtggacggcctccgtcgaggcgctgctcgacgccgtggacacgtacgtgcccatgcccgagcggtacctggacgcgccgttcctgctgccggtggagaacgtgctcaccatcaccggccgcggcaccgtcgtcaccggcgccgtcgagcgcggcaccgtgcgcgtcggcgaccgggtcgaggtgctcggggcgtccgtcgagacggtcgtcaccggcctggagaccttcggcaagccgatggaggaggcgcaggccggggacaacgtggcgctgctgctgcgcggggtcgcccgcgacacggtgcgccgcgggcaggtggtcgccgcacccggcagcgtcgtccccgcgcggcgtttccgggcccgggtgtacgtgctctcggcgcgcgagggcgggcgctcgacaccgctcaccaccggataccggccgcagttctacatccgcaccgccgacgtggtcggcgacgtggacctcggcgaggaggccgtcgcccggcccggggacaccgtcaccatgacggtcgagctgggacgggacgtgccgctggagacggggctcggcttcgcgatccgcgagggcggtcgcaccgtgggggcggggaccgtgaccgcggtggagtga

SEQ ID NO: 27626 - protein, 392 aa, Streptomyces coelicolor
MSKTAYVRTKPHLNIGTMGHVDHGKTTLTAAITKVLAERGAGSTTQYVSFDRIDRAPEEAARGITINIAHVEYETDTRHYAHVDMPGHADYVKNMVTGAAQLDGAILVVSALDGIMPQTAEHVLLARQVGVDHIVVALNKADAGDEELTDLVELEVRELLTAHGYGGDAVPVVRVSGLKALEGDPRWTASVEALLDAVDTYVPMPERYLDAPFLLPVENVLTITGRGTVVTGAVERGTVRVGDRVEVLGASVETVVTGLETFGKPMEEAQAGDNVALLLRGVARDTVRRGQVVAAPGSVVPARRFRARVYVLSAREGGRSTPLTTGYRPQFYIRTADVVGDVDLGEEAVARPGDTVTMTVELGRDVPLETGLGFAIREGGRTVGAGTVTAVE

SEQ ID NO: 27627 - DNA, 1170 bp, Streptomyces ramocissimus
  CDS (1)..(1170): transl_table=11
atgtccaagacggcatacgtgcgcaccaaaccgcatctgaacatcggcacgatgggtcatgtcgaccacggcaagaccacgttgaccgccgccatcaccaaggtcctcgccgagcgtggctccgggacgttcgtcccgttcgaccgcatcgaccgggccccggaggaggccgcgcgcggcatcaccatcaacatcgcgcacgtcgagtacgagaccgacacccggcactacgcgcacgtcgacatgccgggccacgccgactacgtcaagaacatggtcaccggcgccgcgcagctcgacggggcgatcctcgtcgtctccgcgctcgacgggatcatgccgcagaccgccgaacacgtcctgctcgcccggcaggtgggcgtcgaccacatcgtcgtcgccctcaacaaggccgacgcgggcgacgaggagctcaccgacctcgtcgagctggaggtccgcgatctgctctccgagcacggctacggcggcgacggtgcccccgtcgtacgggtctcggggctgaaggcgctggagggcgaccccaagtggacggcgtccatcgaggcgctgctcgacgcggtggacacctacgtgccgatgccggagcggtatgtggacgcgccgttcctgctgcccgtggagaacgtgctcaccatcaccggtcgggggaccgtggtcaccggagccgtcgagcggggcaccgtgcgcgtgggcaaccgggtcgaagtgctcggcgccgggctggagaccgtggtcaccggcctggagacgttcggcaagcccatggacgaggcgcaggccggggacaacgtggcgctgttgctgcgtggggttccgcgggacgccgtacggcgtgggcatgtggtcgcggcgccggggagcgtggtgccccggagtcgattctccgcgcaggtgtatgtgctctcggcccgcgagggcggtcgtacgactcctgtcaccagcgggtatcggccgcagttctacatccgtacggcggatgtggtgggggacgtcgacctgggggaggtgggggtcgctcggcctggggagacggtttcgatgatcgtcgagttgggccgggaggttccgctggagcccgggttggggttcgccattcgtgagggcggcaggaccgtgggggcggggaccgttacggcccttgtgtga

SEQ ID NO: 27628 - protein, 389 aa, Streptomyces ramocissimus
MSKTAYVRTKPHLNIGTMGHVDHGKTTLTAAITKVLAERGSGTFVPFDRIDRAPEEAARGITINIAHVEYETDTRHYAHVDMPGHADYVKNMVTGAAQLDGAILVVSALDGIMPQTAEHVLLARQVGVDHIVVALNKADAGDEELTDLVELEVRDLLSEHGYGGDGAPVVRVSGLKALEGDPKWTASIEALLDAVDTYVPMPERYVDAPFLLPVENVLTITGRGTVVTGAVERGTVRVGNRVEVLGAGLETVVTGLETFGKPMDEAQAGDNVALLLRGVPRDAVRRGHVVAAPGSVVPRSRFSAQVYVLSAREGGRTTPVTSGYRPQFYIRTADVVGDVDLGEVGVARPGETVSMIVELGREVPLEPGLGFAIREGGRTVGAGTVTALV

SEQ ID NO: 27629 - DNA, 1437 bp, Nicotiana sylvestris
  CDS (1)..(1437)
atggcttcaatttcagcagccaccgccacctcctccactaagcttgtatcatccaactccaccaatcctcttcttccttcctccactaaaccctctaagcttatcctatcctcttcctttacccctaattgttccacccttttcctccactcacccgctaccccttcttctactgccacccatcgccaccgccgttttactgtccgcgctgcccgtggcaaattcgagcggaaaaaaccccatgtcaacatcggtactattggccatgttgaccacggaaagactactctcaccgctgctttaaccatggctcttgcttctatgggaaactccgcccctaagaaatacgacgaaattgatgccgccccagaagagcgtgctcgtggtattactattaacactgctactgttgagtacgagactgagaaccgtcactacgcccacgtggattgccctggtcacgctgattatgtcaagaatatgattaccggtgctgcccaaatggacggcgctattcttgtttgttcaggtgctgatggtcccatgccacagactaaggaacacattttgcttgctaagcaagtaggtgtccccaacatggttgtgttcttgaacaaacaagatcaggttgatgatgaggagctgcttcagcttgttgagttggaggtaagagagttattgtcaagttatgagtttcctggtgatgatattcctattatttctggctctgctcttttggctttagaggctttgatggctaatcctagtattaagagaggtgaaaatcaatgggttgataagatatatgagttgatggacgctgttgatagttatattcctattccagttaggcaaactgaattgcctttcttgatggctattgaagatgtgttttccattactggtagaggtactgtggcgacggggagggtagagagagggactgttaggattggagacactgttgatattgtaggtttgaaggacactaggagtactaccgtgacgggtgttgagatgtttcaaaagattttggatgaagcaatggctggagacaatgtggggttgttgttgagaggtattcaaaagattgatattcagagaggaatggtgttggcaaaacccggaacaattacccctcacaccaagtttgaagcgattgtgtatgtgttgaagaaggaggagggtggtaggcattcccccttcttttcagggtacaggcctcagttttacatgaggactactgatgtgaccggaaaggttacttccattacgactgataaaggagaggaatctaagatggtcatgcctggtgatcgtgtgaacttggtggttgagctcattatgccggtggcttgtgagcaagggatgagatttgccatcagggaaggaggaaagactgttggagctggtgtcattcagaaaattatcgagtga

SEQ ID NO: 27630 - protein, 478 aa, Nicotiana sylvestris
MASISAATATSSTKLVSSNSTNPLLPSSTKPSKLILSSSFTPNCSTLFLHSPATPSSTATHRHRRFTVRAARGKFERKKPHVNIGTIGHVDHGKTTLTAALTMALASMGNSAPKKYDEIDAAPEERARGITINTATVEYETENRHYAHVDCPGHADYVKNMITGAAQMDGAILVCSGADGPMPQTKEHILLAKQVGVPNMVVFLNKQDQVDDEELLQLVELEVRELLSSYEFPGDDIPIISGSALLALEALMANPSIKRGENQWVDKIYELMDAVDSYIPIPVRQTELPFLMAIEDVFSITGRGTVATGRVERGTVRIGDTVDIVGLKDTRSTTVTGVEMFQKILDEAMAGDNVGLLLRGIQKIDIQRGMVLAKPGTITPHTKFEAIVYVLKKEEGGRHSPFFSGYRPQFYMRTTDVTGKVTSITTDKGEESKMVMPGDRVNLVVELIMPVACEQGMRFAIREGGKTVGAGVIQKIIE

SEQ ID NO: 27631 - DNA, 1458 bp, Nicotiana sylvestris
  CDS (1)..(1458)
atggcttcaatttcagcagcttctgccacagctacagcttctacaaagcttgcatacccttattccccttcttcctcaagcagcagcagcaacactgctgctgtattcccttcaaattcctcaaagcttatcctttcctcttcttttacacccaccccttcaacccttttcctccactcaccaacaactactccttccaccacccacccccgtcggttcactgtccgcgctgcacgtggcaaattcgagcgtaaaaaacctcacgtcaacattggtacaattggccacgttgaccatggaaagaccacactcacagctgctttgaccatggcgcttgcctctatgggcaactccgcccccaagaaatatgacgaaattgatgctgcccctgaagaaagggcgcgtggtattactatcaacactgccactgtggaatatgaaacggaaaacagacattatgcacacgtggactgcccggggcatgctgattatgtcaagaacatgattactggtgctgcccaaatggatggggcaattcttgttgtgtcaggtgctgatggcccaatgccacagactaaagagcatattttgttagctaagcaagttggggtccctaatatggttgttttcttgaacaaacaagaccaagttgatgatgaggagttacttgagcttgttgagttggaggtaagagaattattgtcaagttatgagttccctggtgatgaaattcctattatttctggttctgcacttttagctttagaggctttgatggctaatcctagtattaaaaggggtgaaaatcaatgggttgataagatttatcaattgatggataatgttgatgaatatatccctatcccacaaagacaaactgaattgcctttcttgatggctattgaggatgttttctcgattaccggtagaggtactgtggcgacggggagagtagagagagggactgttaaggttggggaaattgttgatatagttggattgaaggatactaggaatactacagtgacaggggttgagatgtttcagaagattttggatgaagcgatggcgggagataatgtgggattgttgttgagaggtattcagaagattgatattcagagagggatggtgttggcgaagcccggaacaattactccgcacacaaagtttgaagctttggtgtatgtgttgaagaaggaagagggaggaaggcattccccgttctttgcgggttataggcctcaattttacatgaggacaactgatgtgactggaaaggttactgtgattatgagtgacaaaggagaggaatctaagatggtcatgcctggcgatcgtgtaaacatggtggttgagcttatcatgccggttgcatgtgagcaagggatgaggtttgctatcagggaaggaggaaagactgttggagctggtgttattcagaaaatcttagaatga

SEQ ID NO: 27632 - protein, 485 aa, Nicotiana sylvestris
MASISAASATATASTKLAYPYSPSSSSSSSNTAAVFPSNSSKLILSSSFTPTPSTLFLHSPTTTPSTTHPRRFTVRAARGKFERKKPHVNIGTIGHVDHGKTTLTAALTMALASMGNSAPKKYDEIDAAPEERARGITINTATVEYETENRHYAHVDCPGHADYVKNMITGAAQMDGAILVVSGADGPMPQTKEHILLAKQVGVPNMVVFLNKQDQVDDEELLELVELEVRELLSSYEFPGDEIPIISGSALLALEALMANPSIKRGENQWVDKIYQLMDNVDEYIPIPQRQTELPFLMAIEDVFSITGRGTVATGRVERGTVKVGEIVDIVGLKDTRNTTVTGVEMFQKILDEAMAGDNVGLLLRGIQKIDIQRGMVLAKPGTITPHTKFEALVYVLKKEEGGRHSPFFAGYRPQFYMRTTDVTGKVTVIMSDKGEESKMVMPGDRVNMVVELIMPVACEQGMRFAIREGGKTVGAGVIQKILE

SEQ ID NO: 27633 - DNA, 1176 bp, Agrobacterium tumefaciens
  CDS (1)..(1176): transl_table=11
atggcaaagagcaagtttgagcgcaataagccgcacgtcaacattggcacgatcggtcacgtcgaccacggcaagacgtcgttgactgctgcgatcacgaagtatttcggcgagttcaaggcgtatgaccaaatcgacgccgctcctgaggaaaaggcccgtggtatcacgatttcgacggcgcacgttgagtatgagacgcctgcgcgtcactacgcccacgttgactgccccggccacgccgactatgtgaagaacatgatcaccggtgctgcccagatggacggcgcgatcctggtttgctcggctgccgacggcccgatgccacagacccgcgagcacatcctgcttgcccgtcaggttggcgttccggccatcgtcgtgttcctcaacaaggtcgaccaggttgacgacgccgagcttctcgagctcgtcgagcttgaagttcgcgaacttctgtcgtcctacgacttcccgggcgacgatatcccgatcatcaagggttcggcacttgctgctcttgaagattctgacaagaagatcggtgaagacgcgatccgcgagctgatggctgctgtcgacgcctacatcccgacgcctgagcgtccgatcgaccagccgttcctgatgccgatcgaagacgtgttctcgatctcgggtcgtggtacggttgtgacgggtcgcgttgagcgcggtatcgtcaaggttggtgaagaagtcgaaatcgtcggcatccgtccgacctcgaagacgactgttaccggcgttgaaatgttccgcaagctgctcgaccagggccaggccggcgacaacatcggtgcactcgttcgcggcgttacccgtgacggcgtcgagcgtggtcagatcctgtgcaagccgggttcggtcaagccgcacaagaagttcatggcagaagcctacatcctgacgaaggaagaaggcggccgtcatacgccgttcttcacgaactaccgtccgcagttctacttccgtacgactgacgttaccggtatcgtttcgcttcctgaaggcacggaaatggttatgcctggcgacaacgtcactgttgaagtcgagctgatcgttccgatcgcgatggaagaaaagctgcgcttcgctatccgcgaaggcggccgtaccgtcggcgccggcatcgttgcttcgatcgtcgagtaa

SEQ ID NO: 27634 - protein, 391 aa, Agrobacterium tumefaciens
MAKSKFERNKPHVNIGTIGHVDHGKTSLTAAITKYFGEFKAYDQIDAAPEEKARGITISTAHVEYETPARHYAHVDCPGHADYVKNMITGAAQMDGAILVCSAADGPMPQTREHILLARQVGVPAIVVFLNKVDQVDDAELLELVELEVRELLSSYDFPGDDIPIIKGSALAALEDSDKKIGEDAIRELMAAVDAYIPTPERPIDQPFLMPIEDVFSISGRGTVVTGRVERGIVKVGEEVEIVGIRPTSKTTVTGVEMFRKLLDQGQAGDNIGALVRGVTRDGVERGQILCKPGSVKPHKKFMAEAYILTKEEGGRHTPFFTNYRPQFYFRTTDVTGIVSLPEGTEMVMPGDNVTVEVELIVPIAMEEKLRFAIREGGRTVGAGIVASIVE

SEQ ID NO: 27635 - DNA, 1176 bp, Agrobacterium tumefaciens
  CDS (1)..(1176): transl_table=11
atggcaaagagcaagtttgagcgcaataagccgcacgtcaacattggcacgatcggtcacgtcgaccacggcaagacgtcgttgactgctgcgatcacgaagtatttcggcgagttcaaggcgtatgaccaaatcgacgccgctcctgaggaaaaggcccgtggtatcacgatttcgacggcgcacgttgagtatgagacgcctgcgcgtcactacgcccacgttgactgccccggccacgccgactatgtgaagaacatgatcaccggtgctgccgagatggacggcgcgatcctggtttgctcggctgccgacggcccgatgccacagacccgcgagcacatcctgcttgcccgtcaggtgggcgttccggccatcgtcgtgttcctcaacaaggtcgaccaggttgacgacgccgagcttctcgagctcgtcgagcttgaagttcgcgaacttctgtcgtcctacgacttcccgggcgacgatatcccgatcatcaagggttcggcacttgctgctcttgaagattctgacaagaagatcggtgaagacgcgatccgcgagctgatggctgctgtcgacgcctacatcccgacgcctgagcgtccgatcgaccagccgttcctgatgccgatcgaagacgtgttctcgatctcgggtcgtggtacggttgtgacgggtcgcgttgagcgcggtatcgtcaaggttggtgaagaagtcgaaatcgtcggcatccgtccgacctcgaagacgactgttaccggcgttgaaatgttccgcaagctgctcgaccagggccaggccggcgacaacatcggtgcactcgttcgcggcgttacccgtgacggcgtcgagcgtggtcagatcctgtgcaagccgggttcggtcaagccgcacaagaagttcatggcagaagcctacatcctgacgaaggaagaaggcggccgtcatacgccgttcttcacgaactaccgtccgcagttctacttccgtacgactgacgttaccggtatcgtttcgcttcctgaaggcacggaaatggttatgcctggcgacaacgtcactgttgaagtcgagctgatcgttccgatcgcgatggaagaaaagctgcgcttcgctatccgcgaaggcggccgtaccgtcggcgccggcatcgttgcttcgatcgtcgagtaa

SEQ ID NO: 27636 - protein, 391 aa, Agrobacterium tumefaciens
MAKSKFERNKPHVNIGTIGHVDHGKTSLTAAITKYFGEFKAYDQIDAAPEEKARGITISTAHVEYETPARHYAHVDCPGHADYVKNMITGAAEMDGAILVCSAADGPMPQTREHILLARQVGVPAIVVFLNKVDQVDDAELLELVELEVRELLSSYDFPGDDIPIIKGSALAALEDSDKKIGEDAIRELMAAVDAYIPTPERPIDQPFLMPIEDVFSISGRGTVVTGRVERGIVKVGEEVEIVGIRPTSKTTVTGVEMFRKLLDQGQAGDNIGALVRGVTRDGVERGQILCKPGSVKPHKKFMAEAYILTKEEGGRHTPFFTNYRPQFYFRTTDVTGIVSLPEGTEMVMPGDNVTVEVELIVPIAMEEKLRFAIREGGRTVGAGIVASIVE

SEQ ID NO: 27637 - DNA, 1179 bp, Apple proliferation phytoplasma
  CDS (1)..(1179): transl_table=11
atgtctagtaaagtatttttaagagataaagtgcatgttaatgtaggaactattggtcatgttgatcatggaaaaactactttgactgctgctattactaaaattttatcaacaaaaggcttagcagaaaataaatcatatgatcaaattgataaaactaaagaagaaaaagaacgtggtataactattaacactacccatgtttcttatgaaactgtaaaaaggcattatgctcatgttgattgtcctggacacgctgattatgttaaaaatatgattaccggtgctgcgcaaatggacgctggtattttagttgtttcagcttatcatggagtaatgcctcaaactcgtgaacatgttttgttagctggacaagttggtatctctaaattgatagtatttttaaataaatgtgatttagttaaagaagaagaatggattcatttagtagaaatggaagttcgtgaattattaaacgaatataaatttgatggtgataaaactccttttgttagaggttcagctttaaaagctttagaaggcacagatgttgaaggtatcaataaattattagaagttttagatgaatatattgaagatccaattcgtgatgtagaaaaaccatttttaatgccggttgaaggagttcatactattactggtcgtggaactgttgctactggtcgtgtagaaagaggaaaaattaagattagtgaagaagttgaaattattggtttaaaagaaactaaaaaagctattattactggtcttgaaatgtttaaaaaagaattagattttgctcaagctggtgataatgttggtattttattacgcggtattactcgtgatcaaattgaaagaggtcaagttttagctaaaccaggttctttaaatgcttatcataaatttttgtctcaagtttatattttgactcaacaagaaggtggacgtcatactgcatttttttctaattacagaccacaattttattttcgtactacagatgttactggtttcattaaattaaaaaaagatgttaaaatggtattaccaggtgatagaacagaacttattgttgaattaaatcatccaatcgctattgaagcaggcactaaattttctattcgtgaaggtggacgcacaataggagctggtacagtaactgaaattattgaataa

SEQ ID NO: 27638 - protein, 392 aa, Apple proliferation phytoplasma
MSSKVFLRDKVHVNVGTIGHVDHGKTTLTAAITKILSTKGLAENKSYDQIDKTKEEKERGITINTTHVSYETVKRHYAHVDCPGHADYVKNMITGAAQMDAGILVVSAYHGVMPQTREHVLLAGQVGISKLIVFLNKCDLVKEEEWIHLVEMEVRELLNEYKFDGDKTPFVRGSALKALEGTDVEGINKLLEVLDEYIEDPIRDVEKPFLMPVEGVHTITGRGTVATGRVERGKIKISEEVEIIGLKETKKAIITGLEMFKKELDFAQAGDNVGILLRGITRDQIERGQVLAKPGSLNAYHKFLSQVYILTQQEGGRHTAFFSNYRPQFYFRTTDVTGFIKLKKDVKMVLPGDRTELIVELNHPIAIEAGTKFSIREGGRTIGAGTVTEIIE

SEQ ID NO: 27639 - DNA, 1218 bp, Aquifex pyrophilus
  CDS (1)..(1218): transl_table=11
atggccaaggagaagtttgagaggacaaaagaacacgtaaacgtgggtaccataggtcacgttgaccacggaaaatctacgcttacatcagctataacatgcgttctcgcagcaggactcgttgaaggtggtaaagctaagtgcttcaaatacgaagaaattgacaaagctccagaagaaaaagaaagaggtataaccataaacatcactcacgttgagtacgaaaccgctaagagacactacgcacacgttgactgccccggacacgcggactacatcaagaacatgattaccggtgcggcccagatggacggggctatactcgtggtttccgcagctgacggcccgatgccccaaaccagagaacacgtccttctcgcaagacaggttaacgttccctacatagtcgttttcatgaacaagtgtgatatggttgacgacgaagagctccttgagctcgttgagcttgaagtgagagagcttctcagcaaatacgagtatcccggagacgaagttcccgtaataagaggttccgctctgggagcccttcaggagcttgaacaaaactctcccggaaagtgggtaggaagcataaaggaacttctgaacgcgatggacgagtacataccgacacctgagagagaggttgacaagcccttcctgatgcccatagaagacgtgttcagcatatcgggacgtggaacggttgtgaccggaagagtggaaaggggcgtgttgagacccggagatgaggtagagatagtaggactgagggaagagcccttaaagactgtggcaacgtccatagagatgttcaggaaggtgcttgatgaggcgcttcccggagacaatattggagttcttctgaggggagtaggaaaggacgacgtagagaggggacaggtgcttgcccagcccgggagcgtgaaggcacacagaaagttcagggcacaggtatacgttcttagcaaggaggaaggaggaaggcacacgcctttctttgtgaactacaggccacagttttacttcaggaccgctgatgtaacgggaactgtagtgaagctacctgaaggcgttgagatggtgatgcccggggataacgttgagcttgaggtagagcttatagcgcctgtagcacttgaggaaggactgaggtttgcgataagggaaggtggaaggactgtaggtgctggtgtcgttaccaaaatccttgactga

SEQ ID NO: 27640 - protein, 405 aa, Aquifex pyrophilus
MAKEKFERTKEHVNVGTIGHVDHGKSTLTSAITCVLAAGLVEGGKAKCFKYEEIDKAPEEKERGITINITHVEYETAKRHYAHVDCPGHADYIKNMITGAAQMDGAILVVSAADGPMPQTREHVLLARQVNVPYIVVFMNKCDMVDDEELLELVELEVRELLSKYEYPGDEVPVIRGSALGALQELEQNSPGKWVGSIKELLNAMDEYIPTPEREVDKPFLMPIEDVFSISGRGTVVTGRVERGVLRPGDEVEIVGLREEPLKTVATSIEMFRKVLDEALPGDNIGVLLRGVGKDDVERGQVLAQPGSVKAHRKFRAQVYVLSKEEGGRHTPFFVNYRPQFYFRTADVTGTVVKLPEGVEMVMPGDNVELEVELIAPVALEEGLRFAIREGGRTVGAGVVTKILD

SEQ ID NO: 27641 - DNA, 1431 bp, Arabidopsis thaliana
  CDS (1)..(1431)
atggcgatttcggctccagccgcttgttcttcctcctctagaattctctgttcctactcctctccttctccttctctctgtcccgccatttccacctctggtaaactcaaaaccctaactctctcttcctccttcctcccttcttactcattaaccaccacctccgcttctcaatccactcgtcgctccttcaccgtccgcgccgctcgtggaaagttcgagaggaagaagcctcatgtcaacatcggaaccatcggtcatgttgaccatgggaagactactttaaccgcagctctcaccatggctctcgcttcaattggttccagcgtcgctaaaaagtacgacgagattgacgctgcgccggaggagagagctcgtggtatcacaatcaacactgctactgtggagtacgagactgagaatcgtcactacgctcacgttgattgtcctggtcacgctgattacgttaagaatatgattaccggagctgcacagatggacggagctatcctcgttgtttccggcgccgatggtcctatgcctcagactaaagagcatatccttttggctaagcaggttggtgttcctgatatggttgtgtttcttaacaaagaggatcaagtagatgatgcagagttgctagagctcgttgagcttgaggttcgtgagcttctctcgtcttatgaatttaacggtgatgatattccgattatctctggttctgctcttttagctgttgagactcttactgagaatcctaaggttaagagaggtgataacaaatgggtagataagatttatgaacttatggatgctgttgatgattatatccctatccctcagagacaaactgaattgccattcttgttagctgttgaggatgtgttctctatcactggacgtggtactgtggctacagggcgtgttgagagaggtacggttaaggtaggagagactgtagatttagtgggtttaagggagactaggagttacactgtcactggggtggaaatgtttcagaagattcttgatgaggctttagctggtgacaatgtagggttgttgcttaggggtattcaaaaggctgatattcagagaggtatggttttagctaagccgggatcgattactccacataccaagtttgaagcaattatctatgtgttgaagaaagaggaaggtggaaggcattctccattctttgcaggttacaggcctcagttctacatgaggacgactgatgttacgggtaaagtgacgaagatcatgaacgataaagatgaagagtcgaagatggttatgcccggtgatcgagtgaagattgttgttgagcttattgtgccggtggcttgtgaacaagggatgaggtttgctatcagagaaggaggaaagactgttggtgctggagttattgggacgatcctcgaatga

SEQ ID NO: 27642 - protein, 476 aa, Arabidopsis thaliana
MAISAPAACSSSSRILCSYSSPSPSLCPAISTSGKLKTLTLSSSFLPSYSLTTTSASQSTRRSFTVRAARGKFERKKPHVNIGTIGHVDHGKTTLTAALTMALASIGSSVAKKYDEIDAAPEERARGITINTATVEYETENRHYAHVDCPGHADYVKNMITGAAQMDGAILVVSGADGPMPQTKEHILLAKQVGVPDMVVFLNKEDQVDDAELLELVELEVRELLSSYEFNGDDIPIISGSALLAVETLTENPKVKRGDNKWVDKIYELMDAVDDYIPIPQRQTELPFLLAVEDVFSITGRGTVATGRVERGTVKVGETVDLVGLRETRSYTVTGVEMFQKILDEALAGDNVGLLLRGIQKADIQRGMVLAKPGSITPHTKFEAIIYVLKKEEGGRHSPFFAGYRPQFYMRTTDVTGKVTKIMNDKDEESKMVMPGDRVKIVVELIVPVACEQGMRFAIREGGKTVGAGVIGTILE

SEQ ID NO: 27643 - DNA, 1188 bp, Bacillus anthracis
  CDS (1)..(1188): transl_table=11
atggctaaagctaaattcgaacgttctaaaccccatgttaacatcggtacaatcggccacgttgaccatggtaaaactacattaactgctgcgatcactacagtacttgcaaaagctggtggtgctgaagcacgcggatacgatcaaatcgatgctgctccagaagaaagagagcgcggtatcacaatctcaactgcacacgttgagtacgaaactgaaactcgtcactatgcacacgttgactgcccaggtcacgctgactatgttaaaaacatgatcactggtgctgctcaaatggacggcggtatcttagtagtatctgctgctgatggcccaatgcctcaaactcgtgagcacatccttctttctcgtcaagtaggtgtaccttacatcgttgtattcttaaacaaatgcgacatggtagacgacgaagaattattagaattagtagaaatggaagttcgcgacctattatctgaatacggattcccaggcgacgacattcctgtaatcaaaggttctgctcttaaagctcttcaaggagaagctgattgggaagcaaaaatcattgaattaatggctgaagttgatgcttacatcccaactccagaacgtgaaactgacaaaccattcttaatgcctgtagaggacgtattctctatcacaggtcgtggtacagttgctactggtcgtgttgagcgcggtatcgttaaagttggtgacgtagtagaaatcatcggtcttgctgaagaaaatgcttctacaactgtaactggtgtagagatgttccgtaaacttcttgaccaagctcaagctggagacaacatcggtgctttacttcgtggggttgctcgtgaagacatccaacgtggacaagtacttgcaaaaagcggttctgtaaaagctcacgctaaattcaaagctgaagttttcgtattatctaaagaagaaggtggacgtcacactccattcttcgctaactaccgtcctcagttctacttccgtacaactgacgtaactggtatcatccaattaccagaaggtactgaaatggtaatgcctggtgacaacatcgaaatgactatcgaacttatcgctccaatcgctatcgaagagggaactaaattctctattcgtgaaggtggacgtacagtaggttacggtgtagttgctactatcgttgagtaa

SEQ ID NO: 27644 - protein, 395 aa, Bacillus anthracis
MAKAKFERSKPHVNIGTIGHVDHGKTTLTAAITTVLAKAGGAEARGYDQIDAAPEERERGITISTAHVEYETETRHYAHVDCPGHADYVKNMITGAAQMDGGILVVSAADGPMPQTREHILLSRQVGVPYIVVFLNKCDMVDDEELLELVEMEVRDLLSEYGFPGDDIPVIKGSALKALQGEADWEAKIIELMAEVDAYIPTPERETDKPFLMPVEDVFSITGRGTVATGRVERGIVKVGDVVEIIGLAEENASTTVTGVEMFRKLLDQAQAGDNIGALLRGVAREDIQRGQVLAKSGSVKAHAKFKAEVFVLSKEEGGRHTPFFANYRPQFYFRTTDVTGIIQLPEGTEMVMPGDNIEMTIELIAPIAIEEGTKFSIREGGRTVGYGVVATIVE

SEQ ID NO: 27645 - DNA, 1185 bp, Bacteroides fragilis
  CDS (1)..(1185): transl_table=11
atggctaaagagaaatttgaacgtaccaaaccgcacgtaaacattggtacaatcggtcacgttgaccacggtaaaaccactttgactgctgctatcactactgtgttggcaaagaaaggtctttctgaacttcgttctttcgattctatcgataatgctcctgaagaaaaagaaagaggtattactatcaatacttcacacgttgagtatgaaactgctaaccgtcactacgcacacgttgactgtccgggtcacgctgactacgtaaagaacatggttactggtgctgctcagatggacggtgctatcattgtagttgctgctactgatggtccgatgcctcagactcgtgagcacatccttttggctcgtcaggtaaacgttccgaagctggttgtattcatgaacaagtgcgatatggttgaagatgctgagatgttggaacttgttgaaatggaaatgagagaattgctttcattctatgatttcgacggtgacaatactccgatcattcagggttctgctcttggtgcattgaacggcgtagaaaaatgggaagacaaagtaatggaactgatggaagctgttgatacttggattccactgcctccgcgcgatgttgataaacctttcttgatgccggtagaagatgtgttctctatcacaggtcgtggtactgtagctacaggtcgtatcgaaactggtgttatccatgtaggtgatgaaatcgaaatcctcggtttgggtgaagataagaaatcagttgtaacaggtgttgaaatgttccgcaaacttctggatcagggtgaagctggtgacaacgtaggtctgttgcttcgtggtgttgacaagaacgaaatcaaacgtggtatggttctttgtaagccgggtcagattaaacctcactctaaattcaaagcagaggtttatatcctgaagaaagaagaaggtggtcgtcacactccattccataacaaatatcgtcctcagttctatctgcgtactatggactgtacaggtgaaatcactcttccggaaggaactgaaatggtaatgccgggtgataacgtaaccatcactgtagagttgatctatccggttgcactgaacatcggtcttcgtttcgctatccgcgaaggtggacgtacagtaggtgctggtcagattactgaaattatcgactaa

SEQ ID NO: 27646 - protein, 394 aa, Bacteroides fragilis
MAKEKFERTKPHVNIGTIGHVDHGKTTLTAAITTVLAKKGLSELRSFDSIDNAPEEKERGITINTSHVEYETANRHYAHVDCPGHADYVKNMVTGAAQMDGAIIVVAATDGPMPQTREHILLARQVNVPKLVVFMNKCDMVEDAEMLELVEMEMRELLSFYDFDGDNTPIIQGSALGALNGVEKWEDKVMELMEAVDTWIPLPPRDVDKPFLMPVEDVFSITGRGTVATGRIETGVIHVGDEIEILGLGEDKKSVVTGVEMFRKLLDQGEAGDNVGLLLRGVDKNEIKRGMVLCKPGQIKPHSKFKAEVYILKKEEGGRHTPFHNKYRPQFYLRTMDCTGEITLPEGTEMVMPGDNVTITVELIYPVALNIGLRFAIREGGRTVGAGQITEIID

SEQ ID NO: 27647 - DNA, 1188 bp, Bacillus stearothermophilus
  CDS (1)..(1188): transl_table=11
atggctaaagcgaaatttgagcgcacgaaaccgcacgtcaacattggcacgatcggccacgttgaccatgggaaaacgacgctgacagctgcgatcacgacggttcttgcgaaacaagggaaagccgaagcaaaagcgtacgaccaaatcgacgcagctccggaagagcgtgaacgcgggatcacgatttcgacggcccacgtcgagtatgaaacagaggctcgtcactacgcgcacgttgactgcccgggccacgctgactacgtcaaaaacatgatcacgggcgcagcgcaaatggacggtgcaatccttgttgtatcggcagctgacggtccgatgccgcaaacgcgcgaacacattcttctctcccgccaagtcggcgttccgtacatcgttgttttcttgaacaaatgcgacatggtggacgacgaagaattgcttgaactcgttgaaatggaagttcgcgaccttctctctgaatacgacttcccgggcgatgaagtgccggttatcaaaggttcggcattaaaagcgctcgaaggcgatccgaaatgggaagaaaaaatcattgaattgatgaacgcggttgatgagtacatcccgactccgcaacgtgaagttgacaaaccgttcatgatgccgattgaggacgttttctcgatcacaggccgtggtacggttgcgacgggccgtgttgagcgtggtacgctcaaagtcggtgacccggttgaaatcatcggtctttctgacgagccgaaagccacgacggttacgggtgttgaaatgttccgtaaacttcttgaccaagcagaagctggagacaacatcggtgcgcttctccgcggtgtatcgcgcgacgaagttgagcgtggccaagtattggcaaaaccgggctcaatcacgccgcatacgaaatttaaagcacaagtttacgttctgacgaaagaggaaggcggacgccatactccgttcttctcgaactatcgtccgcaattctacttccgcacaacggacgtaacaggcatcatcacgcttccggaaggcgttgaaatggtcatgcctggcgacaacgttgagatgacggttgagctgatcgcgccgatcgcgatcgaggaaggaacgaaattctcgatccgtgaaggcggccgtacagttggcgctggttccgtatcggaaatcatcgagtaa

SEQ ID NO: 27648 - protein, 395 aa, Bacillus stearothermophilus
MAKAKFERTKPHVNIGTIGHVDHGKTTLTAAITTVLAKQGKAEAKAYDQIDAAPEERERGITISTAHVEYETEARHYAHVDCPGHADYVKNMITGAAQMDGAILVVSAADGPMPQTREHILLSRQVGVPYIVVFLNKCDMVDDEELLELVEMEVRDLLSEYDFPGDEVPVIKGSALKALEGDPKWEEKIIELMNAVDEYIPTPQREVDKPFMMPIEDVFSITGRGTVATGRVERGTLKVGDPVEIIGLSDEPKATTVTGVEMFRKLLDQAEAGDNIGALLRGVSRDEVERGQVLAKPGSITPHTKFKAQVYVLTKEEGGRHTPFFSNYRPQFYFRTTDVTGIITLPEGVEMVMPGDNVEMTVELIAPIAIEEGTKFSIREGGRTVGAGSVSEIIE

SEQ ID NO: 27649 - DNA, 1191 bp, Bacillus subtilis
  CDS (1)..(1191): transl_table=11
atggctaaagaaaaattcgaccgttccaaatcacatgccaatattggtacaattggacacgttgaccatggtaaaacaactttaactgctgctatcacaacagtacttcataagaaatctggtaaaggtacagctatggcgtacgatcaaattgatggtgctccagaagaacgcgagcgcggtatcacaatctctactgcacacgttgagtacgaaactgaaactcgtcactatgcacacgttgactgcccaggacacgctgactatgttaaaaacatgatcactggtgctgcgcaaatggacggagctatccttgtagtatctgctgctgatggcccaatgccacaaactcgtgagcacatccttctttctaaaaacgttggtgtaccatacatcgttgtattcttaaacaaatgcgacatggtagacgacgaagagcttcttgaactagttgaaatggaagttcgcgatcttcttagcgaatacgacttccctggtgatgatgtaccagttgttaaaggttctgctcttaaagctcttgaaggagacgctgagtgggaagctaaaatcttcgaacttatggatgcggttgatgagtacatcccaactccagaacgcgacactgaaaaaccattcatgatgccagttgaggacgtattctcaatcactggtcgtggtacagttgctactggccgtgtagaacgcggacaagttaaagtcggtgacgaagttgaaatcatcggtcttcaagaagagaacaagaaaacaactgttacaggtgttgaaatgttccgtaagcttcttgattacgctgaagctggtgacaacattggtgcccttcttcgcggtgtatctcgtgaagaaatccaacgtggtcaagtacttgctaaaccaggtacaatcactccacacagcaaattcaaagctgaagtttacgttctttctaaagaagagggtggacgtcatactccattcttctctaactaccgtcctcagttctacttccgtacaactgacgtaactggtatcatccatcttccagaaggcgtagaaatggttatgcctggagataacactgaaatgaacgttgaacttatttctacaatcgctatcgaagaaggaactcgtttctctattcgtgaaggcggacgtactgttggttcaggcgttgtttctacaatcactgagtaa

SEQ ID NO: 27650 - protein, 396 aa, Bacillus subtilis
MAKEKFDRSKSHANIGTIGHVDHGKTTLTAAITTVLHKKSGKGTAMAYDQIDGAPEERERGITISTAHVEYETETRHYAHVDCPGHADYVKNMITGAAQMDGAILVVSAADGPMPQTREHILLSKNVGVPYIVVFLNKCDMVDDEELLELVEMEVRDLLSEYDFPGDDVPVVKGSALKALEGDAEWEAKIFELMDAVDEYIPTPERDTEKPFMMPVEDVFSITGRGTVATGRVERGQVKVGDEVEIIGLQEENKKTTVTGVEMFRKLLDYAEAGDNIGALLRGVSREEIQRGQVLAKPGTITPHSKFKAEVYVLSKEEGGRHTPFFSNYRPQFYFRTTDVTGIIHLPEGVEMVMPGDNTEMNVELISTIAIEEGTRFSIREGGRTVGSGVVSTITE

SEQ ID NO: 27651 - DNA, 1194 bp, Brevibacterium linens
  CDS (1)..(1194): transl_table=11
gtggcaaaggctagtttcgaacggactaagccgcacgtcaacatcggcaccatcggccacgttgaccacggaaagaccaccctgaccgctgcgatcaccaaggtcctggcggatcagtacccggatctcaatgaggctcgcgccttcgaccaggtcgacaacgcacctgaggagaaggagcgcggcatcaccatcaacgtctcgcacgttgagtaccagacggagaagcgtcactacgctcacgtcgatgccccgggtcacgccgactacgtgaagaacatgatcaccggtgccgctcagatggacggtgcgatcctcgtcgtcgccgctaccgacggaccgatgccccagacccgtgagcacgtgctgctcgcgcgtcaggtcggcgttccctacatcgtcgtggctctgaacaagtccgacatggtcgatgacgaggagctcctcgagctcgtcgaattcgaggtccgcgacctgctctcgagccaggacttcgacggagacaacgctccggtcattccggtgtccgctctcaaggcgctggaaggcgacgagaagtgggtcaagagcgttcaggatctcatggctgccgtcgatgacaacgttccggagccggagcgcgatgtcgacaagccgttcctcatgcccgtcgaggacgtcttcacgatcaccggtcgtggaaccgtcgtcaccggtcgtgtcgagcgcggcgtgctcctgcctaacgacgaaatcgaaatcgtcggcatcaaggagaagtcgtccaagacgactgtcaccgctatcgagatgttccgcaagaccctgccggatgcccgtgcaggtgagaacgtcggtctgctcctccgcggcaccaagcgcgaggatgttgagcgcggtcaggtcatcgtgaagccgggttcgatcaccccgcacaccaagttcgaggctcaggtctacatcctgagcaaggacgagggcggacgtcacaacccgttctactcgaactaccgtccgcagttctacttccggaccacggacgtcaccggtgtcatcacgctgcccgagggcaccgagatggtcatgcccggcgacaacaccgatatgtcggtcgagctcatccagccgatcgctatggaggaccgcctccgcttcgcaatccgcgaaggtggccgcaccgtcggcgccggtcgcgtcaccaagatcaccgcctga

SEQ ID NO: 27652 - protein, 397 aa, Brevibacterium linens [sequence omitted]

SEQ ID NO: 27653 - DNA, 1185 bp, Buchnera aphidicola subsp
  CDS (1)..(1185): transl_table=11
atgtcaaaagaaaaatttcaacgtgtaaaacctcatataaatgtaggtactataggtcatgttgatcatggaaaaacaacattaactgcggcaattacaactgtgttatcaaaaaaatatggaggttctgctcgtgcttttgatcaaatagataacgctccagaagaaaaagcaagaggtattactattaatacctctcatgtagaatatgatactgaactcaggcattatgcacatgtagattgtccaggtcatgctgattatataaaaaatatgatcaccggagcagctcagatggatggtgcaattttagtagttgccgctactgatggacccatgcctcaaactcgagaacatattttacttggtagacaagtgggagtaccttatattattgtttttttaaataaatgtgatatggtagacgatgaagaattactagaattagtagaaatggaagttcgtgatttattaacacaatatgattttcctggagatgatactcctattattcgcggttctgctcttaaagccttagaaggtgatgcagattgggaatcaaaaatacttgatttatctaaatttctagatacttatataccagaaccaaaacgagctattgatcaaccttttttattacctatagaagatgttttttctatatcaggaagaggaactgttgttactggaagggttgaaagaggtattgtaaaagttggagaagaagtagaaattgtaggtattaaaaaaacaactaaaactacctgtacaggtgttgaaatgtttaggaaattattggacgaaggtcgtgctggagaaaatgtaggcgttttacttcgcggtacaaaacgtgatgaaattgaaagaggtcaggttttagcaaaaccaggtagtattcatccacatacaacatttgagtctgaagtttatgttttatccaaagaagaaggtgggcgtcatactccattttttaagggatatcgtcctcagttttattttcgaactactgatgtaacaggttctattgagctacctgaaggagtagaaatggttatgccaggagacaatattaaaatgactgttactttaattcatcctattgctatggcagatggtttgcgatttgctatacgagaaggtggtcgtactgttggagcaggtgttgtttctaaagttttagtttaa

SEQ ID NO: 27654 - protein, 394 aa, Buchnera aphidicola subsp
MSKEKFQRVKPHINVGTIGHVDHGKTTLTAAITTVLSKKYGGSARAFDQIDNAPEEKARGITINTSHVEYDTELRHYAHVDCPGHADYIKNMITGAAQMDGAILVVAATDGPMPQTREHILLGRQVGVPYIIVFLNKCDMVDDEELLELVEMEVRDLLTQYDFPGDDTPIIRGSALKALEGDADWESKILDLSKFLDTYIPEPKRAIDQPFLLPIEDVFSISGRGTVVTGRVERGIVKVGEEVEIVGIKKTTKTTCTGVEMFRKLLDEGRAGENVGVLLRGTKRDEIERGQVLAKPGSIHPHTTFESEVYVLSKEEGGRHTPFFKGYRPQFYFRTTDVTGSIELPEGVEMVMPGDNIKMTVTLIHPIAMADGLRFAIREGGRTVGAGVVSKVLV

SEQ ID NO: 27655 - DNA, 1185 bp, Buchnera aphidicola subsp
  CDS (1)..(1185): transl_table=11
gtgtctaaagaaaaatttaaacgttctaagcctcatatcaatgttggaacaattggtcacgttgatcatggtaaaactactttaacatcagcaattactactgtattatctaaaaagtatggaggtgctgcttgtgcatttgatcaaatagataatgctccagaagaaaaagctagaggtattacaattaatacgtcacatgttgagtatgatacttctataagacattatgcgcatgttgattgtccaggacatgcagattatattaagaacatgattactggtgctgcacagatggatggagctattttggtagttgctgctactgatggcccgatgcctcaaactcgtgagcatattttgttagggcgtcaagtaggtgttccttatattgtagttttcttaaataagtgtgacatggttgatgatgaagaattattagaattagtggaaatggaagtacgtgatttattaacgcaatatgattttcctggtgatagcactcctattgtcagaggatctgccttaaaagcgttagagggtgatcctcaatgggaacaaaaaattttagatttgtccaattatttagatacatatattcctgagcctaaacgatctattgatcaaccttttttattacctattgaagatgtattttctatatcaggacgtggaactgtagttactggacgtattgaaagaggtattataaaagtaggtgaggaagtagaaatagttggtataaaatctactgttaagactatatgcactggtgtagaaatgtttagaaaattattagatgaagggcgagcaggagaaaatgttggtgttttgttaaggggtacgaaaagagatgatattgagcgtggtcaagttttagcgaaacctggaacgattaccccacatataaaatttgaatctgaagtatatgtgttgtctaaagaagaaggcggtcgccatacgccgttttttaaaggttatcgtcctcagttttattttcgaactacagatgtaaccggatcggttgaattaccagaggatatggagatggttatgcctggtgataatgttaaaatggtaattactttaattcatcctattgctatgtctgatggattgagatttgctattcgggaaggcggaaaaactgtaggagctggaattgtagttaaagttctgcagtaa

SEQ ID NO: 27656 - protein, 394 aa, Buchnera aphidicola subsp
MSKEKFKRSKPHINVGTIGHVDHGKTTLTSAITTVLSKKYGGAACAFDQIDNAPEEKARGITINTSHVEYDTSIRHYAHVDCPGHADYIKNMITGAAQMDGAILVVAATDGPMPQTREHILLGRQVGVPYIVVFLNKCDMVDDEELLELVEMEVRDLLTQYDFPGDSTPIVRGSALKALEGDPQWEQKILDLSNYLDTYIPEPKRSIDQPFLLPIEDVFSISGRGTVVTGRIERGIIKVGEEVEIVGIKSTVKTICTGVEMFRKLLDEGRAGENVGVLLRGTKRDDIERGQVLAKPGTITPHIKFESEVYVLSKEEGGRHTPFFKGYRPQFYFRTTDVTGSVELPEDMEMVMPGDNVKMVITLIHPIAMSDGLRFAIREGGKTVGAGIVVKVLQ

SEQ ID NO: 27657 - DNA, 1200 bp, Campylobacter jejuni
  CDS (1)..(1200): transl_table=11
atggctaaagaaaaattttcacgtaataagccacacgtaaatattggtactattggtcacgttgaccatggtaaaactactttaacagctgctatttctgctgttctttctagaagaggtttggcagagcttaaagattatgataatatcgataatgctccagaagaaaaagagcgtggtattactattgctacttctcatattgaatatgaaacagacaatcgtcactatgcacacgttgactgcccaggtcacgcagattatgttaaaaacatgattacaggtgctgcacaaatggatggagcgatcttggttgtttctgctgcagatggccctatgccacaaactagagagcacattcttctttctcgtcaagtaggtgttccatatattgttgtttttatgaataaagcagatatggttgatgatgctgaacttctagagttagttgaaatggaaattagagaattattaagctcttatgatttcccaggcgatgatacacctattatttctggttctgctttaaaagctcttgaagaagctaaagctggacaagatggtgaatggtcagcaaaaattatggatcttatggctgcagttgatagctatattccaactccaactcgtgatactgaaaaagacttcttgatgccaattgaagacgttttctcaatttcaggtcgtggtactgttgttacaggtagaattgaaaaaggtgttgtaaaagtaggtgatactatcgaaatcgttggtattaaagatactcaaacaacaactgtaacaggtgttgaaatgttcagaaaagaaatggatcaaggcgaagcaggagataacgtaggtgttcttcttcgtggtactaaaaaagaagaagttatccgtggtatggttcttgctaaaccaaaatcaattactccacacactgacttcgaagctgaagtttatatcttaaataaagatgaaggtggtagacatactccattctttaacaactatagaccacagttttatgtaagaacaactgatgttacaggttcgattaaattagctgatggtgttgaaatggttatgccaggtgaaaatgtgagaattactgtaagcttgatcgctccagtagcacttgaagaaggaactcgttttgctattcgtgaaggtggtaaaactgttggttcaggtgttgtttctaaaattattaaataa

SEQ ID NO: 27658 - protein, 399 aa, Campylobacter jejuni
MAKEKFSRNKPHVNIGTIGHVDHGKTTLTAAISAVLSRRGLAELKDYDNIDNAPEEKERGITIATSHIEYETDNRHYAHVDCPGHADYVKNMITGAAQMDGAILVVSAADGPMPQTREHILLSRQVGVPYIVVFMNKADMVDDAELLELVEMEIRELLSSYDFPGDDTPIISGSALKALEEAKAGQDGEWSAKIMDLMAAVDSYIPTPTRDTEKDFLMPIEDVFSISGRGTVVTGRIEKGVVKVGDTIEIVGIKDTQTTTVTGVEMFRKEMDQGEAGDNVGVLLRGTKKEEVIRGMVLAKPKSITPHTDFEAEVYILNKDEGGRHTPFFNNYRPQFYVRTTDVTGSIKLADGVEMVMPGENVRITVSLIAPVALEEGTRFAIREGGKTVGSGVVSKIIK

SEQ ID NO: 27659 - DNA, 1227 bp, Chara connivens
  CDS (1)..(1227)
atggcacaagaagtctttcaacgtactaaacctcatgtaaatattggtactataggacatgtagatcatgggaaaactacattaacagctgcaattacaatgacattagcagttaacagtacatgtactcctaagaaatatgatgaaattgatgctgctccagaagaaagagcacgaggtattacaattaatacagctcatgttgaatatgaaacagctttacgtcattatgctcatgtagattgtcctggacatgcagattatatcaaaaatatgataacaggcgctgctcaaatggatggtgctattttagtagtatctgctgctgatggacctatgccccaaactaaagagcacattttattagctaaacaagtaggtgtacctagtattgtagtttttctaaataaagaagaccaagtcgatgatgaagagatacttcaattggtagacttagaagttcgtgagtctctcataaattacgaatttcctggagacaaagtaccagttgtttcaggatctgctttaatggctttacaggctttaaccgaaaaaccgaatacttcaagaggcgaaaataagtgggtagataaaatctatgagttaatggatgcggttgactcttatattcctacccctaagagagatattgaaaaacctttcctaatgccaattgaagacgtattttcaattcaaggccgtggtacagttgccacaggtcgaatagaacgtggtatcttaaaattaggagatatcgttgaattaattggcttaaacgaaaaaattcgtagtactgttgttacaggactagaaatgtttagaagacttttagagcaaggttttgctggagaaaatattggtgtacttttaagaggtattgagaaaaaagatatagaaagaggaatggtaatagctcaaccaggcacaattgaaccacatactcgttttgaagcacaagtttatatacttcgcaaagaagaaggaggtcgtcattctcctttttttgcaggttatcgtcctcaattctttgttcgaactgcagatgtaacaggtgtaattgaagcttttgaatatgacaatggtgataaaacaagaatggttatgccaggagatcgagttaaaatgattgtaaatttaatttgtcctatagctatcgaaaagaaaatgagatttgctattcgcgaaggtggacgtactataggtgctggagttgtttacaaatattag

SEQ ID NO: 27660 - protein, 408 aa, Chara connivens
MAQEVFQRTKPHVNIGTIGHVDHGKTTLTAAITMTLAVNSTCTPKKYDEIDAAPEERARGITINTAHVEYETALRHYAHVDCPGHADYIKNMITGAAQMDGAILVVSAADGPMPQTKEHILLAKQVGVPSIVVFLNKEDQVDDEEILQLVDLEVRESLINYEFPGDKVPVVSGSALMALQALTEKPNTSRGENKWVDKIYELMDAVDSYIPTPKRDIEKPFLMPIEDVFSIQGRGTVATGRIERGILKLGDIVELIGLNEKIRSTVVTGLEMFRRLLEQGFAGENIGVLLRGIEKKDIERGMVIAQPGTIEPHTRFEAQVYILRKEEGGRHSPFFAGYRPQFFVRTADVTGVIEAFEYDNGDKTRMVMPGDRVKMIVNLICPIAIEKKMRFAIREGGRTIGAGVVYKY

SEQ ID NO: 27661 - DNA, 1260 bp, Chara vulgaris
  CDS (1)..(1260): transl_table=11
atggcacaagaagtctttcaacgtactaaacctcatgtaaatattggtactataggacatgtagatcatggaaaaactacattaacagctgcaattacaatgacattagcagttaacagtacatgtactcctaagaaatatgatgaaattgatgctgctccagaagaaagagcacgaggtattacaattaatacagctcatgtggaatatgaaacagcttcacgtcattatgctcatgtagattgtcctggacatgcagattatataaaaaatatgataacaggcgctgctcaaatggatggtgcgattttagtagtatctgctgctgatggacctatgccccaaactaaagagcacattttattagctaaacaagtaggtgtacctagtattgtagtttttttaaataaagaagaccaagtcgatgatgaagagatacttcaattggtagacttagaagttcgtgagtctctgatcaattacgaatttcctggagacaaagtaccagttgttgcaggatctgctttaatggctttacaggctttaaccgaaaaaccgaatactttaagaggcgaaaataagtgggtagataaaatctatgagttaatggatgcggttgattcttatattcctacccctaaaagagatattgaaaagccttttctaatgccaattgaagacgtattttccattcaaggccgtggtacagttgccacaggtcgaatagaacgtggtatcttaaaattaggagatatcgttgaattaattggcttaaacgaaaaaattcgtagtactgttgttacaggactggaaatgtttagaagacttttagagcaaggttttgctggagaaaatattggtgtacttttaagaggtattgagaaaaaagatatagaaagaggaatggtaatagctcaaccagggacaattgaaccacatacccgttttgaagcacaagtttatatacttcgcaaagaagaaggaggtcgtcattctcctttttttgcagggtatcgtcctcaattctttgttcgaactgcagatgtaactggtgtaattgaagcttttgaatatgacaatggtgataaaacaagaatggttatgccaggagatcgagttaaaatgattgtgaatttaatttgtcctatagctatcgaaaagaaaatgagatttgctattcgtgaaggtggacgtactataggtgctggagttgttttacaaatattagattcgactcaactcaaatcaaaaaataaataa

SEQ ID NO: 27662 - protein, 419 aa, Chara vulgaris
MAQEVFQRTKPHVNIGTIGHVDHGKTTLTAAITMTLAVNSTCTPKKYDEIDAAPEERARGITINTAHVEYETASRHYAHVDCPGHADYIKNMITGAAQMDGAILVVSAADGPMPQTKEHILLAKQVGVPSIVVFLNKEDQVDDEEILQLVDLEVRESLINYEFPGDKVPVVAGSALMALQALTEKPNTLRGENKWVDKIYELMDAVDSYIPTPKRDIEKPFLMPIEDVFSIQGRGTVATGRIERGILKLGDIVELIGLNEKIRSTVVTGLEMFRRLLEQGFAGENIGVLLRGIEKKDIERGMVIAQPGTIEPHTRFEAQVYILRKEEGGRHSPFFAGYRPQFFVRTADVTGVIEAFEYDNGDKTRMVMPGDRVKMIVNLICPIAIEKKMRFAIREGGRTIGAGVVLQILDSTQLKSKNK

SEQ ID NO: 27663 - DNA, 1257 bp, Chlamydomonas reinhardtii
  CDS (1)..(1257): transl_table=11
atgtcacgtgctaagtttgaacgtaaaaaaccacacgtaaatattggtactattggtcacgttgaccacggtaaaacaacactaacagcagctattacaatgacattagctgcagctggtggttcagttggtaaaaaatatgatgaaattgactcagctccagaagaaaaagcacgtggtattactattaacacagcacacgtagaatacgaaactgaaaaacgtcactatgctcacgtagactgtccaggtcacgctgactacgttaaaaacatgatcacaggtgctgcacaaatggatggtgctattttagtagtatcaggtgctgacggtcctatgccacaaacaaaagaacacattctattagctaaacaagtaggtgtaccaaacgttgtagtattcttaaacaaagaagaccaagtagatgataaagaacttcttgaattagttgaattagaagtacgtgaaactttagataaatatgaattcccaggtgatgaaattccagtagttcctggttctgcattattagctttagaagctttaattgaaaatccaaaaacacaacgtggtgaaaacaaatgggttgacaaaatttaccaattaatggataacgttgacagctacatcccaactccacaacgtgaaactgataaaccattcttattagctgttgaagacgttttatcaattacaggtcgtggtactgttgctacaggtcgtgtagaacgtggtgcattaagaattagtgataacgttgaaatcgtaggtttaagaccaacacaaacagctgttgttactggtttagaaatgttcaaaaaaacattagatgaaactttagctggtgataacgtaggtgttcttcttcgtggtgtacagaaaaaagacattgaacgtggtatggttattgctaaaccaggtacaattactccgcacactaaatttgaagcacaagtatacgttttaacaaaagaagaaggtggtcgtcactctgctttcatgattggttaccaaccacaattctatgttcgtacaacagatgtaacaggtaaagtagtaggttttaaccacattcaaatgcgtaacccttcatcagtagctgaagaacattcaaacaaaatggctatgcctggtgaccgtattagtatgactgtagaactgatcaacccaattgctattgaaaaaggtatgcgtttcgctattcgtgaaggtggccgtactgtaggtgctggtgttgtaactaatattgttcaataa

SEQ ID NO: 27664 - protein, 418 aa, Chlamydomonas reinhardtii
MSRAKFERKKPHVNIGTIGHVDHGKTTLTAAITMTLAAAGGSVGKKYDEIDSAPEEKARGITINTAHVEYETEKRHYAHVDCPGHADYVKNMITGAAQMDGAILVVSGADGPMPQTKEHILLAKQVGVPNVVVFLNKEDQVDDKELLELVELEVRETLDKYEFPGDEIPVVPGSALLALEALIENPKTQRGENKWVDKIYQLMDNVDSYIPTPQRETDKPFLLAVEDVLSITGRGTVATGRVERGALRISDNVEIVGLRPTQTAVVTGLEMFKKTLDETLAGDNVGVLLRGVQKKDIERGMVIAKPGTITPHTKFEAQVYVLTKEEGGRHSAFMIGYQPQFYVRTTDVTGKVVGFNHIQMRNPSSVAEEHSNKMAMPGDRISMTVELINPIAIEKGMRFAIREGGRTVGAGVVTNIVQ

SEQ ID NO: 27665 - DNA, 1182 bp, Chlorobium tepidum
  CDS (1)..(1182): transl_table=11
atggctaaagagtcatacaagagggataaacctcacgtaaatattggtacaatcggtcacgttgaccacggtaaaaccactcttaccgctgcaatcaccagcgttctcgccaagcagggcatggcaactttacgtgagttcagtgacatcgacaaagctcccgaagagagagagcgcggtatcaccatctcgacggcacacgtcgagtatcagaccgcaaagcgtcactacgctcacattgattgccctggtcacgctgactatatcaaaaacatgatcaccggtgcggcccagatggacggcgctatcctcgtcgttgccggtaccgacggcccgatgccccagacccgtgagcacatcctgcttgcccgtcaggtgaacgttcctgcgctggtcgtcttcctgaacaaggttgacatcgctgatccggaacttcttgagctggtcgagatggagcttcgtgagcttcttaccgaatacggcttccctggcgacgatattccgatcatcaaaggttcggcactcaaggcgctcgagggggatccggaggctgagaagcagattatggaactcatggacgccgttgacagctacattccgcagcctgtccgtgacattgacaagccgttcctaatgccggtcgaagacgtgttctccatctctggtcgcggtaccgtcggtactggtcgtatcgagaggggccgcatcaaggttggcgacgaagtcgagatcgtcggtatcaagccgaccgcaaaatcggttgttaccggtattgaaatgttccagaagaccctcgacgaaggtcaggcaggcgataacgcaggtctgcttctccgtggtgttgacaagaatgcgctcgagcgcggcatggttatcgccaagccgggttcgattaccccacacaccaagttcaaggctgaggtttacatcctgaagaaggaagagggtggccgtcacactccgttcttcaacggctatcgtccgcagttttacttcagaaccaccgacgttaccggttcggtgacccttcctgagggcgtcgaaatggttatgcctggtgacaacctctccatcgatgtcgagctgatcgctcctatcgccatggaagagagcctcaggttcgcaatccgcgaaggcggccgtacggttggtgccggttcggtaaccaaaatcgtcgagtga

SEQ ID NO: 27666 - protein, 393 aa, Chlorobium tepidum
MAKESYKRDKPHVNIGTIGHVDHGKTTLTAAITSVLAKQGMATLREFSDIDKAPEERERGITISTAHVEYQTAKRHYAHIDCPGHADYIKNMITGAAQMDGAILVVAGTDGPMPQTREHILLARQVNVPALVVFLNKVDIADPELLELVEMELRELLTEYGFPGDDIPIIKGSALKALEGDPEAEKQIMELMDAVDSYIPQPVRDIDKPFLMPVEDVFSISGRGTVGTGRIERGRIKVGDEVEIVGIKPTAKSVVTGIEMFQKTLDEGQAGDNAGLLLRGVDKNALERGMVIAKPGSITPHTKFKAEVYILKKEEGGRHTPFFNGYRPQFYFRTTDVTGSVTLPEGVEMVMPGDNLSIDVELIAPIAMEESLRFAIREGGRTVGAGSVTKIVE

SEQ ID NO: 27667 - DNA, 1230 bp, Chlorella vulgaris
  CDS (1)..(1230): transl_table=11
atggcacgtgaaaaatttcaacgtaaaaaaccacatgtaaacattggaactattggacatgtagatcatgggaaaacaacgctaactgcagcaattaccatggctctcgctgcacgcgggggtgcgaaggggcgtaaatacgatgatattgattctgctccagaagaaaaagcacgcggtattaccattaatactgctcacgttgagtacgaaactgaaaaccgtcattatgcccatgtagattgtccaggtcacgcggattatgtaaaaaacatgattacaggtgctgcacaaatggatggtggaattcttgttgtatctggtgcggatgggcctatgccacaaacaaaagaacatctcttattagcaaaacaagttggtgttccaaatatcgtggtatttttaaataaagaagatcaagttgatgatgcagaattacttgaactgttagaactagaaattcgtgaaacattagataaatatgaattccctggtgatgaaattccaattatttctggttcagcgcttttagctttagaagcattaactgaaaacccagaaacaaaacctggtgataacaaatgggtagataaaatttataatctgatggatcaagttgattcatatatcccaacacccgaacgtgaaactgagaaaccatttttaatggctgttgaagacgttttttcaatcactggtcgtggtactgtagctacagggcgtgtagaacgtggatgtgtaaaaattggcgatactgtggaacttgttggactacgtgatactaaaacaactactgttacaggtttagaaatgttccaaaaaacgttagacgaaagtgtagctggagacaatgtaggtattttattacgtggggttcagaaaattgatattgaacgtggtatggttctagcaaaaccaggaagtattttaccacacaccaaatttgaagcacaagtttacgtgttaaataaagaagaaggtggccgtcatactccttttttccctggatatcgtccacagttttatgttcgcacaacagatgttacaggaaaaattgaatctttccgtgcggatgataacactgcaactcaaatggtaatgcctggagatcgtattaaaatgattgtagaacttattcaacccattgcgattgagaaaggaatgcgatttgcgattcgcgaaggtggccgtacagtaggtgcaggtgttgtatctacaattgtcatttaa

SEQ ID NO: 27668 - protein, 409 aa, Chlorella vulgaris
MAREKFQRKKPHVNIGTIGHVDHGKTTLTAAITMALAARGGAKGRKYDDIDSAPEEKARGITINTAHVEYETENRHYAHVDCPGHADYVKNMITGAAQMDGGILVVSGADGPMPQTKEHLLLAKQVGVPNIVVFLNKEDQVDDAELLELLELEIRETLDKYEFPGDEIPIISGSALLALEALTENPETKPGDNKWVDKIYNLMDQVDSYIPTPERETEKPFLMAVEDVFSITGRGTVATGRVERGCVKIGDTVELVGLRDTKTTTVTGLEMFQKTLDESVAGDNVGILLRGVQKIDIERGMVLAKPGSILPHTKFEAQVYVLNKEEGGRHTPFFPGYRPQFYVRTTDVTGKIESFRADDNTATQMVMPGDRIKMIVELIQPIAIEKGMRFAIREGGRTVGAGVVSTIVI

SEQ ID NO: 27669 - DNA, 1194 bp, Clostridium perfringens
  CDS (1)..(1194): transl_table=11
atgtcaaaagcaaaatttgaaagaagcaaaccacacgttaacattggaacaatcggtcacgtagaccacggtaaaacaactttaacagcagctataacaacagttttagcacaagctggtggagcagaagcattcaaatatgatgaaatagataaagctccagaagaaaaagaaagaggaatcacaatcaacacagcacacgttgagtacgaaacagctaacagacactacgctcacgttgactgtccaggacatgctgactacgttaaaaacatgatcactggagcagctcaaatggacggagctatattagtttgttcagcagctgatggtccaatgcctcaaacaagagagcacatcttattatcatcaagagttggagttgaccacatcgtagtattcttaaacaaagcagatatggttgacgacgaagaattattagaattagttgaaatggaagttagagagttattaagcgagtacaacttcccaggagacgacattccagtaatcaaaggatcagctttagtagcattagaaaacccaactgacgaagctgcaacagcttgtatcagagagttaatggatgctgtagatagctacatcccaacaccagaaagagcaacagataagccattcttaatgccagtagaggacgtattcacaatcactggtagaggaacagttgcaacaggaagagttgaaagaggagttctacatgtaggagacgaagtagaagtaatcggattaactgaagaaagaagaaaaacagttgtaacaggaatcgaaatgttcagaaagttattagatgaagcacaagctggagataacatcggagcattattaagaggtatccaaagaactgatatcgaaagaggtcaagttttagctcaagttggaacaatcaacccacacaaaaaattcgtaggtcaagtatacgtacttaaaaaagaagaaggtggaagacacactccattcttcgatggatacagaccacaattctacttcagaacaacagacgttacaggatcaatcaaattaccagaaggaatggaaatggttatgcctggagaccacatcgacatggaagttgaattaatcacagaaatcgctatggatgaaggattaagattcgctatcagagaaggtggaagaactgtaggttcaggagttgttacttcaataatcgagtaa

SEQ ID NO: 27670 - protein, 397 aa, Clostridium perfringens
MSKAKFERSKPHVNIGTIGHVDHGKTTLTAAITTVLAQAGGAEAFKYDEIDKAPEEKERGITINTAHVEYETANRHYAHVDCPGHADYVKNMITGAAQMDGAILVCSAADGPMPQTREHILLSSRVGVDHIVVFLNKADMVDDEELLELVEMEVRELLSEYNFPGDDIPVIKGSALVALENPTDEAATACIRELMDAVDSYIPTPERATDKPFLMPVEDVFTITGRGTVATGRVERGVLHVGDEVEVIGLTEERRKTVVTGIEMFRKLLDEAQAGDNIGALLRGIQRTDIERGQVLAQVGTINPHKKFVGQVYVLKKEEGGRHTPFFDGYRPQFYFRTTDVTGSIKLPEGMEMVMPGDHIDMEVELITEIAMDEGLRFAIREGGRTVGSGVVTSIIE

SEQ ID NO: 27671 - DNA, 1233 bp, Codium fragile
  CDS (1)..(1233)
atgattcgagaaaaatttgaacgtattaaaccacatttaaatattggaacaattgggcatgttgatcatggtaaaacgactttaacggcggcaattactatggctttagcagtcaaaggttatacaaaagctaaaaattatatggatattgattcagcacctgaagaaaaagctcgcggtattactataaatacagcacatgttgaatatgaaacagatgtacgtcattatgctcatgtagattgtccaggccatgcagattatgtaaagaatatgattactggagctgctcaaatggatggagcaattttagttgtttcaggagcagatggacctatgcctcaaacaaaagaacatattttacttgctaaacaagtgggagtgccagcaattgtagtttttttaaataaagctgatcaagtagatgatgacgaattattagaattagtcgaattagaaattcaagaaactttaactacatatgaatatcctggcgaggaaattcccattattactggttctgccattactgctttagaaagtttaactgcaaaatatgtattgagaattggtaataaatgggttcagaaaatttatgatttaatggaaactgttgatgaatatatccctacaccaaaaagagatacagaaaaaccttttttaatggctattgaaaatgttgtctcaattacaggaagaggtacggttgctacaggtagagttgaacgtggtatgatcgaagttggccagacagttgaacttgtagggttaaaaaatacaaaagaggcaataattacaggtttagaaatgtttcacaaaacattagaaaaaagtgttgctggagataatgtaggtatattattacgtcgcattcaaaaagaagaaatccaacgaggtatggttttagctaaaccctcatccattctaccgcatcaacactttaaagctcaagtttatatattaaagaaagaagaaggaggccgccacacttctttttttgctggttatagacctcaattttatgttcgaacaacagatgtgactggtcatattaaaacatttcaaggcaagatagataatacgcaaattcaaatggtaatgcctggcgatcgtattcaaatggaagtagaattaattcgaccaattgctattgaaactaggatgcgttttgctattcgcgaaggaggaaagacagttggagctggagtcgtaactacgattgttcaagcataa

SEQ ID NO: 27672 - protein, 410 aa, Codium fragile
MIREKFERIKPHLNIGTIGHVDHGKTTLTAAITMALAVKGYTKAKNYMDIDSAPEEKARGITINTAHVEYETDVRHYAHVDCPGHADYVKNMITGAAQMDGAILVVSGADGPMPQTKEHILLAKQVGVPAIVVFLNKADQVDDDELLELVELEIQETLTTYEYPGEEIPIITGSAITALESLTAKYVLRIGNKWVQKIYDLMETVDEYIPTPKRDTEKPFLMAIENVVSITGRGTVATGRVERGMIEVGQTVELVGLKNTKEAIITGLEMFHKTLEKSVAGDNVGILLRRIQKEEIQRGMVLAKPSSILPHQHFKAQVYILKKEEGGRHTSFFAGYRPQFYVRTTDVTGHIKTFQGKIDNTQIQMVMPGDRIQMEVELIRPIAIETRMRFAIREGGKTVGAGVVTTIVQA

SEQ ID NO: 27673 - DNA, 1248 bp, Coleochaete orbicularis
  CDS (1)..(1248)
atggagcgtttactgcatatgacgttccgtaacaaaaaaattcatttgaatgtcggtacaattggtcattttagtcatggtaaaacaactctgacagctgccattactgcagtattagcaggtataggatatacacaaccaaaacaaaatgatgcaatcgattcgacttcagaagagaaagcacgaaatatgagtatatatgtacaccatgtggaatatgaaacagcagctcggcactattcacacttagattgcccaggtcatgtaaattatataaataacatgattacaggtgtttctcaaatggatggcgcaatattagtagtctctgctgtagatggtcctatggcacaaacaaaagaacatattttacttgctaaactgttaggtatatctagtattctagttttcataaataaagaagatgaattagatgatcaagaagttttacctatgttaattcaaaatatgcgtcaaatactgatttattatggttttccaggacatacaagtcctattctgtgtggatctgccttattggctttagaagcaatgaatgaaaatccaaatttcaatcgaggcaaaaacaaatgggttgataaaatttcttctttgattgatcatttggatctatatctacccacacctcgacgtaaattgaataaaccatttttgatgccaattgaaagagttattctaattccaagttttggattagttggaacaggtacaatagaaaagggacatattaatataggagaatctgtagaaatagttggctttaaagatactcagcattcaaaagttattagtttaaaaatgttcaataaaactttagagcaagctatagcaggtgatgatataggaatttttctggaagggactaataaaaacaattttcaaaaagggatggttatagcaaaacctaatactatacaatcctggaatcattttgaagcgcaaatttatattttacgtagagaagaaggaggtaggcgtagtcctttttttcaaggatattgccctcaattttattttcgcactattcaaataactggaagaatggaatcatttgaatatgaaataggtggaaaaacatggatggttatgcctggtgaaaaaattaaagcaataattcaattaatttttccaatagcacttaaaaaaaaaatgcgttttgttattcgtgaaggaggatttacaataggagtaggtataatattagaacttattaaaataaaaaattaa

SEQ ID NO: 27674 - protein, 415 aa, Coleochaete orbicularis
MERLLHMTFRNKKIHLNVGTIGHFSHGKTTLTAAITAVLAGIGYTQPKQNDAIDSTSEEKARNMSIYVHHVEYETAARHYSHLDCPGHVNYINNMITGVSQMDGAILVVSAVDGPMAQTKEHILLAKLLGISSILVFINKEDELDDQEVLPMLIQNMRQILIYYGFPGHTSPILCGSALLALEAMNENPNFNRGKNKWVDKISSLIDHLDLYLPTPRRKLNKPFLMPIERVILIPSFGLVGTGTIEKGHINIGESVEIVGFKDTQHSKVISLKMFNKTLEQAIAGDDIGIFLEGTNKNNFQKGMVIAKPNTIQSWNHFEAQIYILRREEGGRRSPFFQGYCPQFYFRTIQITGRMESFEYEIGGKTWMVMPGEKIKAIIQLIFPIALKKKMRFVIREGGFTIGVGIILELIKIKN

SEQ ID NO: 27675 - DNA, 1191 bp, Corynebacterium glutamicum
  CDS (1)..(1191): transl_table=11
gtggcaaaggcgaagttcgagcgtaccaagccccacgtaaacatcggcaccatcggtcacgttgaccacggtaagaccaccaccaccgcggctatcaccaaggttctggctgacacttaccctgagctcaacgaggctttcgccttcgactccatcgataaggctcctgaggagaaggagcgtggcatcacgatcaacatctcccacgttgagtaccagactgaaaagcgccactacgcacacgttgacgctccaggccacgccgactacatcaagaacatgattaccggcgctgctcagatggacggcgcaatcctcgttgttgctgctaccgacggcccaatgcctcagacccgtgagcacgttcttcttgctcgccaggttggcgttccttacatcctcgttgctcttaacaagtgcgacatggttgaggatgaggaaatcatcgagctcgtcgagatggaagttcgtgaacttcttgctgagcaggactacgacgaagaggctccaattgttcacatctccgctctgaaggctcttgagggcgacgagaagtggggcaagcagatccttgagctcatgcaggcttgcgatgacaacatccctgacccagttcgtgagaccgacaagccattcctcatgcctatcgaggacatcttcaccatcaccggtcgtggcaccgttgttaccggtcgtgttgagcgcggtaccctgaacgtgaacgatgatgttgacatcatcggcatcaaggagaagtccacctccaccaccgttaccggtatcgagatgttccgtaagcttcttgactccgctgaggctggcgacaactgtggtctgcttctccgtggtatcaagcgcgaagatgttgagcgtggccaggttatcgttaagccaggcgcttacacccctcacaccgagttcgagggctctgtctacgttctgtccaaggatgaaggtggccgccacaccccattcttcgacaactaccgtcctcagttctacttccgcaccaccgacgttaccggtgttgtgaagcttccagagggcaccgagatggtcatgcctggcgacaacgtcgacatgtccgtcaccctgatccagcctgtcgctatggacgagggcctgcgtttcgctatccgcgaaggctcccgcaccgttggcgctggtcgtgtcaccaagatcatcaagtaa

SEQ ID NO: 27676 - protein, 396 aa, Corynebacterium glutamicum
MAKAKFERTKPHVNIGTIGHVDHGKTTTTAAITKVLADTYPELNEAFAFDSIDKAPEEKERGITINISHVEYQTEKRHYAHVDAPGHADYIKNMITGAAQMDGAILVVAATDGPMPQTREHVLLARQVGVPYILVALNKCDMVEDEEIIELVEMEVRELLAEQDYDEEAPIVHISALKALEGDEKWGKQILELMQACDDNIPDPVRETDKPFLMPIEDIFTITGRGTVVTGRVERGTLNVNDDVDIIGIKEKSTSTTVTGIEMFRKLLDSAEAGDNCGLLLRGIKREDVERGQVIVKPGAYTPHTEFEGSVYVLSKDEGGRHTPFFDNYRPQFYFRTTDVTGVVKLPEGTEMVMPGDNVDMSVTLIQPVAMDEGLRFAIREGSRTVGAGRVTKIIK

SEQ ID NO: 27677 - DNA, 1218 bp, Deinococcus radiodurans
  CDS (1)..(1218): transl_table=11
atggcaaaaggaacgttcgagcgcaccaagccccacgtgaacatcggcaccatcggtcacgtcgaccacggcaagaccaccctcaccgccgccatcaccttcaccgccgcttcggctgaccccaccatcgaaaccctggcctacgaccagatcgacaaggcccccgaagaaaaggcccgcggcatcaccatcaacaccgcccacgtcgagtaccagaccgaaacccggcactactcgcacgtcgactgccccggccacgccgactacgtcaagaacatgatcaccggcgcggcgcagatggacggcgccatcctcgtcgtcagctccgctgacggccccatgccccagacccgcgagcacatcctcctcgcccgtcaggtcggcgtgccctacatcgtcgtcttcatgaacaaggtcgacatggtagacgacgaagaactgctggaactggtcgaaatggaagtccgcgaactcctcagcaagtacgagttccccggcgacgacctccccgtcgtcaagggcagcgctctgcgcgccctcgaagccctgcagtccaaccccaagatggcccgcggcaccgacaagtgggtcgactacatctgggaactgctcgacgcggtcgattcctacatccccacccccgagcgcgacaccgacaagaccttcctgatgcctgtcgaagacgtgttcaccatcaccggtcgcggcaccgtcgccacgggccgcgtggaacgcggcaccgtcaaggtccaggacgaagtcgaaatcgtcggcctgaccgacacccgcaagaccaccgtgaccggcatcgaaatgcaccgcaagctgctcgactccgggatggctggtgacaacgtcggcgtgctgctgcgcggcgtcgcgcgcgacgacgtggaacgtggtcaggtgctcgccaagcccggcagcatcaagccccacaccaagttcgaagccagcgtgtacgtgctgagcaaggacgaagggggccgtcacagcgcgttcttcggtggctaccgcccccagttctacttccgcacgacggacgtgacgggcgtggtggaactgcaagaaggcgtggaaatggtgatgcccggtgacaacgtgaccttcacggtggaactgatcaagccgatcgccatggaagaaggcctgcgcttcgccatccgcgaagggggccgcaccgtcggcgccggcgtcgtctccaaggttctggagtaa

SEQ ID NO: 27678 - protein, 405 aa, Deinococcus radiodurans
MAKGTFERTKPHVNIGTIGHVDHGKTTLTAAITFTAASADPTIETLAYDQIDKAPEEKARGITINTAHVEYQTETRHYSHVDCPGHADYVKNMITGAAQMDGAILVVSSADGPMPQTREHILLARQVGVPYIVVFMNKVDMVDDEELLELVEMEVRELLSKYEFPGDDLPVVKGSALRALEALQSNPKMARGTDKWVDYIWELLDAVDSYIPTPERDTDKTFLMPVEDVFTITGRGTVATGRVERGTVKVQDEVEIVGLTDTRKTTVTGIEMHRKLLDSGMAGDNVGVLLRGVARDDVERGQVLAKPGSIKPHTKFEASVYVLSKDEGGRHSAFFGGYRPQFYFRTTDVTGVVELQEGVEMVMPGDNVTFTVELIKPIAMEEGLRFAIREGGRTVGAGVVSKVLE

SEQ ID NO: 27679 - DNA, 1200 bp, Fervidobacterium islandicum
  CDS (1)..(1200): transl_table=11
atggcaaaggtaacatttgtacgaaccaaacctcacatgaacgttggtacgatcggacagatcgaccacggtaagacaacacttacagcagctattacaaagtactgttcgttcttcggatgggcagactacacaccatacgaaatgattgacaaagcaccggaagaaagagcaagaggtatcaccatcaacatcacacacgttgaataccagacagaaaagagacactacgcacacatcgactgtccaggtcacgctgactacattaagaacatgatcactggtgcagctcagatggacggtgccatccttgtacttgctgcaacagatggtccaatgccacaaacaagggaacacgttcttcttgcaagacaggttaacgttccagcaatgatagttttcattaacaaagttgatatggttgacccagaacttgttgatcttgttgaaatggaagtcagagacctcctcagcaaatacgaattccctggtgacgaagttccagtagttagaggatcagctctcaaagcaatagaagcaccaaacgacccgaacgacccagcatacaaaccaatcaaagaactccttgacgcaatggatacatacttcccggatccagttcgtgaagttgacaaaccattccttatgccaattgaagacgtcttctccatcactggtaggggtacggttgtcactggaagaatcgaacgtggtgtaatcaaaccaggcgttgaagcagaaatcatcggtatgagctacgaaattaaaaagacagttatcacaagtgttgaaatgttcagaaaagaactcgatgaagcaatcgctggtgacaacgttggatgtctgctcagaggatctagcaaggacgaggttgaaagaggacaagttcttgcaaaaccaggctccattacaccactcaagaagttcaaagcaaacatctacgttttgaagaaagaagaaggcggacgccacacgccattcacaaaaggttacaaaccacagttctacatcagaacagcagacgttacaggtgaaatcgttgaccttccagctggagtcgaaatggtcatgcccggtgataacgtcgaaatgacaattgaactcatctacccagttgctatcgaaaaaggtatgaggttcgcagttcgagaaggtggaagaacggttggcgcaggtgtcgtttccgaaataattgagtaa

SEQ ID NO: 27680 - protein, 399 aa, Fervidobacterium islandicum
MAKVTFVRTKPHMNVGTIGQIDHGKTTLTAAITKYCSFFGWADYTPYEMIDKAPEERARGITINITHVEYQTEKRHYAHIDCPGHADYIKNMITGAAQMDGAILVLAATDGPMPQTREHVLLARQVNVPAMIVFINKVDMVDPELVDLVEMEVRDLLSKYEFPGDEVPVVRGSALKAIEAPNDPNDPAYKPIKELLDAMDTYFPDPVREVDKPFLMPIEDVFSITGRGTVVTGRIERGVIKPGVEAEIIGMSYEIKKTVITSVEMFRKELDEAIAGDNVGCLLRGSSKDEVERGQVLAKPGSITPLKKFKANIYVLKKEEGGRHTPFTKGYKPQFYIRTADVTGEIVDLPAGVEMVMPGDNVEMTIELIYPVAIEKGMRFAVREGGRTVGAGVVSEIIE

SEQ ID NO: 27681 - DNA, 1188 bp, Flavobacterium ferrugineum
  CDS (1)..(1188): transl_table=11
atggcaaaagagacctttaagagggaaaaacctcacgttaacattggtaccattggccacgttgaccatggtaaaaccacgctgactgccgccattacagacatcctttcaaagaaaggtctggcgcaggctaaaaaatatgacgaaatcgacggagctcctgaggaaaaagagcgcggtatcactatcaacaccgctcacgtagaatacgaaacagctaatcgtcactatgcacacgtagactgccctggtcacgctgactatgtgaaaaacatgatcaccggtgctgcccagatggacggtgctatcttagttgtggctgcatcagacggtcctatgcctcaaacaaaagaacacatcctgcttgctgcccaggtaggtgtacctaaaatggttgtgtttctgaataaagttgacctcgttgacgacgaagagctcctggagctggttgagatcgaggttcgcgaagaactgactaaacgcggtttcgacggcgacaacactccaatcatcaaaggttccgctacaggcgccctcgctggtgaagaaaagtgggttaaagaaattgaaaacctgatggacgctgttgacagctacatcccactgcctcctcgtccggttgatctgccgttcctgatgagcgtagaggacgtattctctatcactggtcgtggtactgttgctaccggtcgtatcgagcgtggccgtatcaaagttggtgagcctgttgagatcgtaggtctgcaggagtctcccctgaactctaccgttacaggtgttgagatgttccgcaaactcctcgacgaaggtgaagctggtgataacgccggtctcctcctccgtggtgttgaaaaaacacagatccgtcgcggtatggtaatcgttaaacccggttccatcactccgcacacggacttcaaaggcgaagtttacgtactgagcaaagacgaaggtggccgtcacactccattcttcaacaaataccgtcctcaattctacttccgtacaactgacgttacaggtgaagtagaactgaacgcaggaacagaaatggttatgcctggtgataacaccaacctgaccgttaaactgatccaaccgatcgctatggaaaaaggtctgaaattcgcgatccgcgaaggtggccgtaccgtaggtgcaggacaggttactgagatcttgaaataa

SEQ ID NO: 27682 - protein, 395 aa, Flavobacterium ferrugineum
MAKETFKREKPHVNIGTIGHVDHGKTTLTAAITDILSKKGLAQAKKYDEIDGAPEEKERGITINTAHVEYETANRHYAHVDCPGHADYVKNMITGAAQMDGAILVVAASDGPMPQTKEHILLAAQVGVPKMVVFLNKVDLVDDEELLELVEIEVREELTKRGFDGDNTPIIKGSATGALAGEEKWVKEIENLMDAVDSYIPLPPRPVDLPFLMSVEDVFSITGRGTVATGRIERGRIKVGEPVEIVGLQESPLNSTVTGVEMFRKLLDEGEAGDNAGLLLRGVEKTQIRRGMVIVKPGSITPHTDFKGEVYVLSKDEGGRHTPFFNKYRPQFYFRTTDVTGEVELNAGTEMVMPGDNTNLTVKLIQPIAMEKGLKFAIREGGRTVGAGQVTEILK

SEQ ID NO: 27683 - DNA, 1230 bp, Gloeobacter violaceus
  CDS (1)..(1230): transl_table=11
atggctcgcgctaagttcgaacggaataaaccgcacgtcaacatcgggaccatcggtcacgtcgaccatggcaagacgacgctgacggcggccatcaccatgacgctggccgcgctcggccgcgccaaggccaagaagtacgacgaaattgaccaggcccccgaagagaaagcccgcggcatcacgatcaacaccgcccacgtcgagtacgagaccgagaagcgccactacgcccacgtggattgccccggtcacgccgactacgtcaagaacatgatcaccggcgccgcccagatggatggtgccatcctggtggtctcggcggcggacggtccgatgccccagacccgcgagcacatcctgcttgcccgtcaggtcggcgtgcccaatatcgtcgtcttcttgaacaaaaaagaccagctcgacgaccccgaattgctggaactggtcgaactggaagtgcgcgagctgctttctaagtacgactttcccggcgatgacgtcccgatcgtggcgggttcggccctgatggccctcgagaagatggcctccgagccgaagctcatccgcggcaaggacgattgggtcgattgcatctactcgctgatggacgcggtggacgcctacatccccactcccgagcgggcgatcgacaagccgttcttgatggcggtcgaagacgtcttctcgatcaccggccgcggcactgtcgccaccggccgcatcgagcgcggcaaggtcaaagtcggcgagaccatcgagttggtgggcatccgcgggacccgctccaccaccgtcaccggtctggagatgttccagaagtccctcgatgagggcctggcgggcgacaacatcggcgtcctcctgcgcgggatcaaaaaagaggacgtcgagcgcggcatggtgcttgccaagcccggctcgatcaccccccacacccagttcgagggcgaggtctacatcctcagcaaagaagaaggtggccgccatacccccttcttcgccggctaccgcccgcagttctacgtgcgcaccaccgacgtgaccggcaccatcgtcaccttcaccgacgacgaaggcaagtccgccgagatggtgatgcctggcgaccgcatcaagatgaccgttgaactgatcaacccaatcgccatcgaggacggcatgcgctttgccatccgcgagggcggccgcaccgtgggcgcgggcgttgtctccaagatcctgaagtaa

SEQ ID NO: 27684 - protein, 409 aa, Gloeobacter violaceus
MARAKFERNKPHVNIGTIGHVDHGKTTLTAAITMTLAALGRAKAKKYDEIDQAPEEKARGITINTAHVEYETEKRHYAHVDCPGHADYVKNMITGAAQMDGAILVVSAADGPMPQTREHILLARQVGVPNIVVFLNKKDQLDDPELLELVELEVRELLSKYDFPGDDVPIVAGSALMALEKMASEPKLIRGKDDWVDCIYSLMDAVDAYIPTPERAIDKPFLMAVEDVFSITGRGTVATGRIERGKVKVGETIELVGIRGTRSTTVTGLEMFQKSLDEGLAGDNIGVLLRGIKKEDVERGMVLAKPGSITPHTQFEGEVYILSKEEGGRHTPFFAGYRPQFYVRTTDVTGTIVTFTDDEGKSAEMVMPGDRIKMTVELINPIAIEDGMRFAIREGGRTVGAGVVSKILK

SEQ ID NO: 27685 - DNA, 1185 bp, Haemophilus ducreyi
  CDS (1)..(1185): transl_table=11
atgtctaaagaaaaatttgaacgtacaaaaccgcacgttaacgtgggtacaatcggccacgttgaccatggtaaaacaactctaactgcagcaattactaccgtattagcaaaacacttcggtggtgctgcgcgtgcatttgaccaaatcgataacgcgcctgaagaaaaagcgcgcggtatcaccatcaatacttctcacgttgagtacgacactgaaactcgtcactatgctcacgttgactgtccaggacacgccgactatgttaaaaacatgattactggtgcggcacaaatggacggcgctatcttagttgtagcagcaactgatggtcctatgcctcaaactcgtgaacacatcttattaggtcgccaagttggtgttccttacatcatcgtattcttaaataaatgcgatatggtagatgatgaagaattattagaattagttgaaatggaagttcgtgaacttctttctcaatatgatttcccaggtgacgatactcctatcgttcgtggttcagcattacaagcattaaatggtgtgcctgagtgggaagaaaaaatcattgaattagcacaacacttagattcttatatccctgagcctgagcgtgcgattgataaacctttcttattaccaatcgaagacgtattctcaatttcaggtcgtggtacagtagtaaccggtcgtgttgagcgtggtatcatcaaatcaggtgaagaagttgaaatcgtagggattaaagaaacgacaaaaacaacagtaaccggtgttgagatgttccgtaaactattagacgaaggtcgtgcgggtgaaaacgtaggtgccttattacgtggtactaaacgtgaagaaatcgaacgtggtcaagtattagcgaaaccaggtacaattacaccacacactgattttgaatcagaagtttatgtattatcaaaagaagaaggtggccgtcatactccattcttcaaaggctatcgtcctcagttctacttccgtacaacggacgtaacaggaacgattgaattacctgaaggtgttgagatggtaatgcctggtgataatatcaagatgacagtaagcttaattcaccctatcgcgatggacgaaggtcttcgtttcgctattcgtgaaggcggtcgtactgtaggtgccggcgttgttgcgaaaatcattaaataa

SEQ ID NO: 27686 - protein, 394 aa, Haemophilus ducreyi
MSKEKFERTKPHVNVGTIGHVDHGKTTLTAAITTVLAKHFGGAARAFDQIDNAPEEKARGITINTSHVEYDTETRHYAHVDCPGHADYVKNMITGAAQMDGAILVVAATDGPMPQTREHILLGRQVGVPYIIVFLNKCDMVDDEELLELVEMEVRELLSQYDFPGDDTPIVRGSALQALNGVPEWEEKIIELAQHLDSYIPEPERAIDKPFLLPIEDVFSISGRGTVVTGRVERGIIKSGEEVEIVGIKETTKTTVTGVEMFRKLLDEGRAGENVGALLRGTKREEIERGQVLAKPGTITPHTDFESEVYVLSKEEGGRHTPFFKGYRPQFYFRTTDVTGTIELPEGVEMVMPGDNIKMTVSLIHPIAMDEGLRFAIREGGRTVGAGVVAKIIK

SEQ ID NO: 27687 - DNA, 1185 bp, Haemophilus influenzae
  CDS (1)..(1185): transl_table=11
atgtctaaagaaaaatttgaacgtacaaaaccgcacgtaaacgtgggtacaatcggccacgttgaccacggtaaaacaactttaacagcagcaatcacaaccgtattagcaaaacactacggtggtgcagcgcgtgcatttgaccaaattgataacgcgccagaagaaaaagcgcgtggtattaccatcaacacttcacacgttgaatacgatacaccgactcgccactacgcacacgtagactgtccgggacacgccgactatgttaaaaatatgattactggtgcggcacaaatggatggtgctattttagtagtagcagcaacagatggtcctatgccacaaactcgtgaacacatcttattaggtcgccaagtaggtgttccatacatcatcgtattcttaaacaaatgcgacatggtagatgacgaagagttattagaattagtcgaaatggaagttcgtgaacttctatctcaatatgacttcccaggtgacgatacaccaatcgtacgtggttcagcattacaagcgttaaacggcgtagcagaatgggaagaaaaaatccttgagttagcaaaccacttagatacttacatcccagaaccagaacgtgcgattgaccaaccgttccttcttccaatcgaagatgtgttctcaatctcaggtcgtggtactgtagtaacaggtcgtgtagaacgaggtattatccgtacaggtgatgaagtagaaatcgtcggtatcaaagatacagcgaaaactactgtaacgggtgttgaaatgttccgtaaattacttgacgaaggtcgtgcaggtgaaaacatcggtgcattattacgtggtaccaaacgtgaagaaatcgaacgtggtcaagtattagcgaaaccaggttcaatcacaccacacactgacttcgaatcagaagtgtacgtattatcaaaagatgaaggtggtcgtcatactccattcttcaaaggttaccgtccacaattctatttccgtacaacagacgtgactggtacaatcgaattaccagaaggcgtggaaatggtaatgccaggcgataacatcaagatgacagtaagcttaatccacccaattgcgatggatcaaggtttacgtttcgcaatccgtgaaggtggccgtacagtaggtgcaggcgttgttgcgaaaatcatcaaataa

SEQ ID NO: 27688 - protein, 394 aa, Haemophilus influenzae
MSKEKFERTKPHVNVGTIGHVDHGKTTLTAAITTVLAKHYGGAARAFDQIDNAPEEKARGITINTSHVEYDTPTRHYAHVDCPGHADYVKNMITGAAQMDGAILVVAATDGPMPQTREHILLGRQVGVPYIIVFLNKCDMVDDEELLELVEMEVRELLSQYDFPGDDTPIVRGSALQALNGVAEWEEKILELANHLDTYIPEPERAIDQPFLLPIEDVFSISGRGTVVTGRVERGIIRTGDEVEIVGIKDTAKTTVTGVEMFRKLLDEGRAGENIGALLRGTKREEIERGQVLAKPGSITPHTDFESEVYVLSKDEGGRHTPFFKGYRPQFYFRTTDVTGTIELPEGVEMVMPGDNIKMTVSLIHPIAMDQGLRFAIREGGRTVGAGVVAKIIK

SEQ ID NO: 27689 - DNA, 1230 bp, Helicosporidium sp
  CDS (1)..(1230): transl_table=11
atggcacgtgaaaaatttgaacgtataaaaccacatatcaatattggtacaataggacatgtagatcatggtaaaactacattaacagctgctataactatggcattagcaagcataggaaatactaaaggaaaaaattatgctgatattgattcagctcctgaagaaaaagcacgaggaattactataaatacaacacatgttgaatatgaaacagctaagcgccattatgcccatgtagattgtccaggacatgccgactatattaaaaatatgattacaggagctgctcaaatggatggtgctattttagtagtttcaggagctgatggtccaatgcctcaaactcgagaacatatagtattagctaagcaagtaggtgtaccttctatggtagtttttattaataaagaagatcaagtagatgatccagaaattttagagcttgtagaattagaagttagagatcttctaacaagttacaaatttgaaggagaagaggtacctgtaataacaggttctgctcttttagctttagaagcctttataaaaaatccaaaaatattaaaaggagaaaatccttgggtcgacaaaatatataatttaatggatagtgttgattcatatatacctacaccagttcgtgaaattgataaaccctttttaatggctatagaagacgtcttttctataagtggtcgtggaacagtagctacaggacgcatagagcgtggtaaaataaaaatgggagattctattgaaattattggagggtctttaagaaaaacaactacagtaacaggaatagaaatgtttcaaaaaacattaactgatggtgtagctggcgataatgtaggtattttaatgcgcgggattcaaaaaaaagaaattgaccgaggaatggtattaactaagcctaaatcaatagatccattaacaagttttgaagcacaagtttatttattaactaaagaagaaggaggacgttctaaaggctttacaataggttatagacctcagttttatgttcgtactacagatgtaacaggggctattttaaatatgcttagtgatgataatacaccattaaaaatagcatcacctggagatagaataacaatgtcagttaaacttattcaaccaatcgctcttgaaaaaaatatgagatttgctatacgtgaaggaggtaaaacagtaggagctggagtagtctcaaaattaattaattaa

SEQ ID NO: 27690 - protein, 409 aa, Helicosporidium sp
MAREKFERIKPHINIGTIGHVDHGKTTLTAAITMALASIGNTKGKNYADIDSAPEEKARGITINTTHVEYETAKRHYAHVDCPGHADYIKNMITGAAQMDGAILVVSGADGPMPQTREHIVLAKQVGVPSMVVFINKEDQVDDPEILELVELEVRDLLTSYKFEGEEVPVITGSALLALEAFIKNPKILKGENPWVDKIYNLMDSVDSYIPTPVREIDKPFLMAIEDVFSISGRGTVATGRIERGKIKMGDSIEIIGGSLRKTTTVTGIEMFQKTLTDGVAGDNVGILMRGIQKKEIDRGMVLTKPKSIDPLTSFEAQVYLLTKEEGGRSKGFTIGYRPQFYVRTTDVTGAILNMLSDDNTPLKIASPGDRITMSVKLIQPIALEKNMRFAIREGGKTVGAGVVSKLIN

SEQ ID NO: 27691 - DNA, 1188 bp, Lactobacillus plantarum
  CDS (1)..(1188): transl_table=11
atggcaaaagaacattatgaaagaacaaaaccccatgtaaacattggtactattggccacgttgaccatgggaagactactttgaccgctgcaatcactaaggtattagcatctaagggcttggctaaagaacaagactttgcttctatcgatgctgctccggaagaacgtgaacgtggtattactatcaacactgcccacgttgaatacgaaactgaaaagcgtcactacgctcatatcgatgccccaggacatgctgactacgttaagaacatgattactggtgccgctcaaatggacggtgcgatcttagttgttgccgcaactgatggtcctatgccacaaacgcgtgaacacatcctcttggctcgccaagttggtgttgactatatcgttgtcttcttaaacaagactgatcttgttgacgatgacgaattagttgacttggttgaaatggaagtacgtgaattactttcagaatacgatttccctggtgacgatattcctgttatccgtggttcagcgcttaaagcacttgaaggcgacccagaacaagaaaaggttatcatgcacttaatggatgttgttgatgaatacatcccaactccagttcgtgatactgaaaagcctttcttgatgcctgttgaagacgtcttctcaatcactggtcgtgggactgttgcttctggtcgtatcgatcgtgggactgttaaggtcggcgacgaagttgaaatcgttggtttacacgaagatgttcttaagtcaactgttacgggtcttgaaatgttccgtaagacacttgacttaggtgaagccggggataacgttggtgcgttattacgtggtgttaaccgtgaacaagttgttcgtggccaagttttggctaagccaggttcgatccaaacccacaagaagttcaagggtgaagtttatatcttgagcaaagaagaaggtggccgtcatacgccattcttctcaaactatcgtccacaattctacttccacaccactgatatcactggtgttattgaattgccagacggcgttgaaatggttatgcctggtgacaacgtaacgttcactgttgaattgattcaaccagctgccatcgaaaagggtaccaagttcacggttcgtgaaggtggtcatactgtcggtgccggtgttgtttcagaaattgatgactaa

SEQ ID NO: 27692 - protein, 395 aa, Lactobacillus plantarum [sequence omitted]

SEQ ID NO: 27693 - DNA, 1188 bp, Listeria monocytogenes serotype 4b
  CDS (1)..(1188): transl_table=11
atggcaaaagaaaaatttgaccgctctaaaccccatgttaacattggtactattggacacgttgaccatggtaaaacaactttaactgctgcaattacaactgtacttgctaaaaaaggctatgctgatgcacaagcttatgaccaaattgatggtgctccggaagaaagagaacgtggtatcacaatctctactgctcacgttgagtaccaaactgacagccgtcactatgcacacgttgactgcccaggacatgccgattacgttaaaaacatgatcactggtgctgcacaaatggacggagctatcttagtagtatctgctgctgatggcccaatgccacaaactcgtgaacatatcttactttcacgtcaagttggtgttccatacatcgttgtattcatgaacaaatgtgacatggttgacgatgaagaattactagaattagttgaaatggaaattcgtgatctattaactgaatatgaattccctggcgatgacattcctgtaatcaaaggttcagctcttaaagcacttcaaggtgaagctgactgggaagctaaaattgacgagttaatggaagctgtagattcttacattccaactccagaacgtgatactgacaaaccattcatgatgccagttgaggatgtattctcaatcactggtcgtggaacagttgcaactggacgtgttgaacgtggacaagttaaagttggtgacgaagtagaagttatcggtattgaagaagaaagcaaaaaagtagtagtaactggagtagaaatgttccgtaaattactagactacgctgaagctggcgacaacattggcgcacttctacgtggtgttgctcgtgaagatatccaacgtggtcaagtattagctaaaccaggttcgattactccacacactaacttcaaagctgaaacttatgttttaactaaagaagaaggtggacgtcacactccattcttcaacaactaccgcccacaattctatttccgtactactgacgtaactggtattgttacacttccagaaggtactgaaatggtaatgcctggtgataacattgagcttgcagttgaactaattgcaccaatcgctatcgaagacggtactaaattctctatccgtgaaggcggacgtacagtaggcgctggcgttgtttctaacatcagcaaataa

SEQ ID NO: 27694 - protein, 395 aa, Listeria monocytogenes serotype 4b
MAKEKFDRSKPHVNIGTIGHVDHGKTTLTAAITTVLAKKGYADAQAYDQIDGAPEERERGITISTAHVEYQTDSRHYAHVDCPGHADYVKNMITGAAQMDGAILVVSAADGPMPQTREHILLSRQVGVPYIVVFMNKCDMVDDEELLELVEMEIRDLLTEYEFPGDDIPVIKGSALKALQGEADWEAKIDELMEAVDSYIPTPERDTDKPFMMPVEDVFSITGRGTVATGRVERGQVKVGDEVEVIGIEEESKKVVVTGVEMFRKLLDYAEAGDNIGALLRGVAREDIQRGQVLAKPGSITPHTNFKAETYVLTKEEGGRHTPFFNNYRPQFYFRTTDVTGIVTLPEGTEMVMPGDNIELAVELIAPIAIEDGTKFSIREGGRTVGAGVVSNISK

SEQ ID NO: 27695 - DNA, 1233 bp, Mesostigma viride
  CDS (1)..(1233): transl_table=11
atggcacgtgaaaaatttgaacgcaaaaaaccacatattaatattggaaccattggacatgtagatcatggaaaaactactttaactgctgctataacaatggctttagcagttggtacaggcaaatctggtaagagatatgatgaaattgatgctgctcctgaagaaaaagcaagaggtattactattaataccgctcatgtagaatatgagactgaaactcgtcattatgcacatgtggattgtccaggtcatgctgactatgtaaaaaatatgattactggtgctgctcagatggatggcgcgatactggttgtttctggagcagatggtccaatgccacaaactaaagaacatatcttattggcgaaacaagtaggtgttcctaatatggtagtttttttaaataaagaagatcaagtagatgatccagaattattagaacttgtggaattagaagtacgtgaaactttaaattcttatgattttccaggagatgaaattccagtagttgcaggttctgctttaatggcattagaagcattaacccaagattctaaacttgctagaggcagtaatccatgggttgataaaatttatgctttaatggatcaagttgataaatatattccaactcctcaaagagatactgataagccatttttaatggctatagaagatgtgttttctatcacaggtagaggaactgtagcaactggaagagtagaaagaggtaaagttgtagttggagaaaacgtagatattgttggtctagcaaatataccacaaaatactacagtaactggcttagaaatgtttcaaaaaactttagaagaaagtgtcgctggagataatgttggtgttttgttaagaggtattcaaaaagatcaagtagaacgtggtatggttttagctaaaccgaacacaattaaacctcatatacgttttgagtctgaagtttatgtattagctaaagaagaaggtggacgtcatactcctttttttccaggttacagacctcaattttatgtaagaactacagatgtgactggcaaaattgattcttttaaagcagatgatggttctgacacacaaatggttatgccaggcgatcgtgttaaaatggtagtatctttaattcaaccaattgcaattgaaaaaggtatgcgttttgctattagagaaggtggtcgtactgtaggtgcaggaattgtatctgaaatcttagaataa

SEQ ID NO: 27696 - protein, 410 aa, Mesostigma viride
MAREKFERKKPHINIGTIGHVDHGKTTLTAAITMALAVGTGKSGKRYDEIDAAPEEKARGITINTAHVEYETETRHYAHVDCPGHADYVKNMITGAAQMDGAILVVSGADGPMPQTKEHILLAKQVGVPNMVVFLNKEDQVDDPELLELVELEVRETLNSYDFPGDEIPVVAGSALMALEALTQDSKLARGSNPWVDKIYALMDQVDKYIPTPQRDTDKPFLMAIEDVFSITGRGTVATGRVERGKVVVGENVDIVGLANIPQNTTVTGLEMFQKTLEESVAGDNVGVLLRGIQKDQVERGMVLAKPNTIKPHIRFESEVYVLAKEEGGRHTPFFPGYRPQFYVRTTDVTGKIDSFKADDGSDTQMVMPGDRVKMVVSLIQPIAIEKGMRFAIREGGRTVGAGIVSEILE

SEQ ID NO: 27697 - DNA, 1191 bp, Micrococcus luteus
  CDS (1)..(1191): transl_table=11
gtggcaaaggcaaagttcgagcggacgaaggcgcacgtcaacatcggcaccatcggccacgttgaccacggcaagaccacgctgaccgccgccatctcgaaggtcctgtacgacaagtacccggacctgaatgaggcccgtgacttcgcgacgatcgattccgcccccgaggagcgtcagcgcggcatcaccatcaacatctcccacgtggagtaccagaccgagaagcgtcactacgcccacgtggacgcccccggtcacgccgactacatcaagaacatgatcaccggcgccgctcagatggacggcgcgatcctcgtggtcgccgctaccgacggcccgatggcccagacccgtgagcacgtgctcctggcccgccaggtcggcgtgccggccctgctcgtggccctgaacaagtcggacatggtggaggacgaggagctcctcgagcgtgtcgagatggaggtccggcagctgctgtcctccaggagcttcgacgtcgacgaggccccggtcatccgcacctccgctctgaaggccctcgagggcgacccccagtgggtcaagtccgtcgaggacctcatggatgccgtggacgagtacatcccggacccggtgcgcgacaaggacaagccgttcctgatgccgatcgaggacgtcttcacgatcaccggccgtggcaccgtggtgaccggtcgcgccgagcgcggcaccctgaagatcaactccgaggtcgagatcgtcggcatccgcgacgtgcagaagaccactgtcaccggcatcgagatgttccacaagcagctcgacgaggcctgggccggcgagaactgcggtctgctcgtgcgcggtctgaagcgcgacgacgtcgagcgcggccaggtgctggtggagccgggctccatcaccccgcacaccaacttcgaggcgaacgtctacatcctgtccaaggacgagggtgggcgtcacaccccgttctactcgaactaccgcgcgcagttctacttccgcaccaccgacgtcaccggcgtcatcacgctgcccgagggcaccgagatggtcatgcccggcgacaccaccgagatgtcggtcgagctcatccagccgatcgccatggaggagggcctcggcttcgccatccgcgagggtggccgcaccgtgggctccggccgcgtcaccaagatcaccaagtga

SEQ ID NO: 27698 - protein, 396 aa, Micrococcus luteus
MAKAKFERTKAHVNIGTIGHVDHGKTTLTAAISKVLYDKYPDLNEARDFATIDSAPEERQRGITINISHVEYQTEKRHYAHVDAPGHADYIKNMITGAAQMDGAILVVAATDGPMAQTREHVLLARQVGVPALLVALNKSDMVEDEELLERVEMEVRQLLSSRSFDVDEAPVIRTSALKALEGDPQWVKSVEDLMDAVDEYIPDPVRDKDKPFLMPIEDVFTITGRGTVVTGRAERGTLKINSEVEIVGIRDVQKTTVTGIEMFHKQLDEAWAGENCGLLVRGLKRDDVERGQVLVEPGSITPHTNFEANVYILSKDEGGRHTPFYSNYRAQFYFRTTDVTGVITLPEGTEMVMPGDTTEMSVELIQPIAMEEGLGFAIREGGRTVGSGRVTKITK

SEQ ID NO: 27699 - DNA, 1185 bp, Neisseria gonorrhoeae
  CDS (1)..(1185): transl_table=11
atggctaaggaaaaattcgaacgtagcaaaccgcacgtaaacgttggcaccatcggtcacgttgaccatggtaaaaccaccctgactgctgctttgactactattttagctaaaaaattcggcggtgctgcaaaagcttacgaccaaatcgacaacgcacccgaagaaaaagcacgcggtattaccattaacacctcgcacgtagaatacgaaaccgaaacccgccactacgcacacgtagactgtccgggtcacgccgactacgttaaaaacatgattaccggcgccgcacaaatggacggtgcaatcctggtatgttctgctgccgacggccctatgccgcaaacccgcgaacacatcctgctggcccgtcaagtaggcgtaccttacatcatcgtgttcatgaacaaatgcgacatggtcgacgatgccgagctgttccaactggttgaaatggaaatccgcgacctgctgtccagctacgacttccccggcgacgactgcccgatcgtacaaggttccgcactgaaagccttggaaggcgatgccgcttacgaagaaaaaatcttcgaactggctaccgcattggacagatacatcccgactcccgagcgtgccgtggacaaaccattcctgctgcctatcgaagacgtgttctccatttccggccgcggtaccgtagtcaccggccgtgtagagcgaggtatcatccacgttggtgacgagattgaaatcgtcggtctgaaagaaacccaaaaaaccacctgtaccggcgttgaaatgttccgcaaactgctggacgaaggtcaggcgggcgacaacgtaggcgtattgctgcgcggtaccaaacgtgaagacgtagaacgcggtcaggtattggccaaacggggtactatcactcctcacaccaagttcaaagcagaagtgtacgtattgagcaaagaagagggcggcccccataccccgtttttcgccaactaccgtccccaattctacttccgtaccactgacgtaaccggcacgattactttggaaaaaggtgtggaaatggtaatgccgggtgagaacgtaaccattactgtagaactgattgcgcctatcgctatggaagaaggtctgcgctttgcgattcgcgaaggcggccgtaccgtgggtgccggcgtggtttcttctgttatcgcttaa

SEQ ID NO: 27700 - protein, 394 aa, Neisseria gonorrhoeae
MAKEKFERSKPHVNVGTIGHVDHGKTTLTAALTTILAKKFGGAAKAYDQIDNAPEEKARGITINTSHVEYETETRHYAHVDCPGHADYVKNMITGAAQMDGAILVCSAADGPMPQTREHILLARQVGVPYIIVFMNKCDMVDDAELFQLVEMEIRDLLSSYDFPGDDCPIVQGSALKALEGDAAYEEKIFELATALDRYIPTPERAVDKPFLLPIEDVFSISGRGTVVTGRVERGIIHVGDEIEIVGLKETQKTTCTGVEMFRKLLDEGQAGDNVGVLLRGTKREDVERGQVLAKRGTITPHTKFKAEVYVLSKEEGGPHTPFFANYRPQFYFRTTDVTGTITLEKGVEMVMPGENVTITVELIAPIAMEEGLRFAIREGGRTVGAGVVSSVIA

SEQ ID NO: 27701 - DNA, 1185 bp, Neisseria meningitidis serogroup A
  CDS (1)..(1185): transl_table=11
atggctaaggaaaaattcgaacgtagcaaaccgcacgtaaacgttggcaccatcggtcacgttgaccatggtaaaaccaccctgactgccgctttgactactattttggctaaaaaattcggcggtgctgcaaaagcttacgaccaaatcgacaacgcacccgaagaaaaagcacgcggtattaccattaacacctcgcacgtggaatacgaaaccgaaacccgccactacgcacacgtagactgtccggggcacgccgactacgttaaaaacatgattaccggcgcagcacaaatggacggtgcaatcctggtatgttccgcagccgacggccctatgccgcaaacccgcgaacacatcctgctggcccgtcaagtaggcgtaccttacatcatcgtgttcatgaacaaatgcgacatggtcgacgatgccgagctgttggaactggttgaaatggaaatccgcgacctgctgtccagctacgacttccccggcgacgactgcccgatcgtacaaggttccgcactgaaagccttggaaggcgatgccgcttacgaagaaaaaatcttcgaattggctgctgcattggacagctacatcccgactcccgagcgtgccgtggacaaacctttcttgttgcctatcgaagacgtattctctatttccggtcgtggtacagtagtaaccggtcgtgtagagcgcggtatcatccacgtcggtgacgagatcgaaatcgtcggtctgaaagaaactcaaaaaaccacttgtaccggtgttgaaatgttccgcaaactgctggacgaaggtcaagcaggcgacaacgtaggcgtattgctgcgcggtaccaaacgtgaagacgtagagcgtggtcaagtattggctaaaccgggtacaatcactcctcacaccaagttcaaagcagaagtatacgtactgagcaaagaagagggcggccgccataccccgttcttcgccaactaccgtccccaattctacttccgtaccaccgacgtaaccggcgcggttactttggaagaaggtgtggaaatggtaatgccgggcgagaacgtaaccatcaccgtagaactgattgcgcctatcgctatggaagaaggtttgcgctttgcgattcgcgaaggcggccgtaccgtgggtgccggcgtggtttcttctgttatcgcttaa

SEQ ID NO: 27702 - protein, 394 aa, Neisseria meningitidis serogroup A
MAKEKFERSKPHVNVGTIGHVDHGKTTLTAALTTILAKKFGGAAKAYDQIDNAPEEKARGITINTSHVEYETETRHYAHVDCPGHADYVKNMITGAAQMDGAILVCSAADGPMPQTREHILLARQVGVPYIIVFMNKCDMVDDAELLELVEMEIRDLLSSYDFPGDDCPIVQGSALKALEGDAAYEEKIFELAAALDSYIPTPERAVDKPFLLPIEDVFSISGRGTVVTGRVERGIIHVGDEIEIVGLKETQKTTCTGVEMFRKLLDEGQAGDNVGVLLRGTKREDVERGQVLAKPGTITPHTKFKAEVYVLSKEEGGRHTPFFANYRPQFYFRTTDVTGAVTLEEGVEMVMPGENVTITVELIAPIAMEEGLRFAIREGGRTVGAGVVSSVIA

SEQ ID NO: 27703 - DNA, 1233 bp, Nephroselmis olivacea
  CDS (1)..(1233): transl_table=11
atggcacgcgaaaaatttgaacgtacaaaaccacacgtaaatattggtacgatcggtcacgttgaccacgggaaaactacattaacagctgctattactatggttatggcatgtaatacagcaggtagcaaagggaaaaaatatgaagatattgattccgctccagaagaaaaggcacgtgggattacgattaatacagcccatgtcgagtatgagactgcaactcgtcactatgctcacgtcgattgtccaggtcacgctgactatgtgaaaaacatgattactggggctgctcaaatggatggtgctattttagttgtgtctggggcagatggtcctatgccacaaacgaaagaacacattttgcttgcaaaacaagtaggtgttccaaatattgttgtcttcttaaataagcaagatcaggttgacgatgaagaacttctcgagcttgttgaactggaggttcgtgaaactttgtccaactatgaattcccaggagatgaagtgcctgtagtcccagggtctgccctgttagcgcttgaagcgatgacagaaaatccaagcttgaaacgtggtgaaaatgaatgggtagataagattttcgccttgatggatgctgtcgaccaatatattcctacaccaaaacgtgatactgataagagtttcttaatggcagtggaggatgtattctctattacaggccgtggaactgttgcgactggacgtgtagaacgtggaagtgtcaaactcggtgatacgattgaaatcgtaggactcaaaccaacccgagagacgactgtcaccggtttggaaatgttccagaaaacgcttgaccaaagtgtggctggtgataacgtgggaattcttcttcgtggaatccaaaaagaagatattcaacgtggtatggtactcgctgccccacgtactattactcctcatacaaaatttgaatctcaagtttatgtattaacgaaggaagaagggggccgtcatacaccgtttttcccaggctatcgtccacagttctatgttcgtactactgatgtaactggaaagattgattctttccgtgctgatgatggtggtgaagcaactatggttatgccaggtgatcgcgtgaaaatggttgtagaacttattcagccaattgctattgagaaaggaatgagattcgctattcgtgaaggtgggcgtactgtaggtgcaggcgtcgtgtctaatattattgcataa

SEQ ID NO: 27704 - protein, 410 aa, Nephroselmis olivacea
MAREKFERTKPHVNIGTIGHVDHGKTTLTAAITMVMACNTAGSKGKKYEDIDSAPEEKARGITINTAHVEYETATRHYAHVDCPGHADYVKNMITGAAQMDGAILVVSGADGPMPQTKEHILLAKQVGVPNIVVFLNKQDQVDDEELLELVELEVRETLSNYEFPGDEVPVVPGSALLALEAMTENPSLKRGENEWVDKIFALMDAVDQYIPTPKRDTDKSFLMAVEDVFSITGRGTVATGRVERGSVKLGDTIEIVGLKPTRETTVTGLEMFQKTLDQSVAGDNVGILLRGIQKEDIQRGMVLAAPRTITPHTKFESQVYVLTKEEGGRHTPFFPGYRPQFYVRTTDVTGKIDSFRADDGGEATMVMPGDRVKMVVELIQPIAIEKGMRFAIREGGRTVGAGVVSNIIA

SEQ ID NO: 27705 - DNA, 1233 bp, Oltmannsiellopsis viridis
  CDS (1)..(1233): transl_table=11
atggcacgtgaaaagtttgaacgttcaaaaccacacgtaaatattggtactattggtcacgtagaccacggtaaaacaacattaacagctgctattacaatggcaatgtctgttttctctggcgctggtgcgggtaaaaaatatgatgaaattgactctgctccagaggaaaaagctcgtggtattactattaacacagcacacgtagaatacgaaacagaaaaccgtcactacgcacacgtagactgtccaggacacgccgactacgttaaaaacatgattacaggtgccgctcaaatggacggtgctattttagttgtttctggtgcagatggtcctatgccacaaacaaaagaacacttactattagcaaaacaagtaggtgtacctaaaattgttgttttccttaacaaaaaagaccaagtagatgacgacgaattactagaattagttgaattagaagttcgtgaaactttagacaactatgaatttgacggtgatgacatcccaattattccaggttctgctttattagctttagaagctttaattgaaagccctgaagctaaaaaaggtgacaatgaatgggttgactgcatttactcattaatggaaaatgtagactcttacatcccaactccagagcgtgacacagataaaccgttcttaatggccgttgaagacgttttctctattacaggtcgtggtactgtagcaacaggacgtgttgaacgtggtgttgttaaaattggtgacacagtagaacttgtaggtttaaaagacactacagaaacaactgttactggtttagaaatgttccaaaaaacattagatgaaagtgttgctggtgataacgttggtattttattacgtggtgttcaaaaagaaaacattcaacgtggtatggtattagcaaaaccaggtagtatttctccacacactaaatttgaagctcaagtttacgttttaactaaagaagaaggtggtcgtcacactcctttcttccctggttaccgtccacagttctacgtacgaacaactgacgtaacaggtaaaattgaatcattcgtagcagatgatggttctgcttctcaaatggttatgcctggtgaccgtgttaagatgttagttgaattaatcaacccaattgccgttgaaaaaggtatgcgtttcgctattcgtgaaggtggtcgtactgtaggtgcaggtgttgtttctgaaattcttgcttaa

SEQ ID NO: 27706 - protein, 410 aa, Oltmannsiellopsis viridis
MAREKFERSKPHVNIGTIGHVDHGKTTLTAAITMAMSVFSGAGAGKKYDEIDSAPEEKARGITINTAHVEYETENRHYAHVDCPGHADYVKNMITGAAQMDGAILVVSGADGPMPQTKEHLLLAKQVGVPKIVVFLNKKDQVDDDELLELVELEVRETLDNYEFDGDDIPIIPGSALLALEALIESPEAKKGDNEWVDCIYSLMENVDSYIPTPERDTDKPFLMAVEDVFSITGRGTVATGRVERGVVKIGDTVELVGLKDTTETTVTGLEMFQKTLDESVAGDNVGILLRGVQKENIQRGMVLAKPGSISPHTKFEAQVYVLTKEEGGRHTPFFPGYRPQFYVRTTDVTGKIESFVADDGSASQMVMPGDRVKMLVELINPIAVEKGMRFAIREGGRTVGAGVVSEILA

SEQ ID NO: 27707 - DNA, 1230 bp, Ostreococcus tauri
  CDS (1)..(1230): transl_table=11
atggcacgcgaaaagtttgagcgtacaaaaccgcacgtaaacatcggaacaattggacacgtagaccacggtaagacaactcttacagcagctattactatggcaatggcagctcgtggtggttcagctggtaagaagtatgatgaaattgactcttcacctgaagaaaaggcacgtggtattactattaatactgcacacgtagagtatgaaacagcaactcgtcactacgctcacgtagattgtccgggacacgccgactatgtaaaaaatatgattactggtgcagcgcagatggatggagcaattcttgtagtatcgggtgctgatggaccaatgccacaaacgaaagagcacattcttcttgctaagcaagtaggtgtacctaatattgttgttttcttaaacaaagaagaccaagttgacgatgaagaattacttgaactcgtagacatggaaatccgcgagacactttcgagttacgatttcccaggtgatgaaattccagtaattgctggatcagcacttcttgcattagaagcgctttcatcaaatcctaaaattggtgatggggaagacaagtgggtagacaagattttctcattaatggataacgtagacagttatattcctactccagcacgtgaaacagataagactttccttatggccgttgaggatgtattctcaattactggacgtggaacagtagcaactgggcgtgtagagcgtggaacagtaaaagttggagcaagtattgagattattggatacgttgatactcgtgtggcaacagtaacaggtttagaaatgttccaaaagactcttgaagagtctgtagctggtgataacgttggtgtacttcttcgtggtattcagaaagaagatattgagcgtggaatggtacttgctcagccaggaacgattacacctcatactaaatttgaagcccaagtatatgttcttaaaaaagaagaaggtggacgtcacactccattcttccctggataccgtccacaattctatgtacgtacaacagacgtaacaggaaaaattgagtcattcatttctgatgaaggggatgaagcaacaatggtaatgcctggtgaccgtgttaaaatggtagtagaacttatccaaccaattgccattgaaaatggaatgcgttttgcaattcgtgaaggtggtcgtactgttggggcaggtgtagtttcttcaatccttaaataa

SEQ ID NO: 27708 - protein, 409 aa, Ostreococcus tauri
MAREKFERTKPHVNIGTIGHVDHGKTTLTAAITMAMAARGGSAGKKYDEIDSSPEEKARGITINTAHVEYETATRHYAHVDCPGHADYVKNMITGAAQMDGAILVVSGADGPMPQTKEHILLAKQVGVPNIVVFLNKEDQVDDEELLELVDMEIRETLSSYDFPGDEIPVIAGSALLALEALSSNPKIGDGEDKWVDKIFSLMDNVDSYIPTPARETDKTFLMAVEDVFSITGRGTVATGRVERGTVKVGASIEIIGYVDTRVATVTGLEMFQKTLEESVAGDNVGVLLRGIQKEDIERGMVLAQPGTITPHTKFEAQVYVLKKEEGGRHTPFFPGYRPQFYVRTTDVTGKIESFISDEGDEATMVMPGDRVKMVVELIQPIAIENGMRFAIREGGRTVGAGVVSSILK

SEQ ID NO: 27709 - DNA, 1467 bp, Pisum sativum
  CDS (1)..(1467)
  misc_feature (934)..(934): n is a, g, c or t
  misc_feature (935)..(935): n is a, g, c or t
atggcactttcttccaccgccgcaaccacttcttccaaactcaaactatctaacccaccgtcactttcccacactttcaccgcctccgcctccgcctccgtttcaaactcaacatcgttccgtcccaaactaaccctaactcgcctctcttcctccttcctcaacccttccacaatcctccacctcactccctctcaacgcaccaaccgtccttcttcctctcccttcaccgtccgcgccgcccgtggcaaattcgagcgcaagaaacctcatctcaacatcggtacaattggccacgtcgaccatggcaaaaccactctcactgctgctctcactatggctctcgcttgcctcggtaacagcgcccctaaaaagtacgacgaaattgacgctgctcccgaagagcgtgcacgtggaattacaattaacactgcaaccgttgagtacgagactgaaactcgtcactacgctcatgtcgattgtcccggtcacgctgattacgtcaagaatatgatcactggtgccgctcaaatggacggcgctatcctcgttgtctccggcgccgatggtcccatgcctcaaactaaagaacacatccttctcgccaagcaggttggtgttccgagcgtggttgtgtttttgaacaagcaggaccaagtggatgatgaggagcttcttgagcttgtggagcttgaagttcgggagcttctctcatcttatgagtttcctggcgatgacattccgattgtttctggttcggcgctcttggccttggaagcattaatggcaaaccctactcttaaacgtgggaataaccagtgggtggataagatttatcagcttatggatgaagttgataaatatatcccaatccctcaacgtcagacggaactcccctttttgcttgccattgaggatgtgttttcaatcactnntcgtggaacagtcgccactgggagaattgaaagagggctggttaaagttggtgatgtggttgaccttgtcggtttgagggaaacaaggaacactaccgtgacgggtgtagaaatgttccaaaagattttggatgatgctatggcgggtgacaatgtggggttgttgttgagaggtattcagaagattgacattcaaagagggatggttttggctaagcccggaactatcactcctcactctaagtttagtgctattgtatatgttttgaagaaggaagaaggtggaagacactcacctttctttgctggttataggcctcaattttacatgaggacgacagatgtaactggaaaagttacttctattatgaatgataaggatgaggagtcgaagatggtgatgcctggtgatcgtgtgaagatcgtggtggaactcattgttcccgtggctatcgaacaaggaatgaggttcgctattagagaaggagggaagaccgttggagctggtgttattggagctatcattgagtga

SEQ ID NO: 27710 - protein, 488 aa, Pisum sativum
  misc_feature (312)..(312): The Xaa at location 312 stands for Ala, Arg, Asn, Asp, Cys, Gly, His, Ile, Leu, Phe, Pro, Ser, Thr, Tyr, or Val.
MALSSTAATTSSKLKLSNPPSLSHTFTASASASVSNSTSFRPKLTLTRLSSSFLNPSTILHLTPSQRTNRPSSSPFTVRAARGKFERKKPHLNIGTIGHVDHGKTTLTAALTMALACLGNSAPKKYDEIDAAPEERARGITINTATVEYETETRHYAHVDCPGHADYVKNMITGAAQMDGAILVVSGADGPMPQTKEHILLAKQVGVPSVVVFLNKQDQVDDEELLELVELEVRELLSSYEFPGDDIPIVSGSALLALEALMANPTLKRGNNQWVDKIYQLMDEVDKYIPIPQRQTELPFLLAIEDVFSITXRGTVATGRIERGLVKVGDVVDLVGLRETRNTTVTGVEMFQKILDDAMAGDNVGLLLRGIQKIDIQRGMVLAKPGTITPHSKFSAIVYVLKKEEGGRHSPFFAGYRPQFYMRTTDVTGKVTSIMNDKDEESKMVMPGDRVKIVVELIVPVAIEQGMRFAIREGGKTVGAGVIGAIIE

SEQ ID NO: 27711 - DNA, 1230 bp, Phaeodactylum tricornutum
  CDS (1)..(1230): transl_table=11
atggcacgtgaaaaatttgaacgtacaaaaccacatgttaatattggtactattggtcacgtagatcatggaaagacaactttaactgcagcaatcactgcaactttagccctagatggtggtgcacaagcaaaagcttacgctgatattgatggtgctcctgaagaacgtgcacgtggtattactattaatacagcacacgttgaatatgaaacaaaagatcgtcattatgcacatgtagattgtccaggtcacgctgactacgttaaaaatatgattactggtgctgcacaaatggatggtgcaatcttagtagtttctgctgccgatggtccgatgcctcaaacacgtgagcatatcttattatcaaaacaagttggagttccaaacattgttgtatttttaaataaagaagaccaagtagatgatgaggaattattagaattagtagaattagaagttcgtgaattactttctgcttatgatttcccaggtgatgatattccaatctgtcccggatcagctttacaagctatcgaagcaattacagcaaatccaactgtaaaacgtggtgataataaatgggttgataaaatttatgcattaatggatgcggtagacgaatatattcctaccccggagcgtgatgtagaaaaaacattcttaatggcaattgaagatgtgttttcaatcacgggccgtggtacagttgcgacaggacgtatcgaacgtggtgtagtaaaagttggtgaaaacgttgaaatcgtgggtgttaccgatacacaaacaacaacaattacgggtattgaaatgttccaaaaaactttagaggaaggttttgccggtgataacgtaggtattctattacgtggtgttacacgtgaaaatattgaacgtggaatggtattagctaaaccaggtacgattactccacatacaagttttgagtcagaggtttatgttttaacaaaagatgaaggtgggcgtcatactccattctttacaggttatagacctcaattttacgtacgaacaactgatgttactggttcaattacacaatttacagctgatgatggatcagtagttgaaatggtaatgcctggtgatcgtattaaaatgaccgctgaattcatttaccctgtagctattgaagcgggtatgcgatttgcaattcgtgaaggtgggcgtacaattggagcaggtgtagtttctaaaattgttaaataa

SEQ ID NO: 27712 - protein, 409 aa, Phaeodactylum tricornutum
MAREKFERTKPHVNIGTIGHVDHGKTTLTAAITATLALDGGAQAKAYADIDGAPEERARGITINTAHVEYETKDRHYAHVDCPGHADYVKNMITGAAQMDGAILVVSAADGPMPQTREHILLSKQVGVPNIVVFLNKEDQVDDEELLELVELEVRELLSAYDFPGDDIPICPGSALQAIEAITANPTVKRGDNKWVDKIYALMDAVDEYIPTPERDVEKTFLMAIEDVFSITGRGTVATGRIERGVVKVGENVEIVGVTDTQTTTITGIEMFQKTLEEGFAGDNVGILLRGVTRENIERGMVLAKPGTITPHTSFESEVYVLTKDEGGRHTPFFTGYRPQFYVRTTDVTGSITQFTADDGSVVEMVMPGDRIKMTAEFIYPVAIEAGMRFAIREGGRTIGAGVVSKIVK

SEQ ID NO: 27713 - DNA, 1230 bp, Prototheca wickerhamii
  CDS (1)..(1230): transl_table=11
atggcacgcgcaaaatttgaacgtaaaaaaccacatgttaatattggtactattggtcatgtggaccatggtaaaacaacattaacagcagcaattactatggcattagctgcacgtgggggtgggaaaggaaaaaaatatgctgagattgattctgcacctgaagaaaaagctcgcggtattactattaatactgctcatgttgaatatgaaacagaaagtcgtcattatgcccatgtggattgcccaggacatgcagattatgtaaagaatatgattacaggtgctgctcaaatggatggtgctattcttgttgtatctggcgctgatggccctatgccacaaacaaaagagcatattcttttagccaaacaggtaggtgttccgaatattgttgtttttataaacaaagaagatcaagtagacgatatagaattaatagaattagtagaattagaggttcgtgaaacattacaaagatatgattttcctggtgatgaagtacctatgattccggggtcagctctgatggcattaacggcattaacagataatccaaagattaaaccaggtgaaaacaaatgggttgataaaatttataatctaatggatatagtagattcttacataccaaccccaaaacggaatattgaaaaaccttttttaatggcgatagaggatgttttctctattacagggcgaggtactgttgcgactggtcgtgtagagcgtggtgttgttaaaattggtgatagtgtagaaattgttggtctgggtgctactaaaatcactacagtaacaggcttggaaatgtttcaaaaaacactagatgaaagtatagcgggcgataatgttggtattttacttcgtgggattcaaaaaacagaaattcaacgcggaatggttttagctaaaccaaaaagcattaccccacatacaaattttgaagcacaagtttacgtattaaataaagaagaaggtgggcgtgatacaccattttttagtgggtatcgtccacaattttatgtacgaacaacagatgtaactggtaaaatcgaatctttttgtacagatgctggtgaacctattaaaatggtattacccggtgatcgtattaaaatgaaagcagaattaattcaacctattgctattgagcgaaatatgcgatttgctattcgtgaaggaggaaaaacagtaggtgcaggtgttgtaggaaaaattttaaaataa

SEQ ID NO: 27714 - protein, 409 aa, Prototheca wickerhamii
MARAKFERKKPHVNIGTIGHVDHGKTTLTAAITMALAARGGGKGKKYAEIDSAPEEKARGITINTAHVEYETESRHYAHVDCPGHADYVKNMITGAAQMDGAILVVSGADGPMPQTKEHILLAKQVGVPNIVVFINKEDQVDDIELIELVELEVRETLQRYDFPGDEVPMIPGSALMALTALTDNPKIKPGENKWVDKIYNLMDIVDSYIPTPKRNIEKPFLMAIEDVFSITGRGTVATGRVERGVVKIGDSVEIVGLGATKITTVTGLEMFQKTLDESIAGDNVGILLRGIQKTEIQRGMVLAKPKSITPHTNFEAQVYVLNKEEGGRDTPFFSGYRPQFYVRTTDVTGKIESFCTDAGEPIKMVLPGDRIKMKAELIQPIAIERNMRFAIREGGKTVGAGVVGKILK

SEQ ID NO: 27715 - DNA, 1194 bp, Pseudomonas aeruginosa
  CDS (1)..(1194): transl_table=11
gtggctaaggaaaaattcgaacgtaacaaaccgcacgtcaacgtcggcaccatcggtcacgttgaccatggcaagaccactctgaccgctgcactgaccaaggtctgctccgatacctggggtggttccgctcgtgctttcgatcagatcgacaacgcgccggaagaaaaggcccgcggtatcaccatcaacacctcgcacgttgaatacgattccgctgttcgtcactacgcccacgttgactgccccggtcacgccgactacgtgaagaacatgatcaccggtgctgcccagatggacggcgcgatcctggtttgctcggctgccgacggccccatgccgcagacccgcgagcacatcctgctgtcccgccaggtaggcgttccctacatcgtcgtgttcctgaacaaggccgacatggtcgacgacgccgagctgctggaactggtcgagatggaagttcgcgatctgctgaacacctacgacttcccgggcgacgacactccgatcatcatcggttccgcgctgatggcgctggaaggcaaggatgacaacggcatcggcgtaagcgccgtgcagaagctggtagagaccctggactcctacattccggagccggttcgtgccatcgaccagccgttcctgatgccgatcgaagacgtgttctcgatctccggccgcggtaccgtggtaaccggtcgtgtagagcgcggcatcatcaaggtccaggaagaagtggaaatcgtcggcatcaaggcgaccaccaagactacctgcaccggcgttgaaatgttccgcaagctgctcgacgaaggtcgtgctggtgagaacgttggtatcctgctgcgtggcaccaagcgtgaagacgtagagcgtggccaggtactggccaagccgggcaccatcaagccgcacaccaagttcgagtgcgaagtgtacgtgctgtccaaggaagaaggtggtcgtcacaccccgttcttcaagggctaccgtccgcagttctacttccgtaccaccgatgtgaccggtaactgcgaactgccggaaggcgtagagatggtaatgccgggcgacaacatcaagatggttgtcaccctgatcgctccgatcgccatggaagatggcctgcgcttcgcgatccgcgaaggcggccgtaccgttggcgccggcgtggttgccaagatcatcgagtaa

SEQ ID NO: 27716 - protein, 397 aa, Pseudomonas aeruginosa
MAKEKFERNKPHVNVGTIGHVDHGKTTLTAALTKVCSDTWGGSARAFDQIDNAPEEKARGITINTSHVEYDSAVRHYAHVDCPGHADYVKNMITGAAQMDGAILVCSAADGPMPQTREHILLSRQVGVPYIVVFLNKADMVDDAELLELVEMEVRDLLNTYDFPGDDTPIIIGSALMALEGKDDNGIGVSAVQKLVETLDSYIPEPVRAIDQPFLMPIEDVFSISGRGTVVTGRVERGIIKVQEEVEIVGIKATTKTTCTGVEMFRKLLDEGRAGENVGILLRGTKREDVERGQVLAKPGTIKPHTKFECEVYVLSKEEGGRHTPFFKGYRPQFYFRTTDVTGNCELPEGVEMVMPGDNIKMVVTLIAPIAMEDGLRFAIREGGRTVGAGVVAKIIE

SEQ ID NO: 27717 - DNA, 1230 bp, Pseudendoclonium akinetum
  CDS (1)..(1230): transl_table=11
atggctcgtgaaaaatttgagagaaaaaaacaacacgttaacatcggaacaattggacatgttgatcacggaaaaacaaccttaactgcagcaattactatgtgtttacaatcttttagtaaaaataaaggcaaacgctatgatgaaattgactcagcacctgaagaaaaagcgcgtggtattacaattaatactgcccatgttgaatacgaaacagaaaatcgtcattatgctcatgtagattgtcctggtcatgctgattatgtaaagaatatgattacaggcgcggctcaaatggacggtgccattcttgttgtatctggagctgatggaccaatgccccaaactaaagaacatttattattagcaaaacaagtaggagtgcctactttggttgtttttttaaataaagaagatcaagttgatgatcctgagttattagaattagttgaattagaagttcgtgaaactttagataaatatgaatatcctggagatgatattccaattattgcaggatctgctttattagcgttagaagctttaattgaaaaccctaatgtaaaaccgggtgaaaatgagtgggttgataaaattctaaaattaatgcaaaatgtagatacatatattccaacgcccgtacgagaaacggataaaacgtttttaatggcagttgaagatgtcttttctattacaggtcgtggaacagttgcaacgggtcttgttgaacgtggaaccctaaaaacgggtgctacagtggaaattattggattacgtgatacaacaacaactaccgtaacaggattagaaatgtttcaaaaaactttagatgaaaccgttgctggagacaatgttggggtattattacgtggtgtacaaaaagataatattcaacgtggtatggtattagcagccccaggaactattaaaccccatacaaaatttgaagctcaagtttatattttaacgaaagaggaaggaggaagacatactccttttttcccaggctatagacctcaattctatgttcgtacaacagatgttactggtaaaatcgaatcttttacagcagatgatgggtctgaagctttaatggcaacttctggggatcgtctaaaaatggtggttgaattaattcagcccattgcggttgaaaacggtatgcgatttgcgattcgcgaggggggtcgtactgtaggagcaggagtagtttcaactattttaaaataa

SEQ ID NO: 27718 - protein, 409 aa, Pseudendoclonium akinetum
MAREKFERKKQHVNIGTIGHVDHGKTTLTAAITMCLQSFSKNKGKRYDEIDSAPEEKARGITINTAHVEYETENRHYAHVDCPGHADYVKNMITGAAQMDGAILVVSGADGPMPQTKEHLLLAKQVGVPTLVVFLNKEDQVDDPELLELVELEVRETLDKYEYPGDDIPIIAGSALLALEALIENPNVKPGENEWVDKILKLMQNVDTYIPTPVRETDKTFLMAVEDVFSITGRGTVATGLVERGTLKTGATVEIIGLRDTTTTTVTGLEMFQKTLDETVAGDNVGVLLRGVQKDNIQRGMVLAAPGTIKPHTKFEAQVYILTKEEGGRHTPFFPGYRPQFYVRTTDVTGKIESFTADDGSEALMATSGDRLKMVVELIQPIAVENGMRFAIREGGRTVGAGVVSTILK

SEQ ID NO: 27719 - DNA, 1194 bp, Pseudomonas syringae pv
  CDS (1)..(1194): transl_table=11
gtggctaaagaaaaatttgatcgttccctcccgcattgcaacgtcggcaccattggtcacgttgaccatggcaagaccacgctgaccgctgctctgactcgcgtctgctccgaagttttcggttcggctcgtgttgacttcgacaagatcgacagcgcaccagaagagaaagctcgcggtatcaccatcaacaccgctcacgttgagtacaactcggctacgcgtcactacgcgcacgttgactgcccaggtcacgccgactacgtgaagaacatgatcaccggtgctgcgcagatggacggcgctatcctggtttgttcggctgctgatggtccgatgccgcaaacccgtgagcacatcctgctgtcccgtcaggttggcgttccgtacatcgtggtcttcctgaacaaggctgacctggtagacgacgctgagctgctggaactggttgagatggaagtgcgcgatctgctgagcacttacgacttcccgggcgacgacactccaatcatcatcggctccgcccgtatggcattggaaggcaaagacgacaacgagatgggcaccactgccgtcaagaagttggtcgaaactctggacagctacattcctcagccagagcgtgctgtcgacaagccgttcctgatgccgatcgaagacgtattctcgatctccggtcgcggtactgttgtgactggtcgtgttgagcgcggtatcgtcaaggtccaggatccactggaaatcgttggtctgcgtgacactactgtcactacctgcaccggcgttgagatgttccgcaagctgctcgacgaaggtcgtgctggcgagaactgcggcgttctgctgcgcggtaccaagcgtgacgacgttgagcgtggccaggttctggtcaagccaggcaccgtcaagccgcacactcagttcgaagctgaaatctacgttctgagcaaagaagaaggcggtcgtcacactcctttcttcaaaggctaccgtccacagttctacttccgtactaccgacgtaactggtagctgcgaactgccggaaggcgtagaaatggttatgccaggtgataacgttaaagtttccgttaccctgatcaagccaatcgcaatggaagatggtctgcgtttcgcaattcgtgaaggcggtcgtaccgttggcgctggcgtcgtagccaaaatcatcgcgtaa

SEQ ID NO: 27720 - protein, 397 aa, Pseudomonas syringae pv
MAKEKFDRSLPHCNVGTIGHVDHGKTTLTAALTRVCSEVFGSARVDFDKIDSAPEEKARGITINTAHVEYNSATRHYAHVDCPGHADYVKNMITGAAQMDGAILVCSAADGPMPQTREHILLSRQVGVPYIVVFLNKADLVDDAELLELVEMEVRDLLSTYDFPGDDTPIIIGSARMALEGKDDNEMGTTAVKKLVETLDSYIPQPERAVDKPFLMPIEDVFSISGRGTVVTGRVERGIVKVQDPLEIVGLRDTTVTTCTGVEMFRKLLDEGRAGENCGVLLRGTKRDDVERGQVLVKPGTVKPHTQFEAEIYVLSKEEGGRHTPFFKGYRPQFYFRTTDVTGSCELPEGVEMVMPGDNVKVSVTLIKPIAMEDGLRFAIREGGRTVGAGVVAKIIA

SEQ ID NO: 27721 - DNA, 1176 bp, Rhizobium meliloti
  CDS (1)..(1176): transl_table=11
atggcaaagagcaaatttgagcgcaataagccgcacgtcaacattggcacgattggccacgttgaccatggcaagacgtcgctgacggcagcgatcacgaagtatttcggcgagttcaaggcgtatgaccagatcgacgccgcgccggaagaaaaggcccgcggcatcaccatttcgacggcgcacgtcgaatacgagacgccgaaccgtcactatgcgcatgtcgactgccccggccacgccgactacgtcaagaacatgatcaccggtgcggcgcagatggacggcgcgatcctggttgtttcggccgctgacggcccgatgccgcagacgcgcgaacacatcctgctggcccgccaggtcggcgttccggcgatcgtcgtgttcctgaacaaggtcgaccaggtcgacgacgcggaactgctcgagctcgtcgagctggaagtgcgcgaactgctgtcgtcctacgaattcccgggcgacgacattccgatcgtcaagggttcggctctggccgcgcttgaagattcggacaagaagatcggcgaagacgcgatccgcgagctgatggctgcggtcgacgcctacatcccgacgcctgagcgtccgatcgaccagccgttcctgatgccgatcgaagacgtgttctcgatctcgggccgcggtacggtcgtgaccggtcgcgtcgagcgcggcatcgtcaaggtcggtgaggaaatcgagatcgtcggcatccgtccgacgacgaagacgacctgcacgggcgttgaaatgttccgcaagctgctcgaccagggccaggccggcgacaacatcggcgcgctgcttcgcggtgtcgaccgcaacggcgtcgagcgcggtcagattctgtgcaagccgggttcggtcaagccgcaccgcaagttcaaggctgaagcctacatcctgacgaaggaagagggtggccgtcacacgccgttcttcaccaactaccgtccgcagttctacttccgcacgacggacgtgaccggcatcgtgacgcttccggaaggcacggaaatggtcatgccgggcgacaacgtcacggttgacgtcgagctgatcgtgccgatcgcgatggaagaaaagctgcgcttcgctatccgcgaaggcggccgcaccgtcggcgcaggcatcgtcgcctccatcgtcgagtaa

SEQ ID NO: 27722 - protein, 391 aa, Rhizobium meliloti
MAKSKFERNKPHVNIGTIGHVDHGKTSLTAAITKYFGEFKAYDQIDAAPEEKARGITISTAHVEYETPNRHYAHVDCPGHADYVKNMITGAAQMDGAILVVSAADGPMPQTREHILLARQVGVPAIVVFLNKVDQVDDAELLELVELEVRELLSSYEFPGDDIPIVKGSALAALEDSDKKIGEDAIRELMAAVDAYIPTPERPIDQPFLMPIEDVFSISGRGTVVTGRVERGIVKVGEEIEIVGIRPTTKTTCTGVEMFRKLLDQGQAGDNIGALLRGVDRNGVERGQILCKPGSVKPHRKFKAEAYILTKEEGGRHTPFFTNYRPQFYFRTTDVTGIVTLPEGTEMVMPGDNVTVDVELIVPIAMEEKLRFAIREGGRTVGAGIVASIVE

SEQ ID NO: 27723 - DNA, 1185 bp, Salmonella typhi
  CDS (1)..(1185): transl_table=11
atgtctaaagaaaagtttgaacgtacaaaaccgcacgttaacgtcggtactatcggccacgttgaccatggtaaaacaacgctgaccgctgccattactaccgtactggctaaaacctacggcggtgccgcccgcgcattcgaccagatcgataacgcgccggaagaaaaagcgcgtggtatcaccatcaacacttctcacgttgaatacgataccccgacccgccactacgcacacgtagactgcccggggcacgccgactatgttaaaaacatgatcaccggtgctgctcagatggacggcgcgatcctggttgttgctgcgactgacggcccgatgccgcagacccgtgagcacatcctgctgggtcgtcaggtaggcgttccgtacatcatcgtgttcctgaacaaatgcgacatggttgatgacgaagagctgctggaactggttgaaatggaagttcgtgaacttctgtctcagtacgacttcccgggcgacgacacgccgatcgttcgtggttctgctctgaaagcgctggaaggcgacgcagagtgggaagcgaaaatcatcgaactggctggcttcctggattcttacatcccggaaccagagcgtgcgattgacaagccgttcctgctgccgatcgaagacgtattctccatctccggtcgtggtaccgttgttaccggtcgtgtagaacgcggtatcatcaaagtgggcgaagaagttgaaatcgttggtatcaaagagactcagaagtctacctgtactggcgttgaaatgttccgcaaactgctggacgaaggccgtgccggtgagaacgtaggtgttctgctgcgtggtatcaaacgtgaagaaatcgaacgtggtcaggtactggctaagccgggcaccatcaagccgcacactaagttcgaatctgaagtgtacattctgtccaaagatgaaggcggccgtcatactccgttcttcaaaggctaccgtccgcagttctacttccgtactactgacgtgactggtaccatcgaactgccggaaggcgtagagatggtaatgccgggcgacaatatcaaaatggttgttaccctgatccacccgatcgcaatggacgacggtctgcgtttcgcaatccgtgaaggcggccgtactgttggcgcgggcgttgttgctaaagttctcggctaa

SEQ ID NO: 27724 - protein, 394 aa, Salmonella typhi
MSKEKFERTKPHVNVGTIGHVDHGKTTLTAAITTVLAKTYGGAARAFDQIDNAPEEKARGITINTSHVEYDTPTRHYAHVDCPGHADYVKNMITGAAQMDGAILVVAATDGPMPQTREHILLGRQVGVPYIIVFLNKCDMVDDEELLELVEMEVRELLSQYDFPGDDTPIVRGSALKALEGDAEWEAKIIELAGFLDSYIPEPERAIDKPFLLPIEDVFSISGRGTVVTGRVERGIIKVGEEVEIVGIKETQKSTCTGVEMFRKLLDEGRAGENVGVLLRGIKREEIERGQVLAKPGTIKPHTKFESEVYILSKDEGGRHTPFFKGYRPQFYFRTTDVTGTIELPEGVEMVMPGDNIKMVVTLIHPIAMDDGLRFAIREGGRTVGAGVVAKVLG

SEQ ID NO: 27725 - DNA, 1260 bp, Scenedesmus obliquus
  CDS (1)..(1260): transl_table=11
atggcacgcgcaaaatttgaacgttcaaaaccgcatgtaaatattggtactattggtcacgtagaccatggaaaaacaactttaacagcagcaatcacaatggctttagcagcattaggtggtgctactggtaaaaaatatgatgaaattgattcagctccagaagaaaaagctcgtggtattacaattaatactgcacacgtagaatacgaaactccaaatcgtcactatgctcacgtggactgtccaggtcacgcagactatgttaaaaacatgattacaggtgctgcccaaatggatggtgctattttagtagtatcaggtgctgatggtccaatgccacaaacaaaagaacacatcttattagcaaaacaagttggtgtaccaaacatggttgttttcttaaacaaagaagatcaagttgatgatgctgaattattagaattagtagaattagaagttcgtgaaacattagacaaatatgaattcccaggagatgaaattccaattgtaagtgggtcagctttattagctttagaagctttagttgaaaatcctaaaattcaacgtggtgataacaaatgggtagataaaatttttgatttaatggataaagttgatgaatatattccaacaccagaccgtgaaactgataaacctttcttattagctgttgaagatgttttatcaattacaggtcgtggaacagttgcaacaggacgtgttgaaagaggaactttaaaagtaggtgaaaacgttgaattaattggattaaaagacacaaaagcaacagttgttacaggtctagaaatgttcaaaaaaacattagatgaaacaatggctggtgataatgttggtgtacttttacgtggtattcaaaaaaaagatgtggaacgtggaatggttttagcaaaaccaggttcaattactcctcacacaaaatttgaagcacaagtttatgttttaacaaaagaagaaggtggacgtcattcaccattcttagtaggctaccaaccacaattctttattcgtacaacagatgttactggaaaaattgtaagctttactcatattcaaatgaaaaacccttcatcagtagctgaagaacattcaaataaaatggcgatgcctggtgaccgtatcgaagttactgttcaattaatttatccagtagctgttgaaaaaggtatgcgttttgctattcgtgaaggtggtcgtacagtaggtgctggtgttgttacaaatattttagaagaataa

SEQ ID NO: 27726 - protein, 419 aa, Scenedesmus obliquus
MARAKFERSKPHVNIGTIGHVDHGKTTLTAAITMALAALGGATGKKYDEIDSAPEEKARGITINTAHVEYETPNRHYAHVDCPGHADYVKNMITGAAQMDGAILVVSGADGPMPQTKEHILLAKQVGVPNMVVFLNKEDQVDDAELLELVELEVRETLDKYEFPGDEIPIVSGSALLALEALVENPKIQRGDNKWVDKIFDLMDKVDEYIPTPDRETDKPFLLAVEDVLSITGRGTVATGRVERGTLKVGENVELIGLKDTKATVVTGLEMFKKTLDETMAGDNVGVLLRGIQKKDVERGMVLAKPGSITPHTKFEAQVYVLTKEEGGRHSPFLVGYQPQFFIRTTDVTGKIVSFTHIQMKNPSSVAEEHSNKMAMPGDRIEVTVQLIYPVAVEKGMRFAIREGGRTVGAGVVTNILEE

SEQ ID NO: 27727 - DNA, 1320 bp, Schizosaccharomyces pombe
  CDS (1)..(1320)
atgaattcagctaaagctacctctctcctctttcaaggctttagaaaaaattgcttgcgattgaaccgcatttctttcgcttcaggtttgattaaccggttcaccgtcccagctcgaacttatgctgacgaaaaggtgttcgttagaaaaaagccgcatgtcaatattggtactattggtcatgttgaccacggtaaaacgacgttgacggctgctattactaaatgcctttctgatcttggtcaagctagttttatggattatagtcaaattgacaaggcccccgaggaaaaggcacgtggtattaccatttcatctgcccatgttgaatacgaaactgctaatcgtcactatgcccatgtggattgtcctggtcacgccgattacattaagaatatgattactggtgctgctacaatggatggcgctatcattgttgtttctgctaccgatggtcaaatgcctcaaactcgtgaacatttgcttctggctcgtcaagtcggtgtaaagcaaattgttgtatacatcaataaagtcgatatggtcgagcctgatatgatcgagcttgtcgaaatggaaatgcgtgagctactctccgaatacggatttgatggtgacaatactccaattgttagcggcagtgctttatgtgccttagagggtcgtgagcctgagattggtctcaatagtattactaaattgatggaagctgttgatagttatattactcttcctgaaagaaaaacggatgtccctttcttgatggccatcgaggacgttttttcaatttcaggtcgcggaactgtagtcactggccgtgtcgagcgcggtactttaaagaagggtgctgaaatcgaaatcgtcggttatggtagccatttaaagactaccgttactggaattgaaatgttcaaaaagcagcttgatgccgccgttgccggtgacaattgtggccttttacttcgttctatcaagcgagagcaattaaaacgtggaatgattgtcgctcaaccaggaaccgttgctcctcatcagaaattcaaggcatcattctatattttgacaaaagaggaaggaggtcgtcgtaccggtttcgttgacaagtatcgtccccaactgtacagtcgtacttccgacgttactgtcgaacttacccaccctgatcctaacgactcagacaaaatggttatgcctggagacaatgtcgagatgatctgtacgcttattcaccccattgtcatcgaaaaaggacaacgcttcacagttcgtgagggtggaagcactgtaggcacagctttggttactgaacttttggattag

SEQ ID NO: 27728 - protein, 439 aa, Schizosaccharomyces pombe
MNSAKATSLLFQGFRKNCLRLNRISFASGLINRFTVPARTYADEKVFVRKKPHVNIGTIGHVDHGKTTLTAAITKCLSDLGQASFMDYSQIDKAPEEKARGITISSAHVEYETANRHYAHVDCPGHADYIKNMITGAATMDGAIIVVSATDGQMPQTREHLLLARQVGVKQIVVYINKVDMVEPDMIELVEMEMRELLSEYGFDGDNTPIVSGSALCALEGREPEIGLNSITKLMEAVDSYITLPERKTDVPFLMAIEDVFSISGRGTVVTGRVERGTLKKGAEIEIVGYGSHLKTTVTGIEMFKKQLDAAVAGDNCGLLLRSIKREQLKRGMIVAQPGTVAPHQKFKASFYILTKEEGGRRTGFVDKYRPQLYSRTSDVTVELTHPDPNDSDKMVMPGDNVEMICTLIHPIVIEKGQRFTVREGGSTVGTALVTELLD

SEQ ID NO: 27729 - DNA, 1185 bp, Shewanella putrefaciens
  CDS (1)..(1185): transl_table=11
atggctaaagctaaatttgaacgtattaagccccatgtaaacgtgggcaccattggtcacgttgaccatggtaaaaccactctgactgcagctatctctcacgtactggctaagacctacggtggcgaagctaaagacttctctcaaatcgataacgctccagaagagcgtgagcgcggtattaccatcaatacctctcacatcgaatatgacacgccatcacgccactacgcccacgtagactgcccaggccacgctgactatgttaaaaacatgatcactggtgctgcacagatggacggcgcgattctggtagtcgcttcaacagacggtccaatgccacagactcgtgagcacatcctgctttctcgtcaggttggcgtaccattcatcatcgtattcatgaacaaatgtgacatggtagatgacgaagagctgttagagctagttgagatggaagtgcgtgaactgttatcagaatacgatttcccaggtgatgacttaccggtaatccaaggttcagctctgaaagcgctagaaggcgagccagagtgggaagcaaaaatccttgaattagcagcggcgctggattcttacattccagaaccacaacgtgacatcgataagccgttcctactgccaatcgaagacgtattctcaatttcaggccgtggtacagtagtaacaggtcgtgttgagcgtggtattgtacgcgtaggcgacgaagttgaaatcgttggtgtacgtgcgacaactaagacaacgtgtactggtgtagaaatgttccgtaaactgcttgacgaaggtcgtgcaggtgagaactgtggtattttgttacgtggtactaagcgtgatgacgtagaacgtggtcaagtattagcgaagccaggttcaatcaacccacacaccacttttgaatcagaagtttacgtactgtcaaaagaagaaggtggccgtcacacgccattcttcaaaggctaccgtccacagttctacttccgtacaactgacgtaaccggtactatcgaactgccagaaggcgtagagatggtaatgccaggcgacaacatcaagatggtagtgacactgatttgcccaatcgcgatggacgaaggtttacgcttcgcaatccgtgaaggcggtcgtacagtgggtgcaggtgtagtagctaaaatcattgcttaa

SEQ ID NO: 27730 - protein, 394 aa, Shewanella putrefaciens
MAKAKFERIKPHVNVGTIGHVDHGKTTLTAAISHVLAKTYGGEAKDFSQIDNAPEERERGITINTSHIEYDTPSRHYAHVDCPGHADYVKNMITGAAQMDGAILVVASTDGPMPQTREHILLSRQVGVPFIIVFMNKCDMVDDEELLELVEMEVRELLSEYDFPGDDLPVIQGSALKALEGEPEWEAKILELAAALDSYIPEPQRDIDKPFLLPIEDVFSISGRGTVVTGRVERGIVRVGDEVEIVGVRATTKTTCTGVEMFRKLLDEGRAGENCGILLRGTKRDDVERGQVLAKPGSINPHTTFESEVYVLSKEEGGRHTPFFKGYRPQFYFRTTDVTGTIELPEGVEMVMPGDNIKMVVTLICPIAMDEGLRFAIREGGRTVGAGVVAKIIA

SEQ ID NO: 27731 - DNA, 1185 bp, Shigella flexneri
  CDS (1)..(1185): transl_table=11
gtgtctaaagaaaagtttgaacgtacaaaaccgcacgttaacgtcggtactatcggccacgttgaccatggtaaaacaacgctgaccgctgcaatcactaccgtactggctaaaacctacggcggtgctgctcgcgcattcgaccagatcgataacgcgccggaagaaaaagctcgtggtatcaccatcaacacttctcacgttgaatacgacaccccgacccgtcactacgcacacgtagactgcccggggcacgccgactatgttaaaaacatgatcaccggtgctgctcagatggacggcgcgatcctggtagttgctgcgactgacggcccgatgccgcagactcgtgagcacatcctgctgggtcgtcaggtaggcgttccgtacatcatcgtgttcctgaacaaatgcgacatggttgatgacgaagagctgctggaactggttgaaatggaagttcgtgaacttctgtctcagtacgacttcccgggcgacgacactccgatcgttcgtggttctgctctgaaagcgctggaaggcgacgcagagtgggaagcgaaaatcctggaactggctggcttcctggattcttatattccggaaccagagcgtgcgattgacaagccgttcctgctgccgatcgaagacgtattctccatctccggtcgtggtaccgttgttaccggtcgtgtagaacgcggtatcatcaaagttggtgaagaagttgaaatcgttggtatcaaagagactcagaagtctacctgtactggcgttgaaatgttccgcaaactgctggacgaaggccgtgctggtgagaacgtaggtgttctgctgcgtggtatcaaacgtgaagaaatcgaacgtggtcaggtactggctaagccgggcaccatcaagccgcacaccaagttcgaatctgaagtgtacattctgtccaaagatgaaggcggccgtcatactccgttcttcaaaggctaccgtccgcagttctacttccgtactactgacgtgactggtaccatcgaactgccggaaggcgtagagatggtaatgccgggcgacaacatcaaaatggttgttaccctgatccacccgatcgcgatggacgacggtctgcgtttcgcaatccgtgaaggcggccgtaccgttggcgcgggcgttgttgctaaagttctgggctaa

SEQ ID NO: 27732 - protein, 394 aa, Shigella flexneri [sequence omitted]

SEQ ID NO: 27733 - DNA, 1233 bp, Spirulina platensis
  CDS (1)..(1233): transl_table=11
atggcacgcgcaaaatttgaacggaacaaacctcacgttaacattggtactatcggtcacgttgaccacggtaaaaccacgctgactgctgctatcaccatgacattggctgcctctggtggtgctaaagctcgtaagtatgatgatattgatgcggctcctgaagaaaagcagcggggtattaccatcaataccgctcacgtagagtatgaaactgaacaacgccactatgctcacgttgactgtccgggacacgctgactatgtgaaaaatatgatcactggtgctgcccaaatggatggtgcaattctggtggtttcagcggctgatggtcctatgcctcaaacccgtgaacatatcctgctggcgaaacaggtaggggttcctagtatcgtggttttcctgaacaaagccgatatggtagatgatgaggaactactggaactggtggaattggaagttcgcgaactgctaagttcatacgatttccccggtgatgatattcccattgtttctggttctgctttgaaagcattggactttctgacagaaaaccccaaaactactcgcggtgagaatgattgggttgacaagattcatgctctgatggatgaagtagatgcttatatccccactcctgagcgcgatatcgataagggccttcttgatgggctgtgggaagatgttttctcgattactggtcggggtacggtgtctacagccgggatcgaacggggtaaagtcaaggtgggtgacactgttgaactgattggaattaaggatacccgcaccactactgtaactggggcggaaatgttccagaaaactcttgaggaggggatggcgggagataacgtcggtctactgctgcggggtattcagaaaaatgatgttcaacggggtatggtaattgctaaacccaaatcaattactccccacactaagtttgaggcggaagtttatatcctcaagaaagaagaaggcggacggcacactcctttctttaaaggttatcgtcctcagttctatgtacggactactgatgtaaccgggactattgatgagtttactgctgatgatggcagcactccggaaatggttatccctggtgaccggattaatatgactgtacaactcatctgcccgatcgctattgagcaagggatgcgtttcgctatccgtgagggtggtcgtactgttggtgcgggtgtagttgctaagattctggcttag

SEQ ID NO: 27734 - protein, 410 aa, Spirulina platensis [sequence omitted]

SEQ ID NO: 27735 - DNA, 1185 bp, Staphylococcus aureus
  CDS (1)..(1185): transl_table=11
atggcaaaagaaaaattcgatcgttctaaagaacatgccaatatcggtactatcggtcacgttgaccatggtaaaacaacattaacagcagcaatcgctactgtattagcaaaaaatggtgactcagttgcacaatcatatgacatgattgacaacgctccagaagaaaaagaacgtggtatcacaatcaatacttctcacattgagtaccaaactgacaaacgtcactacgctcacgttgactgcccaggacacgctgactacgttaaaaacatgatcactggtgctgctcaaatggacggcggtatcttagtagtatctgctgctgacggtccaatgccacaaactcgtgaacacattcttttatcacgtaacgttggtgtaccagcattagtagtattcttaaacaaagttgacatggttgacgatgaagaattattagaattagtagaaatggaagttcgtgacttattaagcgaatatgacttcccaggtgacgatgtacctgtaatcgctggttcagcattaaaagctttagaaggcgatgctcaatacgaagaaaaaatcttagaattaatggaagctgtagatacttacattccaactccagaacgtgattctgacaaaccattcatgatgccagttgaggacgtattctcaatcactggtcgtggtactgttgctacaggccgtgttgaacgtggtcaaatcaaagttggtgaagaagttgaaatcatcggtttacatgacacatctaaaacaactgttacaggtgttgaaatgttccgtaaattattagactacgctgaagctggtgacaacattggtgcattattacgtggtgttgctcgtgaagacgtacaacgtggtcaagtattagctgctcctggttcaattacaccacatactgaattcaaagcagaagtatacgtattatcaaaagacgaaggtggacgtcacactccattcttctcaaactatcgtccacaattctatttccgtactactgacgtaactggtgttgttcacttaccagaaggtactgaaatggtaatgcctggtgataacgttgaaatgacagtagaattaatcgctccaatcgcgattgaagacggtactcgtttctcaatccgtgaaggtggacgtactgtaggatcaggcgttgttactgaaatcattaaataa

SEQ ID NO: 27736 - protein, 394 aa, Staphylococcus aureus
MAKEKFDRSKEHANIGTIGHVDHGKTTLTAAIATVLAKNGDSVAQSYDMIDNAPEEKERGITINTSHIEYQTDKRHYAHVDCPGHADYVKNMITGAAQMDGGILVVSAADGPMPQTREHILLSRNVGVPALVVFLNKVDMVDDEELLELVEMEVRDLLSEYDFPGDDVPVIAGSALKALEGDAQYEEKILELMEAVDTYIPTPERDSDKPFMMPVEDVFSITGRGTVATGRVERGQIKVGEEVEIIGLHDTSKTTVTGVEMFRKLLDYAEAGDNIGALLRGVAREDVQRGQVLAAPGSITPHTEFKAEVYVLSKDEGGRHTPFFSNYRPQFYFRTTDVTGVVHLPEGTEMVMPGDNVEMTVELIAPIAIEDGTRFSIREGGRTVGSGVVTEIIK

SEQ ID NO: 27737 - DNA, 1191 bp, Stigmatella aurantiaca
  CDS (1)..(1191): transl_table=11
atggccaaggagaagttcgagcggaacaaaccccacgtgaacatcgggacgatcggacacgtggaccacgggaagacgtcgctgacggccgccatcaccaaggtgctggccaagacgggcggcgccacgttcctggcctatgaccagatcgacaaggcccccgaggagcgtgagcgcggcatcaccatctccacggcgcacgtggagtaccagacgaagaaccgccactacgcgcacgtggactgtcctggccacgccgactacgtgaagaacatgatcacgggcgcggcgcagatggacggagcgattctggtggtgtccgcggccgacggcccgatgccccagacgcgtgagcacatcctgctggccaggcaggtgggcgtgccctacatcgtcgtcttcctgaacaaggtggacatgctggacgatccggagctgcgcgagctggtggagatggaggtgcgcgacctgctcaagaagtacgagttcccgggcgacagcatccccatcatccctggcagcgcgctcaaggcgctggagggagacaccagcgacatcggcgagggagcgatcctgaagctgatggcggcggtggacgagtacatcccgacgccgcagcgtgcgacggacaagccgttcctgatgccggtggaagacgtgttctccatcgcaggccgaggaacggtggcgacgggccgagtggagcgcggcaagatcaaggtgggcgaggaagtggagatcgtggggatccgtccgacgcagaagacggtcatcacgggggtggagatgttccgcaagctgctggacgagggcatggcgggagacaacatcggagcgctgctgcgaggcctgaagcgcgaggacctggagcgtgggcaggtgctggcgaactgggggagcatcaacccgcacacgaagttcaaggcgcaggtgtacgtgctgtcgaaggaagagggagggcggcacacgccgttcttcaagggataccggccgcagttctacttccggacgacggacgtgaccggaacggtgaagctgccggacaacgtggagatggtgatgccgggagacaacatcgccatcgaggtggagctcattactccggtcgccatggagaaggagctgccgttcgccatccgtgagggtggccgcacggtgggcgccggcgtcgttgccgacatcatcgcctag

SEQ ID NO: 27738 - protein, 396 aa, Stigmatella aurantiaca
MAKEKFERNKPHVNIGTIGHVDHGKTSLTAAITKVLAKTGGATFLAYDQIDKAPEERERGITISTAHVEYQTKNRHYAHVDCPGHADYVKNMITGAAQMDGAILVVSAADGPMPQTREHILLARQVGVPYIVVFLNKVDMLDDPELRELVEMEVRDLLKKYEFPGDSIPIIPGSALKALEGDTSDIGEGAILKLMAAVDEYIPTPQRATDKPFLMPVEDVFSIAGRGTVATGRVERGKIKVGEEVEIVGIRPTQKTVITGVEMFRKLLDEGMAGDNIGALLRGLKREDLERGQVLANWGSINPHTKFKAQVYVLSKEEGGRHTPFFKGYRPQFYFRTTDVTGTVKLPDNVEMVMPGDNIAIEVELITPVAMEKELPFAIREGGRTVGAGVVADIIA

SEQ ID NO: 27739 - DNA, 1260 bp, Stigeoclonium helveticum
  CDS (1)..(1260): transl_table=11
atggcaagagctaaatttgaacgtaaaaaaccgcacgtaaacattggaacaattggtcacgttgaccatggtaaaacaactctaacagctgctattacaatggcattagctgctcgtggaggtgcaacaggaagaaaatatgatgaaattgattctgctcctgaagaaaaagctagaggtattacaattaatgctgctcatgttgagtacgaaacagaaaatcgtcattatgcccatgtagattgtccaggtcatgcagattatgttaaaaatatgattacaggtgccgctcaaatggacggtgctattttagttgtttctggtgcggatggtcctatgcctcaaacaacagaacatgtattattagctaaacaagtaggtgttccagctatcgttgtctttttaaataaagcagaccaggttgatgatccagagttattagaattagtagagttagaagttcgtgatattttagacaaatacggttttgctagtgatgaagttcaaattttatctggttctgctcttttagctttagaagctttagttgaaaatccaaatatcaagccaggtgatagtgaatgggttgataaaatttacaatttaatggcgacggttgatgagcacatccctactccaaaacgtgaaatggataaaccatttttattagctgtagaagatgttttcagtattacaggtcgtggtacagtagctacaggtcgtgttgaacgtggaacactaaaagtgaatgaaacagtagaaattattggattaagagatacaaaaacaacgacagttactgcgattgaaatgttccaaaaaacattagatgaaacaattgctggtgataatgttggtattttattacgtggtgttcaaaaaaaagatattgaacgtggtatggttattgcaaaaccaggtacaattctgccacatactttatttgaaggtcaagtttatgttttaacggcagaagaaggtggtcgtaaaagtggtttttttaaaggttatcaaccacagttttatgttcgtacaacagatgtaactggaaaaattttagatttcagttatattaaacaacgtaatccatctgaactttctacaatgcattctaatcctatggtatgcccaggtgattatgtaaatatgaaaattcaattaattactccaattgctatcgaaaaaggtatgcgttttgctatccgtgaaggtgggcgtacagttggagcaggcatggtactagaaattcttgaatcttaa

SEQ ID NO: 27740 - protein, 419 aa, Stigeoclonium helveticum
MARAKFERKKPHVNIGTIGHVDHGKTTLTAAITMALAARGGATGRKYDEIDSAPEEKARGITINAAHVEYETENRHYAHVDCPGHADYVKNMITGAAQMDGAILVVSGADGPMPQTTEHVLLAKQVGVPAIVVFLNKADQVDDPELLELVELEVRDILDKYGFASDEVQILSGSALLALEALVENPNIKPGDSEWVDKIYNLMATVDEHIPTPKREMDKPFLLAVEDVFSITGRGTVATGRVERGTLKVNETVEIIGLRDTKTTTVTAIEMFQKTLDETIAGDNVGILLRGVQKKDIERGMVIAKPGTILPHTLFEGQVYVLTAEEGGRKSGFFKGYQPQFYVRTTDVTGKILDFSYIKQRNPSELSTMHSNPMVCPGDYVNMKIQLITPIAIEKGMRFAIREGGRTVGAGMVLEILES

SEQ ID NO: 27741 - DNA, 1194 bp, Streptomyces aureofaciens
  CDS (1)..(1194): transl_table=11
gtggcgaaggcgaagttcgagcggactaagccgcacgtcaacatcggcaccatcggtcacattgaccacggtaagacgaccctcacggccgccattaccaaggtgctgcacgacaagtacccggacctgaacgcggcctcggcgttcgaccagatcgacaaggctcccgaggagcgccagcgcggtatcaccatctccatcgcgcacgtcgagtaccagaccgaggcgcgtcactacgcccacgtcgactgcccgggtcacgctgactacatcaagaacatgatcaccggtgccgcccagatggacggtgccatcctcgtggtcgccgccaccgacggcccgatgccgcagaccaaggagcacgtgctcctggcccgccaggtcggcgttccgtacatcgtcgtcgccctgaacaaggccgacatggtggacgacgaggagatcctggagctcgtcgagcttgaggtccgtgagctgctctccgagtacgacttcccgggcgacgacctgccggtcgtccaggtctccgcgctcaaggcgcttgagggcgacaaggagtggggtgacaagctcctcggcctgatggacgccgtggacgaggccatcccgaccccgccgcgtgacaccgacaagccgttcctgatgcccgtcgaggacgtcttcacgatcaccggtcgtggcaccgtcgtcaccggccgcatcgagcgtggtgtcctcaaggtcaacgagaccgtcgacatcatcggcatcaagaccgagaagaccaccaccacggtcaccggcatcgagatgttccgcaagctgctcgacgagggccaggccggtgagaacgtcggtctgctcctccgtggcatcaagcgcgaggacgtcgagcgcggccaggtcatcatcaagcccggttcggtcacgccgcacaccgagttcgaggccgctgcgtacatcctgtcgaaggacgagggtggccgtcacaccccgttcttcaacaactaccgcccgcagttctacttccgtaccacggacgtgaccggcgtcgtgaccctccccgagggcaccgagatggtcatgccgggcgacaacaccgacatgacggtcgcgctgatccagccggtcgccatggaggagggcctgaagttcgccatccgtgagggtggtcgtaccgtgggcgccggccaggtcaccaagatcacgaagtaa

SEQ ID NO: 27742 - protein, 397 aa, Streptomyces aureofaciens
MAKAKFERTKPHVNIGTIGHIDHGKTTLTAAITKVLHDKYPDLNAASAFDQIDKAPEERQRGITISIAHVEYQTEARHYAHVDCPGHADYIKNMITGAAQMDGAILVVAATDGPMPQTKEHVLLARQVGVPYIVVALNKADMVDDEEILELVELEVRELLSEYDFPGDDLPVVQVSALKALEGDKEWGDKLLGLMDAVDEAIPTPPRDTDKPFLMPVEDVFTITGRGTVVTGRIERGVLKVNETVDIIGIKTEKTTTTVTGIEMFRKLLDEGQAGENVGLLLRGIKREDVERGQVIIKPGSVTPHTEFEAAAYILSKDEGGRHTPFFNNYRPQFYFRTTDVTGVVTLPEGTEMVMPGDNTDMTVALIQPVAMEEGLKFAIREGGRTVGAGQVTKITK

SEQ ID NO: 27743 - DNA, 1194 bp, Streptomyces cinnamoneus
  CDS (1)..(1194): transl_table=11
gtggcgaaggcgaagttcgagcggactaagccgcacgtcaacatcggcaccatcggtcacgtcgaccacggtaagacgactcttaccgcggcgatcaccaaggtgctgcacgacgcgatcccggacctgaaccccttcacgccgttcgacgagatcgacaaggcgccggaagagcgtcagcgcggtatcacgatctcgatcgctcacgttgagtaccagaccgagtcgcgtcactacgcccacgtcgactgcccgggtcacgcagactacatcaagaacatgatcaccggtgccgcccagatggacggcgcgatcctcgtggtcgccgcgaccgacggtccgatgccgcagaccaaggagcacgtgctcctggcccgccagtccggcgttccgtacattgtggtggccctgaacaaggccgacatggtggacgacgaggagatcatggagctcgtcgagctcgaggtccgtgagctcctctccgagtacgagttcgacggcgacaactgccccgtcgtccaggtctcggctctcaaggcgctcgagggcgacaaggagtggggcgagaagctcctcggcctcatgaaggccgtggacgagaacatcccgcagcccgagcgtgacgtcgacaagccgttcctgatgccgatcgaggacgtcttcacgatcaccggtcgtggcaccgtcgtcaccggtcgtatcgagcgcggtgtcctcaaggtcaacgagaccgtcgacatcatcggcatcaagaccgagaagaccaccaccacggtcaccggtatcgagatgttccgcaagctgctcgacgagggccaggccggtgagaacgtcggtctgctcctccgtggcatcaagcgcgaggacgtcgagcgcggccagtgcatcatcaagcccggtacggtcacgccgcacaccgagttcgaggccacggcgtacatcctgtcgaaggacgagggtggccgtcacaccccgttcttcaacaactaccgtccgcagttctacttccgtacgactgacgtgaccggtgttgtgaccctcaaggagggcacggagatggtcatgcccggcgacaacgccgagatgaccgtcaacctgatccagcctgtcgcgatggaggagggcctgcgcttcaccatccgtgagggtggccgcaccgtcggcgccggccaggtcgtcaagatcaacaagtaa

SEQ ID NO: 27744 - protein, 397 aa, Streptomyces cinnamoneus
MAKAKFERTKPHVNIGTIGHVDHGKTTLTAAITKVLHDAIPDLNPFTPFDEIDKAPEERQRGITISIAHVEYQTESRHYAHVDCPGHADYIKNMITGAAQMDGAILVVAATDGPMPQTKEHVLLARQSGVPYIVVALNKADMVDDEEIMELVELEVRELLSEYEFDGDNCPVVQVSALKALEGDKEWGEKLLGLMKAVDENIPQPERDVDKPFLMPIEDVFTITGRGTVVTGRIERGVLKVNETVDIIGIKTEKTTTTVTGIEMFRKLLDEGQAGENVGLLLRGIKREDVERGQCIIKPGTVTPHTEFEATAYILSKDEGGRHTPFFNNYRPQFYFRTTDVTGVVTLKEGTEMVMPGDNAEMTVNLIQPVAMEEGLRFTIREGGRTVGAGQVVKINK

SEQ ID NO: 27745 - DNA, 1230 bp, Synechococcus sp
  CDS (1)..(1230): transl_table=11
atggcacgcgctaagtttgaacgcaccaagcctcacgcaaacatcgggaccatcggtcacgttgaccacggtaaaacgacgctgacggcagctatcaccactgtgttggcgaaagctggcatggctaaagcccgcgcttacgctgatatcgacgcagctccggaagaaaaagctcgtggtatcacgatcaacacggctcacgttgaatacgaaaccggcaaccgtcactacgctcacgttgactgtcccggtcacgctgactacgtgaaaaacatgatcacgggtgctgcgcagatggacggcgccatcctcgtggtgtcggctgctgacggccccatgccccaaactcgcgagcacattctgctggcgaaacaggtcggcgttcccaacatcgtcgttttcttgaataaagaagacatggttgatgacgctgaactgttggaattggtggagttggaagtccgtgagctgctgagctcctacgatttccctggcgatgacatccccatcgtggctggttcggctctgcaagccttggaagccattcaaggtggcgcttcgggtcagaaaggtgacaacccttgggttgacaaaatcctgaagctgatggaagaagtcgacgcctacatccccactcctgagcgggaagtcgatcgccccttcctgatggcggtggaagacgtcttcacgattaccggtcgtggcacggtggcgactggccggatcgagcgtggcagcgtcaaggttggcgaaacgatcgaaatcgttggtttgcgtgacacccgcagcaccaccgttaccggtgtggaaatgttccagaagaccctcgacgaaggtctggctggcgacaacgtcggtctgctgctccgcggtatccaaaaaaccgatatcgagcgcggtatggtcttggccaaacccggttcgattacgcctcacaccaagtttgagtctgaggtctacgtgctcaagaaagaagaagggggtcgtcacactccgttcttcccgggctatcgtcctcagttctacgtgcggacaaccgacgtgaccggcgcgatctcggacttcaccgctgacgacggttcggcagctgaaatggtgatcccgggcgatcgcatcaagatgacggttgaactgatcaacccgatcgcaattgagcaaggcatgcgctttgcaatccgtgaaggcggccgcaccatcggtgctggtgtcgtttccaaaatcctccagtag

SEQ ID NO: 27746 - protein, 409 aa, Synechococcus sp
MARAKFERTKPHANIGTIGHVDHGKTTLTAAITTVLAKAGMAKARAYADIDAAPEEKARGITINTAHVEYETGNRHYAHVDCPGHADYVKNMITGAAQMDGAILVVSAADGPMPQTREHILLAKQVGVPNIVVFLNKEDMVDDAELLELVELEVRELLSSYDFPGDDIPIVAGSALQALEAIQGGASGQKGDNPWVDKILKLMEEVDAYIPTPEREVDRPFLMAVEDVFTITGRGTVATGRIERGSVKVGETIEIVGLRDTRSTTVTGVEMFQKTLDEGLAGDNVGLLLRGIQKTDIERGMVLAKPGSITPHTKFESEVYVLKKEEGGRHTPFFPGYRPQFYVRTTDVTGAISDFTADDGSAAEMVIPGDRIKMTVELINPIAIEQGMRFAIREGGRTIGAGVVSKILQ

SEQ ID NO: 27747 - DNA, 1200 bp, Synechocystis sp
  CDS (1)..(1200): transl_table=11
atggcacgcgcaaaatttgaacggacgaaagaccacgtaaacattggcaccattggtcacgttgaccacggtaaaaccaccctaacggcggcgatcaccatgaccttggcggaattgggtggtgccaaagcccggaaatatgaagatattgacgcggctcctgaggaaaaagcccggggcattaccatcaatactgcccacgttgagtatgaaaccgatagccgtcactatgcccacgtagactgtcctggtcacgctgactatgtgaaaaacatgatcaccggtgctgcccagatggacggtgcgattctggtggtttccgccgctgatggccccatgccccaaacccgggaacacattcttttggctaagcaagtaggggttcccaaactggtggtctttttgaataagaaagacatggtggacgacgaagaactgctggaattggtggaactggaagttcgtgaattgctcagcgactacgatttccccggtgatgacattcccatcgttgctggctctgccctcaaggcgatcgaaggagaaaaagaatacaaagatgcgattcttgaactcatgaaagccgttgacgactacatcgacacccctgagcgggaagttgataagcccttcttgatggcggtggaagacgtattctccatcactggtcgtggtaccgttgccaccggtcggattgagcgcggaaaagttaaagttggcgaagaaatttccatcgtcggcattaaagatacccgtaaagccactgttaccggtgtggaaatgttccaaaaaacccttgaagagggaatggctggggacaacgtgggtctgctcctccgggggattcaaaaagaggacatcgaacggggtatggttttggctaaacccggttccatcactccccacaccgaatttgaaggggaagtttacgtgctcaagaaagaagaaggtggccgccacactcctttctttgccaactaccgccctcagttctatgtacggaccactgacgtaaccggtaccatcaaaagctacaccgctgacgacggcagtgctgtggaaatggttatgcctggggatcgtatcaaaatgaccgttgagctcattaacccgatcgccattgaacaggggatgcgttttgctatccgcgaaggtggtcgtaccatcggcgccggtgttgtttctaagattttgaagtag

SEQ ID NO: 27748 - protein, 399 aa, Synechocystis sp
MARAKFERTKDHVNIGTIGHVDHGKTTLTAAITMTLAELGGAKARKYEDIDAAPEEKARGITINTAHVEYETDSRHYAHVDCPGHADYVKNMITGAAQMDGAILVVSAADGPMPQTREHILLAKQVGVPKLVVFLNKKDMVDDEELLELVELEVRELLSDYDFPGDDIPIVAGSALKAIEGEKEYKDAILELMKAVDDYIDTPEREVDKPFLMAVEDVFSITGRGTVATGRIERGKVKVGEEISIVGIKDTRKATVTGVEMFQKTLEEGMAGDNVGLLLRGIQKEDIERGMVLAKPGSITPHTEFEGEVYVLKKEEGGRHTPFFANYRPQFYVRTTDVTGTIKSYTADDGSAVEMVMPGDRIKMTVELINPIAIEQGMRFAIREGGRTIGAGVVSKILK

SEQ ID NO: 27749 - DNA, 1188 bp, Taxeobacter ocellatus
  CDS (1)..(1188): transl_table=11
atggctaaagaaacttttgaccggtccaagccgcacgtaaacatcggcacgatcggtcacgtggaccacggcaaaacgactctgaccgctgctatcaccacggtgctggctaacaaaggtctggccgctaagcgtgacttctcctcgatcgacaacgctccggaggaaaaagagcgcggtatcaccatcaacaccgctcacgttgagtactcgaccgctaatcgtcactacgctcacgttgactgccctggtcacgctgactacgtgaagaacatggtaaccggtgctgctcaaatggacggtgctatcctcgtggtagctgctaccgacgggccgatgccccagacccgtgagcacatcctgctggctcgccaggtaggtgtaccgcagctggttgtgttcatgaacaaagtggacatggtggacgaccccgagctgctcgaactcgttgagatggaaatccgcgagctgctgtcgttctacgacttcgacggtgacaacatcccggtagtgcaaggttcggctctcggcggcctgaacggcgacgccaagtgggtaggcaccatcgagcaactgatggactcggttgacaactggattccgattcccccgcgtctgacggaccagccgttcctgatgccggtagaagacgtgttctcgattaccggccgtggcaccgtagctacgggtcgtatcgagcgcggcgtaatcaactcgggtgagccggttgaaatcctcggtatgggtgctgaaaacctcaagtcgaccgtaacgggcgttgagatgttccgcaagatccttgaccgtggcgaagctggtgacaacgtaggtctgctgctccgtggtattgaaaaagaagccatccgtcgcggcatggttatctgcaaacctggctcggtaaccccccacaaaaagttcaaggctgaagtttacgttctgtcgaaggaagaaggtggccgtcacacgccgttcttcaacaactaccgtccgcagttctacttccgcaccaccgacgttaccggtattatctcgctggctgaaggcgtagaaatggtaatgcccggcgacaacgtgaccatctcggttgagctgatcaacgctgtagctatggagaaaggcctgcgcttcgctatccgcgaaggtggccgcacggtaggtgccggtcaggtaaccgaaatcctcgactaa

SEQ ID NO: 27750 - protein, 395 aa, Taxeobacter ocellatus
MAKETFDRSKPHVNIGTIGHVDHGKTTLTAAITTVLANKGLAAKRDFSSIDNAPEEKERGITINTAHVEYSTANRHYAHVDCPGHADYVKNMVTGAAQMDGAILVVAATDGPMPQTREHILLARQVGVPQLVVFMNKVDMVDDPELLELVEMEIRELLSFYDFDGDNIPVVQGSALGGLNGDAKWVGTIEQLMDSVDNWIPIPPRLTDQPFLMPVEDVFSITGRGTVATGRIERGVINSGEPVEILGMGAENLKSTVTGVEMFRKILDRGEAGDNVGLLLRGIEKEAIRRGMVICKPGSVTPHKKFKAEVYVLSKEEGGRHTPFFNNYRPQFYFRTTDVTGIISLAEGVEMVMPGDNVTISVELINAVAMEKGLRFAIREGGRTVGAGQVTEILD

SEQ ID NO: 27751 - DNA, 1191 bp, Thiobacillus cuprinus
  CDS (1)..(1191): transl_table=11
atggcgaagagcaagtttgagcggaccaagccacacgtgaacgtggggacgatcggtcacgtggaccacggcaagaccaccctgacggcggcgatcacgaccgtgctgtcgagcaagttcggcggcgaggccaaggcgtacgaccagatcgacgcggcgccggaagaaaaggcgcgcggcatcaccatcaacaccgcgcacgtcgagtacgagacggccaaccgccactacgcccacgtcgactgccccggccacgccgactacgtcaagaacatgatcaccggtgcggcccagatggacggcgccatcctggtcgtgtccgccgccgacggccccatgccccaaacccgcgagcacatcctgctggcgcgtcaggtgggcgtgccctacatcatcgtgttcctcaacaagtgcgacatggtcgacgacgccgagctgctcgaactcgtcgagatggaagtgcgcgagctgctgtccaagtacgacttccccggtgacgacacccccatcatcaagggctcggccaagctggccctcgaaggcgacaagggcgaactgggcgaaggcgccattctcaagctggccgaggccctggacacctacatccccacgcccgagcgggccgtcgacggcgcgttcctcatgcccgtggaagacgtgttctccatctccgggcgcggcacggtggtcaccgggcgtgtggagcgcggcatcatcaaggtcggcgaggaaatcgagattgtcggcctcaagcccaccctcaagaccacctgcaccggcgtggaaatgttcaggaagctgctcgaccagggccaggccggcgacaacgtcggcatcttgctgcgcggcaccaagcgcgaggaagtcgagcgcggccaggtgctgtgcaaacccggctcgatcaagccccacacccacttcaccgccgaggtgtacgtgctgagcaaggacgagggcggccgccacacccccttcttcaacaactaccgcccgcagttctacttccgcaccaccgacgtcaccggcgccatcgaactgcccaaggacaaggaaatggtcatgcccggcgataatgtgagcatcaccgtcaagctcatcgcccccatcgccatggaagaaggcctgcgcttcgccatccgcgaaggcggccgcaccgtcggcgccggcgtcgtcgcaaaaatcatcgagtaa

SEQ ID NO: 27752 - protein, 396 aa, Thiobacillus cuprinus
MAKSKFERTKPHVNVGTIGHVDHGKTTLTAAITTVLSSKFGGEAKAYDQIDAAPEEKARGITINTAHVEYETANRHYAHVDCPGHADYVKNMITGAAQMDGAILVVSAADGPMPQTREHILLARQVGVPYIIVFLNKCDMVDDAELLELVEMEVRELLSKYDFPGDDTPIIKGSAKLALEGDKGELGEGAILKLAEALDTYIPTPERAVDGAFLMPVEDVFSISGRGTVVTGRVERGIIKVGEEIEIVGLKPTLKTTCTGVEMFRKLLDQGQAGDNVGILLRGTKREEVERGQVLCKPGSIKPHTHFTAEVYVLSKDEGGRHTPFFNNYRPQFYFRTTDVTGAIELPKDKEMVMPGDNVSITVKLIAPIAMEEGLRFAIREGGRTVGAGVVAKIIE

SEQ ID NO: 27753 - DNA, 1185 bp, Wigglesworthia glossinidia brevipalpis
  CDS (1)..(1185): transl_table=11
atgtctaaagaaaaatttcaaagaattaaaccacatataaatgtgggtacaattggccatgtagatcatggaaagaccacattaactgcagccataactaatgtattagcaaaaaaatatggaggaattccaaaagcttttgatcaaattgataatgctccagaagaaaaagctagaggtattacaataaatacatctcatgtagaatatgatactaaaataagacattacgctcacgtagattgtccaggccatgctgattatgtaaaaaatatgattactggagccgctcaaatggatggagctatacttgtagtagcagctacagatggtccgatgcctcaaactcgtgaacatatacttcttggaaggcaagttggagttccatacatagtagtgtttatgaataaatgcgatatggtagatgacgaagaactattagaattagtagaaattgaaataagagaactattatctcagtatgattttccaggagatgaaatcccaataataagaggatcagctctaaaagctttagaaaaagatcctatttggattcaaaaaataatagatttatctgaacatttagataattatattccagaaccaaaaagaataattgatcaaccatttcttttaccaatagaagatgtattttcaatatctggtagaggaacagtagtaactggtagaatagaaagaggaacagtaaaagtaggagaagaaatagaaattattggcataaaaaatacagtaaaaactacatgtacaggtgtagaaatgtttagaaaactattagatgaaggaagagctggagaaaacgttggaatattattaagaggaacaaaacgagaagatgtagaaagagggcaagttttagctaaaccaggatcaattaaacctcatactcaatttgaatcagaagtatatgtattaaaaaaagaagaaggaggtcgtcacactccattttttaatggatataaaccacaattttattttcgtacaacagatgttacaggaagtgttgaattacaaaaaggaacagaaatggttatgccaggagataatgtgaaaatgttagtaaaattaatttctcctatagccatggatgacggtttaagatttgcaataagagaaggtggaaaaacagtaggagcaggaattgtatctaaaataattgtttga

SEQ ID NO: 27754 - protein, 394 aa, Wigglesworthia glossinidia brevipalpis
MSKEKFQRIKPHINVGTIGHVDHGKTTLTAAITNVLAKKYGGIPKAFDQIDNAPEEKARGITINTSHVEYDTKIRHYAHVDCPGHADYVKNMITGAAQMDGAILVVAATDGPMPQTREHILLGRQVGVPYIVVFMNKCDMVDDEELLELVEIEIRELLSQYDFPGDEIPIIRGSALKALEKDPIWIQKIIDLSEHLDNYIPEPKRIIDQPFLLPIEDVFSISGRGTVVTGRIERGTVKVGEEIEIIGIKNTVKTTCTGVEMFRKLLDEGRAGENVGILLRGTKREDVERGQVLAKPGSIKPHTQFESEVYVLKKEEGGRHTPFFNGYKPQFYFRTTDVTGSVELQKGTEMVMPGDNVKMLVKLISPIAMDDGLRFAIREGGKTVGAGIVSKIIV

SEQ ID NO: 27755 - DNA, 1200 bp, Wolinella succinogenes
  CDS (1)..(1200): transl_table=11
atggctaaggaaaagtttgtaaaaaacaaaccccacgttaatatcggtaccatcggtcacgttgaccacggtaaaaccactcttagtgccgctatttctgcggtacttgcaaccaaaggtctttgcgagcttaaagattatgatgcgatcgacaatgctcctgaagagagagagcgtggtatcaccatcgctacttcacacatcgagtatgaaacagaaaatcgacactacgctcacgttgactgccctggacacgccgactatgttaaaaacatgattacaggtgctgctcaaatggatggcgcgattcttgttgtttctgcggcggatggccccatgccccaaactagggagcacattcttctttctcgacaagtaggcgttccttacatcgtggttttcttgaacaaagaagatatggttgatgacgctgagcttcttgagcttgttgaaatggaagttagagaacttcttagcaactacgacttccctggagatgacactcctatcgttgcaggttccgctcttaaagctcttgaagaggctaagacaggaaatgttggcgagtggggcgagaaagtattgaagcttatggctgaggttgaccgatatattcctacgcctgagcgagatgtggataagcctttccttatgcctgttgaagacgtattctccatcgcgggtcgtggaaccgttgtgacaggaagaattgaaagaggcgtggttaaagtcggtgacgaagtagaaatcgttggtatccgaaacacacaaaaaacaaccgtaactggcgttgagatgttccgaaaagagctcgacaagggtgaggcgggtgacaacgttggtgttcttttgagaggcaccaagaaagaagatgttgagagaggtatggttctttgtaaaataggttctatcactcctcacactaactttgaaggtgaagtttacgttctttccaaagaggaaggcggacgacacactccattcttcaatggataccgacctcagttctatgttagaactacagacgttaccggttctatctctcttcctgagggcgtagagatggttatgcctggtgacaacgttaagatcaatgttgagcttatcgctcctgtagccctcgaagagggaacacgattcgcgatccgtgaaggtggtcgaaccgttggtgcgggtgtcgttaccaagatcactaaataa

SEQ ID NO: 27756 - protein, 399 aa, Wolinella succinogenes
MAKEKFVKNKPHVNIGTIGHVDHGKTTLSAAISAVLATKGLCELKDYDAIDNAPEERERGITIATSHIEYETENRHYAHVDCPGHADYVKNMITGAAQMDGAILVVSAADGPMPQTREHILLSRQVGVPYIVVFLNKEDMVDDAELLELVEMEVRELLSNYDFPGDDTPIVAGSALKALEEAKTGNVGEWGEKVLKLMAEVDRYIPTPERDVDKPFLMPVEDVFSIAGRGTVVTGRIERGVVKVGDEVEIVGIRNTQKTTVTGVEMFRKELDKGEAGDNVGVLLRGTKKEDVERGMVLCKIGSITPHTNFEGEVYVLSKEEGGRHTPFFNGYRPQFYVRTTDVTGSISLPEGVEMVMPGDNVKINVELIAPVALEEGTRFAIREGGRTVGAGVVTKITK

SEQ ID NO: 27757 - DNA, 1191 bp, Xanthomonas axonopodis pv
  CDS (1)..(1191): transl_table=11
atggcaaaagctaaattcgagcgcaccaagccgcacgtgaacgtcggcaccatcggtcacgttgaccatggcaagaccacgttgaccgctgcgctgaccaagatcggtgccgagcgtttcggtggtgagttcaaggcgtacgacgcgatcgacgcggcgccggaagagaaggcgcgcggcatcacgatttcgaccgcacacgtcgaatacgaatccccgacccgccactacgcgcacgtcgactgccccggccacgccgactacgtcaagaacatgatcaccggtgcggcgcagatggacggcgcgatcctggtgtgctcggccgccgacggcccgatgccgcagacccgtgagcacatcctgctctcgcgtcaggtcggtgtgccgcacatcgtggtgttcctgaacaaggccgacatggtcgacgacgccgagctgctcgagctggtcgaaatggaggtgcgcgagctgctgagcaagtacgacttcccgggcgacgacaccccgatcatccacggttcggcgcgtctggcgctggacggcgatcagagcgacatcggtgtgccggcgatcctgaagctggtcgaagcgctggattcgttcattcccgagccgacccgcgacgtcgaccgtccgttcctgatgccggtcgaagacgtgttctcgatctccggccgcggcaccgtggtgaccggtcgtatcgagcgcggcatcatcaaggtgggcgacgaaatcgaaatcgtcggtatccgcgatacgcagaagaccacggtcaccggcgtggaaatgttccgcaagctgctggaccagggccaggcaggcgacaacgccggtctgctgctgcgcggcaccaagcgtgacgacgtcgagcgtgggcaggtgctgtgcaagccgggttcgatcaagccgcacaccgagttcgaagccgaagtctacgtgctgtccaaggatgagggtggccgtcataccccgttcttcaagggctaccgtccgcagttctacttccgcaccaccgacatcactggcgcttgccagttgccggaaggcgtggaaatggtgatgccgggcgacaacgtgaagatggtcgtgaccctgatcaacccggtcgcgatggacgaaggtctgcgcttcgccatccgtgaaggcggtcgtaccgtcggcgccggcgtggttgccaagatcatcaagtaa

SEQ ID NO: 27758 - protein, 396 aa, Xanthomonas axonopodis pv
MAKAKFERTKPHVNVGTIGHVDHGKTTLTAALTKIGAERFGGEFKAYDAIDAAPEEKARGITISTAHVEYESPTRHYAHVDCPGHADYVKNMITGAAQMDGAILVCSAADGPMPQTREHILLSRQVGVPHIVVFLNKADMVDDAELLELVEMEVRELLSKYDFPGDDTPIIHGSARLALDGDQSDIGVPAILKLVEALDSFIPEPTRDVDRPFLMPVEDVFSISGRGTVVTGRIERGIIKVGDEIEIVGIRDTQKTTVTGVEMFRKLLDQGQAGDNAGLLLRGTKRDDVERGQVLCKPGSIKPHTEFEAEVYVLSKDEGGRHTPFFKGYRPQFYFRTTDITGACQLPEGVEMVMPGDNVKMVVTLINPVAMDEGLRFAIREGGRTVGAGVVAKIIK

SEQ ID NO: 27759 - DNA, 1314 bp, Saccharomyces cerevisiae
  CDS (1)..(1314)
atgtcagctttattaccaagattactcacaagaacagcttttaaagcttctgggaaacttctgaggctctcttcagtaatttctaggaccttttctcaaactactacttcctatgcagctgcttttgatcgttccaaaccgcatgtaaatataggtacgatcggccatgttgatcatgggaagacaactttaaccgcagccattacgaaaacgttagccgcaaaaggtggtgccaacttcttggactatgctgccatcgataaggctccggaagaaagagctcgtggtattacaatttctactgcacacgtggaatacgaaacggccaagagacattattctcacgtcgactgtccaggccacgctgattacatcaagaatatgattaccggtgctgctcaaatggatggtgctatcattgttgtagctgctaccgatggacaaatgccccaaactagagaacatttacttttggccagacaagttggtgtccaacatattgtcgtttttgttaacaaggttgataccattgatgatccagaaatgttagagttagtcgaaatggaaatgagagaacttttaaacgaatatgggtttgacggtgataatgctccaattatcatgggttctgccctttgcgctttggaaggtcgccaacctgaaattggggagcaggccatcatgaaacttttggatgcagtggatgagtatattcctacacctgaaagagatttgaacaagcctttcttgatgcccgttgaagatatcttctctatctccggtagaggtactgtggtcactggtcgtgtggaaaggggtaatttaaagaaaggtgaggaattggaaattgttggtcacaactccaccccattgaaaacaacagttactggtattgaaatgtttagaaaggaattggactctgctatggcaggtgacaatgccggtgttttacttagaggtatcaggagagatcaattgaagagaggtatggtcttagctaagccaggtaccgttaaagcccatacaaagattctagcctctttgtacattttatccaaagaggaaggtggtagacattctgggtttggtgaaaactacagaccacaaatgtttataagaacagctgatgttacagttgtgatgagatttcctaaggaggttgaagatcattctatgcaagttatgccaggtgacaatgttgaaatggaatgtgatttgatccatcctaccccattagaagttggtcaacgtttcaatatcagagagggtggaagaactgttggtaccggtctaatcacacgtattattgaatag

SEQ ID NO: 27760 - protein, 437 aa, Saccharomyces cerevisiae [sequence omitted]

SEQ ID NO: 27761 - DNA, 1989 bp, Schizosaccharomyces pombe
  CDS (1)..(1989)
atggctagtaatcagccaaataacggtgaacaggatgagcaactcgccaagcagacttctaaactgtcgatgtctgcaaaggcacctacgtttacgcctaaagctgctcccttcattccttctttccaacgccccggatttgtacctgtgaacaatattgctggtggttatccttatgcccaatatacaggccaaggacaaaacagcaactcgccacatcctacgaagagttatcagcaatactaccaaaagccaacaggaaacactgttgatgaagataaaagccgtgtccctgatttttctaaaaagaagagttttgtgcctcctaaaccagcaattcccaaaggaaaggttttgtccctgggtggaaacacctctgctcctaagtctacaaagcccattagcatcagccttggtggaacaaaagctcctacaactaccaaaccagcagcacctgctgcacaaagcaaaacagagacccctgcacccaaggttacctctgagtcaacaaagaaggagaccgctgctcctcctccccaggaaactcctacaaaatctgctgatgctgaactagcaaaaacaccctctgctccagcagcggctcttaagaaagctgctgaggcagctgaacccgccactgtcactgaggatgccaccgatttacaaaatgaggttgatcaagagcttttgaaggatatgtatggaaaggaacatgtcaatattgtttttataggtcatgttgatgcaggaaagtctaccctgggtggtaatattcttttcttgactggtatggttgacaagcgtactatggagaaaatagagagagaagctaaagaagctggtaaagaaagttggtatctttcttgggctttggacagcacttctgaagaacgtgaaaaaggtaaaaccgttgaagttggtcgtgcttactttgaaaccgaacaccgtcgctttagcttgttggatgctccgggtcataaaggttacgttacaaacatgattaatggtgcttctcaagctgatattggtgttttagtcatttcagcgcgtcgtggtgagtttgaagctggttttgagcgcggtggtcaaactcgtgaacatgccgtattggctcgtacacaaggcatcaatcatctagttgtcgttattaataaaatggacgaacctagcgttcagtggtcggaggagcgttataaggaatgtgtcgataagctcagcatgtttttgcgtcgtgtcgctggatacaactcaaagactgatgttaaatatatgcccgtttctgcttacactggtcaaaacgttaaggatcgtgttgacagttcggtttgcccgtggtatcaaggtccatctttgctagaatacttggattctatgactcatttggaacgcaaagtgaatgctccattcatcatgcctattgcctccaagtataaagatttgggtaccatcttagaaggaaagattgaggctggttcgattaagaaaaattcaaacgtattggttatgccaattaatcaaacccttgaagttacagccatatatgatgaagctgatgaagaaatctcttcttctatttgcggtgaccaagttcgtctccgtgtccgtggtgacgattcggatgtccaaactggttatgttttaacatccactaaaaacccagttcatgctactactcgtttcattgcacaaattgcgatccttgagttgccttcaattttgacaactggttattcttgtgtaatgcacattcataccgctgtcgaggaagtttcatttgccaagttgctccataaacttgacaaaacaaaccgcaaaagcaagaaaccccccatgtttgctaccaagggtatgaaaattattgcagagttggaaacacaaactccggtttgtatggaaaggtttgaggactatcagtatatgggccgtttcactttgcgtgatcagggtactacggttgcagttggcaaagtcgtaaaaattttggattag

SEQ ID NO: 27762 - protein, 662 aa, Schizosaccharomyces pombe
MASNQPNNGEQDEQLAKQTSKLSMSAKAPTFTPKAAPFIPSFQRPGFVPVNNIAGGYPYAQYTGQGQNSNSPHPTKSYQQYYQKPTGNTVDEDKSRVPDFSKKKSFVPPKPAIPKGKVLSLGGNTSAPKSTKPISISLGGTKAPTTTKPAAPAAQSKTETPAPKVTSESTKKETAAPPPQETPTKSADAELAKTPSAPAAALKKAAEAAEPATVTEDATDLQNEVDQELLKDMYGKEHVNIVFIGHVDAGKSTLGGNILFLTGMVDKRTMEKIEREAKEAGKESWYLSWALDSTSEEREKGKTVEVGRAYFETEHRRFSLLDAPGHKGYVTNMINGASQADIGVLVISARRGEFEAGFERGGQTREHAVLARTQGINHLVVVINKMDEPSVQWSEERYKECVDKLSMFLRRVAGYNSKTDVKYMPVSAYTGQNVKDRVDSSVCPWYQGPSLLEYLDSMTHLERKVNAPFIMPIASKYKDLGTILEGKIEAGSIKKNSNVLVMPINQTLEVTAIYDEADEEISSSICGDQVRLRVRGDDSDVQTGYVLTSTKNPVHATTRFIAQIAILELPSILTTGYSCVMHIHTAVEEVSFAKLLHKLDKTNRKSKKPPMFATKGMKIIAELETQTPVCMERFEDYQYMGRFTLRDQGTTVAVGKVVKILD

SEQ ID NO: 27763 - DNA, 1968 bp, Oryza sativa
  CDS (1)..(1968)
atgccgcgcaaggttgtctctgggcctgactacgatgatgagtacaatgatgactatgatgagtatgatgaagactatgatgattacggtgggactgggcacagtgacgacattcagcaccctacgaaggagaaagagtcatcgaagaagtcctcaagtatggtgcctgtgctttggagatgctccatgtgcatgttcgataatcatgaaagcatggtgtattgtgagatgtgtggggtttttcgagaatcctttatgaaatctgccaaggatggttcaataaaagtccatgggataccaagtgattttgggacaccttcgatgccgaaatctgattctacaaagatgccagtgaatactcgtactacagactttggtggtgaccctgagataaagaatgctagcatatctcatgagaaagttggttccacacagtacgcatctgttggtagctcatcaggcgctgggaaaaagctgaaggaggaccagagtagtagggctaccagttctgcacagaatgaggatgtggcccagaaactttcttctgacatacagaagctaggtttagaaaagaatgaagtagatactgcaaaaccttatttacctgaagaatataagcctgagaagtggatgtttgctaatgaggaatcaggagtgctgagccaactaaaccttgcaatagtaggtcatgttgattctggcaagtcaacactctctgggagactgctacatctgttaggaaggatatcgaaaaaagatatgcacaagaatgagaaggaggctaaagaaaaaggaaaaggatcatttgcttatgcgtgggctatggatgaaagcagtgaagaaagagaaagaggtgtgacaatgactgtggctgtggcttatttggagaccaataagtaccgtgtagttttgcttgactctccaggccataaagattttgtaccaaatatgatatctggcgcaacgcaagctgatgcagctattcttgttgttgatgcttgcactggttcatttgaagctggcatggacggtgaaggagggaaaagtgttggccagacaaaagaacatgctcagcttattagaagcttcggcgttgaacagcttattgttgcggtcaacaagatggatgccatcgggtactccaaagaaagattcgagttcatcaaggttcaacttggtagttttctgcgggcatgcaacttcaaagattcatctgttacctggattcctcttagtgctgttgaaaatcagaatttgatcaaaattccttctgatgtccgtttaacttcctggtatcaaggattttgtctcttggatgctatagattccttgcagcttccatctcgggatgtttcaaagcccctcattcttcctatctgtgatgttatcaagtctcagtcaacagggcagttggcagcatttggaaaattagagactggagctattcgaattggttcaaaggttttaatttcaccttgtggggaagtggcgacagtgaaatccatcgagcgggattcaaattcatgtgacatagcaagagctggtgataatgtagcggttagtttacagggcatcgatgggagtaagctaatagcaggtgggattctttgcaaccctggtttcccagtgcctgtctctaacttcttggagctaagggttctagtgttggacgtcaccattcctatccttattggctatcaggtcgagtttcacatacatcatgtgaaggaggctgcgagggttacgaaaatcgtggcattgcttgacaaggctggcaaaccaagcaaaactgcacctcgatttcttaagtcaaagcagaatgcagttgtgcaggttaccttagacgctccggtctgtgttgaagaattctccaaatgccgagctcttggcagggcattcttaaggtctggtggaagcacaatcgctgttggagtcgtaacgcgggtactcgggcaagatcagaactga

SEQ ID NO: 27764 - protein, 655 aa, Oryza sativa
MPRKVVSGPDYDDEYNDDYDEYDEDYDDYGGTGHSDDIQHPTKEKESSKKSSSMVPVLWRCSMCMFDNHESMVYCEMCGVFRESFMKSAKDGSIKVHGIPSDFGTPSMPKSDSTKMPVNTRTTDFGGDPEIKNASISHEKVGSTQYASVGSSSGAGKKLKEDQSSRATSSAQNEDVAQKLSSDIQKLGLEKNEVDTAKPYLPEEYKPEKWMFANEESGVLSQLNLAIVGHVDSGKSTLSGRLLHLLGRISKKDMHKNEKEAKEKGKGSFAYAWAMDESSEERERGVTMTVAVAYLETNKYRVVLLDSPGHKDFVPNMISGATQADAAILVVDACTGSFEAGMDGEGGKSVGQTKEHAQLIRSFGVEQLIVAVNKMDAIGYSKERFEFIKVQLGSFLRACNFKDSSVTWIPLSAVENQNLIKIPSDVRLTSWYQGFCLLDAIDSLQLPSRDVSKPLILPICDVIKSQSTGQLAAFGKLETGAIRIGSKVLISPCGEVATVKSIERDSNSCDIARAGDNVAVSLQGIDGSKLIAGGILCNPGFPVPVSNFLELRVLVLDVTIPILIGYQVEFHIHHVKEAARVTKIVALLDKAGKPSKTAPRFLKSKQNAVVQVTLDAPVCVEEFSKCRALGRAFLRSGGSTIAVGVVTRVLGQDQN

SEQ ID NO: 27765 - DNA, 1404 bp, Oryza sativa
  CDS (1)..(1404)
atggcctccctcgcctccgcctccgcatccacctccctggtcttctccacctcctcctccaagccgcgcctcggctcctccgtcggattctcctcgcccgcgcggttccggcgcacggcggcggcggcggcgtccaggggcacggggcggcgcgcggggctgctggtagtgcgcgcggcgagggggaagttcgagcggaccaagccgcacgtcaacatcggcaccatcggccacgtcgaccacgggaagactacgctgacggcggcgctcaccatggtgctcgcctccgtgggcgggagcgcccccaagaagtacgacgagatcgacgcggcgcccgaggagcgcgcccgcggcatcaccatcaacaccgccaccgtcgagtacgagaccgagacccgccactacgcccacgtcgactgccccggccacgccgactacgtcaagaacatgattaccggcgccgcgcagatggacggcgccatcctcgtcgtctccggcgccgacgggcccatgccgcagaccaaggagcacatcctgctcgccaagcaggtcggtgtccccaagattgttgtcttcctcaacaagaaggaccaggtcgacgacgaggagctgctccagctcgtcgagctcgaggtccgcgaattgctctcctcctacgagtacgatggcgacgaagtgcccatcgtcgctggctccgcgctcaaggcgctcgagaacctcatggccaaccctgccattaagcgcggcgatgatgagtgggtggacgggatcttctcgttgattgattccgtggataactacatccctgtcccacagcgccagaccgacctcccgttcttgcttgctgttgaggatgtgttctccatcaccggtcgtggtaccgttgccactggccgtattgagcgtggcaccgtcaaggttggggacacggtcgatatcgtcggtatccgggagactcgcaactgcacggtgactggtgttgagatgttccagaagaccatggatgatgcgatggctggggacaatgtcggcctgcttctccgaggtatgcagaaggatgatatcgagagaggcatggtgcttgcgaagcctgcttccatcacgccacacaccaagtttgatgcggttgtgtatgtcctgaagaaggacgagggtggacggcactcaccgtttttccctggttaccgccctcagttctacatgcggactaccgatgtgacggggaatgtcacaaagattatgaacgacaaggacgaggaggcgaagatgtgcatgcctggtgaccgtgtcaagatggttgtggagctcatccagcccgtcgcttgtgagcagggaatgaggtttgccatccgtgagggtggaaagaccgtcggtgccggcgtcatcaatacgatcttgaagtaa

SEQ ID NO: 27766 - protein, 467 aa, Oryza sativa
MASLASASASTSLVFSTSSSKPRLGSSVGFSSPARFRRTAAAAASRGTGRRAGLLVVRAARGKFERTKPHVNIGTIGHVDHGKTTLTAALTMVLASVGGSAPKKYDEIDAAPEERARGITINTATVEYETETRHYAHVDCPGHADYVKNMITGAAQMDGAILVVSGADGPMPQTKEHILLAKQVGVPKIVVFLNKKDQVDDEELLQLVELEVRELLSSYEYDGDEVPIVAGSALKALENLMANPAIKRGDDEWVDGIFSLIDSVDNYIPVPQRQTDLPFLLAVEDVFSITGRGTVATGRIERGTVKVGDTVDIVGIRETRNCTVTGVEMFQKTMDDAMAGDNVGLLLRGMQKDDIERGMVLAKPASITPHTKFDAVVYVLKKDEGGRHSPFFPGYRPQFYMRTTDVTGNVTKIMNDKDEEAKMCMPGDRVKMVVELIQPVACEQGMRFAIREGGKTVGAGVINTILK

SEQ ID NO: 27767 - DNA, 1344 bp, Oryza sativa
  CDS (1)..(1344)
atgggtaaggagaagacgcacatcaacatcgtggtcattggccacgtcgactccggcaagtcgaccaccacgggccatctgatttacaagcttggaggtatcgacaagcgtgtgatcgagaggttcgagaaggaagccgctgagatgaacaagaggtccttcaagtacgcgtgggtgcttgacaagctcaaggccgagcgtgagagaggtatcaccatcgatattgccctgtggaagttcgagaccaccaagtactactgcacggtcatcgatgcccctggtcaccgtgacttcatcaagaacatgatcacgggtacctcccaggctgactgtgccgtgctcatcattgactccaccactggtggttttgaggctggtatctccaaggatggccagacccgtgagcacgctcttcttgctttcactcttggagtgaagcagatgatctgctgctgcaacaagatggatgccaccactcccaagtactccaaggcccgttatgatgaaatcgtgaaggaagtctcatcctacctgaagaaggtcggctacaatcctgacaagattcccttcgttcccatctctgggtttgagggtgacaacatgattgagaggtccaccaaccttgactggtacaagggccccaccttgcttgaggctcttgaccagatcaacgagcccaagaggccatcagacaagcccctgcgtcttccccttcaggacgtgtacaagatcggtggtattggcaccgtgcctgtgggtcgtgttgagactggagtcctcaagcctggtatggtggtgacctttggtcccagtggcctgaccactgaggtcaagtcggttgagatgcaccacgaggctctccaggaggctcttcctggtgacaacgtcgggttcaacgtgaagaacgttgcggtgaaggatctgaagcgtgggtacgtggcctccaactccaaggatgaccctgccaaggaggctgccagcttcacctcccaggtgatcatcatgaaccaccctgggcagatcggtaacggctatgctccagtgctggactgccacacctcccacattgctgtcaagtttgctgagctggtgaccaagattgacagacgatctggcaaggagctggagaaggagcccaagttcttgaagaacggtgatgctggtatggtcaagatgattcctaccaagcccatggttgtggagaccttctctgagtaccctcctcttggtcgttttgcggtgcgtgacatgaggcaaacggtggctgttggcgtcatcaagaacgtggagaagaaggacccaaccggtgccaaggtgaccaaggctgccgccaagaagaagtga

SEQ ID NO: 27768 - protein, 447 aa, Oryza sativa
MGKEKTHINIVVIGHVDSGKSTTTGHLIYKLGGIDKRVIERFEKEAAEMNKRSFKYAWVLDKLKAERERGITIDIALWKFETTKYYCTVIDAPGHRDFIKNMITGTSQADCAVLIIDSTTGGFEAGISKDGQTREHALLAFTLGVKQMICCCNKMDATTPKYSKARYDEIVKEVSSYLKKVGYNPDKIPFVPISGFEGDNMIERSTNLDWYKGPTLLEALDQINEPKRPSDKPLRLPLQDVYKIGGIGTVPVGRVETGVLKPGMVVTFGPSGLTTEVKSVEMHHEALQEALPGDNVGFNVKNVAVKDLKRGYVASNSKDDPAKEAASFTSQVIIMNHPGQIGNGYAPVLDCHTSHIAVKFAELVTKIDRRSGKELEKEPKFLKNGDAGMVKMIPTKPMVVETFSEYPPLGRFAVRDMRQTVAVGVIKNVEKKDPTGAKVTKAAAKKK

SEQ ID NO: 27769 - DNA, 1362 bp, Oryza sativa
  CDS (1)..(1362)
atggccgcagccgcagtgctccggagccatggcgcccgccgcatcctctcctaccccaccctccgcgccgccgtgatctcgggccccacggcgctaccggatgcgtcggcggctgcggcggcggcgccccagcagccaccgcctctggctggaaccctgtgggcgaggtccatggccaccttcacccgcacgaagcctcatgtgaatgttggcaccattgggcacgtcgatcatggcaaaaccacactcactgctgcgattaccaaggtgttagctgaggcagggaaggctaaagctgttgcttttgacgagatcgacaaggccccggaggagaaagcaagaggaatcaccattgcaacggctcatgtggagtacgagactgctaaaaggcattatgctcatgtggactgcccagggcatgctgattatgtcaagaatatgatcactggagctgctcaaatggatggtggtattcttgtcgtatcagctcctgatggccccatgccacaaacgaaagagcatattcttctggcccgacaggttggtgtgccatcacttgtatgtttcttaaacaaagttgatgctgttgatgaccccgagctactagagcttgtagagatggagcttcgtgagctcctcagtttctacaagttccctggtgatgagattccaatcatccgtggatccgccttgtcagccttacaggggactaatgatgagattggaaagaatgccattttgaaactaatggatgcagttgacgagtatatccctgatcctgtgaggcagcttgataagtctttcttgatgccgatagaagatgttttctctatccagggccgtggaactgttgtgacagggcgtgttgagcaggggacaatcaaaactggtgaagatgttgagatcctaggtttgactccaagtggtcccttgaagactacagttactggtgttgagatgttcaaaaagatactggatcatggagaggctggtgacaatgttggtcttcttcttcgtggtcttaagcgtggtgatgtacagcgtggccaggtggtgtgcaaacctggtaccgttaagacgtaccaaaagtttgaggcggaaatttacgtccttacaaaggatgaaggtggtcgccacacagccttcttgtcaaattacagtccacagttctactttaggactgccgatgtcactggaaaagttgtgttacctgatggcgtggaaatggttatgcctggtgataatgtaactgcaggatttgagttgatatcacctgttccccttgagccaggccagagatttgcgctgagggaaggagggaggacagttggtgccggagttgtttccaaagtttacagctga

SEQ ID NO: 27770 - protein, 453 aa, Oryza sativa
MAAAAVLRSHGARRILSYPTLRAAVISGPTALPDASAAAAAAPQQPPPLAGTLWARSMATFTRTKPHVNVGTIGHVDHGKTTLTAAITKVLAEAGKAKAVAFDEIDKAPEEKARGITIATAHVEYETAKRHYAHVDCPGHADYVKNMITGAAQMDGGILVVSAPDGPMPQTKEHILLARQVGVPSLVCFLNKVDAVDDPELLELVEMELRELLSFYKFPGDEIPIIRGSALSALQGTNDEIGKNAILKLMDAVDEYIPDPVRQLDKSFLMPIEDVFSIQGRGTVVTGRVEQGTIKTGEDVEILGLTPSGPLKTTVTGVEMFKKILDHGEAGDNVGLLLRGLKRGDVQRGQVVCKPGTVKTYQKFEAEIYVLTKDEGGRHTAFLSNYSPQFYFRTADVTGKVVLPDGVEMVMPGDNVTAGFELISPVPLEPGQRFALREGGRTVGAGVVSKVYS

SEQ ID NO: 27771 - DNA, 1344 bp, Glycine max
  CDS (1)..(1344)
atgggtaaggaaaaggttcacatcagtattgtggttattggccatgttgactctgggaagtccactaccactggccacctgatctacaagcttggaggcattgacaagcgtgttattgagagatttgagaaggaagctgctgagatgaacaagaggtctttcaagtatgcctgggtgcttgataagcttaaggctgagcgtgaaagaggaatcacaattgatattgccttgtggaagtttgaaaccaccaagtactattgcacagtcattgatgcccctggacacagggatttcatcaagaacatgatcactgggacatcccaagctgactgtgctgttcttatcattgattccactactggtggttttgaagctggaatttcaaaggatggacagactcgtgaacatgctctgctttcattcacccttggtgtgaaacagatgatttgttgctgtaacaagatggatgctactacaccaaagtactccaaggccaggtatgatgaaattgtgaaggaagtttcttcctatttgaagaaagtaggatacaaccctgacaagattccttttgttcctatatctggttttgagggagacaacatgattgagaggtccacaaaccttgactggtacaagggtcctactctgctagatgcacttgaccagatctctgagcccaagaggccttctgacaagcccctcaggctaccccttcaggatgtgtacaagattggaggaattggaactgtgcctgtgggacgggttgagactggtgtcttgaagcctggaatggtggtgacttttgcaccaactggactgacaaccgaagttaagtctgtggaaatgcaccatgaagctctcacagaggctcttcccggtgataatgttggattcaatgttaagaatgttgctgttaaggatctcaagcgtggttatgttgcctcgaactcaaaggatgatcctgccaaggaggctgctaacttcactgcccaggttatcatcatgaaccatcctggtcagattggaaatggctatgcccctgttcttgactgccacacttcccacattgctgtcaagtttgctgaactcatgaccaagattgacaggcgatctggcaaagagcttgagaaggaacccaagtttttgaagaatggtgatgctggttttgttaagatgattccgaccaaacccatggtggttgaaactttctctgagtaccccccacttggtcgctttgctgtcagggatatgcgtcaaactgttgctgtgggagtcatcaagaacgtggagaagaaggatcctactggagccaaggtcaccaaggctgcccagaagaagaagtga

SEQ ID NO: 27772 - protein, 447 aa, Glycine max
MGKEKVHISIVVIGHVDSGKSTTTGHLIYKLGGIDKRVIERFEKEAAEMNKRSFKYAWVLDKLKAERERGITIDIALWKFETTKYYCTVIDAPGHRDFIKNMITGTSQADCAVLIIDSTTGGFEAGISKDGQTREHALLSFTLGVKQMICCCNKMDATTPKYSKARYDEIVKEVSSYLKKVGYNPDKIPFVPISGFEGDNMIERSTNLDWYKGPTLLDALDQISEPKRPSDKPLRLPLQDVYKIGGIGTVPVGRVETGVLKPGMVVTFAPTGLTTEVKSVEMHHEALTEALPGDNVGFNVKNVAVKDLKRGYVASNSKDDPAKEAANFTAQVIIMNHPGQIGNGYAPVLDCHTSHIAVKFAELMTKIDRRSGKELEKEPKFLKNGDAGFVKMIPTKPMVVETFSEYPPLGRFAVRDMRQTVAVGVIKNVEKKDPTGAKVTKAAQKKK

SEQ ID NO: 27773 - DNA, 1413 bp, Brassica napus
  CDS (1)..(1413)
atggcgatatcgtctcccgcctattctagactcatctctccctactcctccccttccccttccctctctcccgccatctctacttccgttaaactcaacctctcatcctccttcctcccttcgtacacactctccaccaccccctcagctccccacaccccccgccgctccttcaccgtccgcgctgcgcgcgggaagttcgagaggaaaaagccccacgtcaacatcggaacaatcggccacgtcgaccacggcaaaaccaccctaaccgccgccctcaccatggccctcgcctccatggggaacagcgtcgccaaaaagtacgacgagatcgacgccgcgccggaggagagagcccgcgggatcacgatcaacaccgccaccgtcgagtacgagaccgagaatcgccactacgcccacgttgactgccccggccacgccgattacgtcaagaacatgatcaccggagccgcgcagatggacggagccatcctcgtcgtctccggcgccgacggacctgtgccgcagaccaaagagcacatccttctcgctaaacaggtcggcgtccccgacatggtcgtcttcttgaacaaagaggatcaggtcgatgacgccgagctgcttgagcttgttgagcttgaggtgcgtgagcttttgtcgtcttacgagtttaacggtgatgatatcccgattatctccggatccgcgcttttagctgtggagacgcttactgagaatcctaacgtgaagagaggagataacaagtgggtggataagatctacgagctgatggatgctgttgatagctatattccaattcctcagagacagaccgagttgcctttcttgttagctgttgaagatgtgttctccatcacggggcgtgggactgtggctacagggagggttgagagagggactgttaaggttggagagactgttgatttggttgggttgagggagactaggaactatacagtcactggggtcgaaatgttccagaagattcttgatgaggctttggctggtgacaatgtgggactgttgcttagagggattcaaaaggctgatattcagagggggatggtgttggctaagcctgggagtattactccgcatactaagtttgaggcgattgtgtatgtgttgaagaaggaagaaggtgggaggcattctccgtttttcgcggggtataggcctcagttttacatgaggacgactgatgtgacggggaaagtgacgaagattatgaatgataaagatgaggagtcgaagatggttatgcctggggatagggtgaagattgttgtggagctcattgtgccggttgcttgtgagcaagggatgaggtttgctattagagaaggtgggaagaccgttggtgctggagttattcagtctatcatcgagtga

SEQ ID NO: 27774 - protein, 470 aa, Brassica napus
MAISSPAYSRLISPYSSPSPSLSPAISTSVKLNLSSSFLPSYTLSTTPSAPHTPRRSFTVRAARGKFERKKPHVNIGTIGHVDHGKTTLTAALTMALASMGNSVAKKYDEIDAAPEERARGITINTATVEYETENRHYAHVDCPGHADYVKNMITGAAQMDGAILVVSGADGPVPQTKEHILLAKQVGVPDMVVFLNKEDQVDDAELLELVELEVRELLSSYEFNGDDIPIISGSALLAVETLTENPNVKRGDNKWVDKIYELMDAVDSYIPIPQRQTELPFLLAVEDVFSITGRGTVATGRVERGTVKVGETVDLVGLRETRNYTVTGVEMFQKILDEALAGDNVGLLLRGIQKADIQRGMVLAKPGSITPHTKFEAIVYVLKKEEGGRHSPFFAGYRPQFYMRTTDVTGKVTKIMNDKDEESKMVMPGDRVKIVVELIVPVACEQGMRFAIREGGKTVGAGVIQSIIE

SEQ ID NO: 27775 - DNA, 1350 bp, Brassica napus
  CDS (1)..(1350)
atgggtaaagagaagtttcacatcaacattgtggtcattggccatgtcgattctgggaaatcgactaccactggtcatttgatctacaagcttggtggtattgacaagcgtgtgattgagaggttcgagaaggaagctgctgagatgaacaagaggtccttcaagtatgcgtgggtgttggacaaattgaaggctgagcgtgagcgtggtatcaccattgacattgctctttggaagtttgagaccaccaagtactactgcacagtcattgatgctcctggacatcgtgatttcatcaagaacatgattactggtacctcccaggctgattgtgctgtcttgatcattgactccaccactggtggtttcgaagctggtatctccaaggatggtcagacacgtgagcatgctctccttgctttcacccttggtgtcaagcagatgatttgctgctgtaacgagatggatgccacaactcccaagtactctaaggccaggtacgatgagatcatcaaggaggtgtcttcatacctgaagaaggttgggtacaaccctgacaaaatcccattcgtccccatctctggttttgagggtgacaacatgattgagaggtccaccaaccttgactggtacaagggaccaactctccttgaggcacttgaccagatcaacgagcccaagaggccatcagacaagcccctccgtcttccacttcaggatgtctacaagattggtggaattggaacggtgccagtgggtcgtgttgaaaccggtatgctcaagcctggtatggttgtcacctttgctccttcagggttgaccactgaggttaagtctgttgagatgcaccacgagtctcttgtggaggcacttccaggtgacaacgtcggattcaatgtcaagaatgttgctgtcaaggatctcaagcgtgggtacgttgcatccaactccaaagatgacccagctaagggtgctgctaacttcacttcccaggtcatcatcatgaaccaccccggtcagattggtaacggttacgcaccagttcttgactgccacacttcccacattgccgtcaagttctctgagatcctcaccaagattgacaggcgttctggtaaagagatcgagaaggagcccaagttcttgaagaatggtgatgctggtatggtgaagatgactccaaccaagccaatggttgttgagaccttctctgagtacccaccccttggacgtttcgccgtgagggacatgaggcagactgttgcagtcggcgtcatcaagagcgttgacaagaaggacccaaccggagccaaggtgaccaaggctgccgtcaagaagggtgccaagtga

SEQ ID NO: 27776 - protein, 449 aa, Brassica napus
MGKEKFHINIVVIGHVDSGKSTTTGHLIYKLGGIDKRVIERFEKEAAEMNKRSFKYAWVLDKLKAERERGITIDIALWKFETTKYYCTVIDAPGHRDFIKNMITGTSQADCAVLIIDSTTGGFEAGISKDGQTREHALLAFTLGVKQMICCCNEMDATTPKYSKARYDEIIKEVSSYLKKVGYNPDKIPFVPISGFEGDNMIERSTNLDWYKGPTLLEALDQINEPKRPSDKPLRLPLQDVYKIGGIGTVPVGRVETGMLKPGMVVTFAPSGLTTEVKSVEMHHESLVEALPGDNVGFNVKNVAVKDLKRGYVASNSKDDPAKGAANFTSQVIIMNHPGQIGNGYAPVLDCHTSHIAVKFSEILTKIDRRSGKEIEKEPKFLKNGDAGMVKMTPTKPMVVETFSEYPPLGRFAVRDMRQTVAVGVIKSVDKKDPTGAKVTKAAVKKGAK

SEQ ID NO: 27777 - DNA, 1515 bp, Glycine max
  CDS (1)..(1515)
atggatattgaggaggacatccgttctttgcagctcgattcggcagaagacaataatggggtggtaaatccagaggatggaaagccagaagaagttgagaaatatgataagatggatgaagatccaaagcaggaggttgaggctgagccaaaggctgttgaggctgagccaaaagtgaaagataaggagattccttctgttcaagatgaagaagatgtgcctgagatgacaaaaagacacttgaatgttgtgtttattggtcatgttgatgctggtaagtctacaactggaggccagatacttttccttagtggtcaagttgatgaacggactatccaaaaatacgagaaagaggctaaggacaaaagtcgagaaagctggtatatggcttatataatggacacaaatgaggaagagagggtaaagggaaaaacagttgaagttggaagagcacattttgagactgaaactacgaggtttactattttggatgcacctggtcacaaaagttatgttcccaacatgattagtggtgcatctcaagctgatattggggtgttggttatttctgctcggaagggagagtttgaaactggatacgagagaggtggacaaactcgtgaacatgtccagcttgcaaaaacgctgggtgtgtctaagcttcttgttgttgtcaataaaatggatgagcctacagtgcaatggtcaaaagaaaggtatgatgaaattgagtcaaagatggttccatttctaaagcaatctggatacaacgtaaaaaaagatgtcttgtttttaccaatttctggtctaatgggtgcaaacatgaaaacaagagtggataaaagtgtttgtccatggtggaacgggccttgcttatttgaggcacttgacgctattgaagttccactgcgagatcccaaaggtcctttcaggatgcctattattgacaaattcaaagacatgggaactgttgttatgggcaaagttgaatctggcagtgttcgtgagggagattccttgttggtcatgccaaataaggatcaagtgaaagttgttgccatctttattgatgaagatcgtgttaaacgtgctggacctggtgaaaatttacggattagattatctggtgttgaagatgaagacattttatctgggtttgttctatctagtgttgctaatccaataccagcagttactgagtttgttgctcagttggtgatccttgaactgctagacaatgctatttttactgctgggtacaaggctgttctgcacatccactctgtggttgaggaatgtgagattgttgaactcttgcagcaaatcgatacaaagacaaagaagcctatgaaaaagaaagttctgtttgtgaagaatggtgctgttgtaatgtgccgtgttcaggttaataactctatttgcattgagaagttctctgattttccccaacttgggaggttcactcttcgcactgaaggaaaaactgttgctgtgggaaaagtcactggtctgtga

SEQ ID NO: 27778 - protein, 504 aa, Glycine max
MDIEEDIRSLQLDSAEDNNGVVNPEDGKPEEVEKYDKMDEDPKQEVEAEPKAVEAEPKVKDKEIPSVQDEEDVPEMTKRHLNVVFIGHVDAGKSTTGGQILFLSGQVDERTIQKYEKEAKDKSRESWYMAYIMDTNEEERVKGKTVEVGRAHFETETTRFTILDAPGHKSYVPNMISGASQADIGVLVISARKGEFETGYERGGQTREHVQLAKTLGVSKLLVVVNKMDEPTVQWSKERYDEIESKMVPFLKQSGYNVKKDVLFLPISGLMGANMKTRVDKSVCPWWNGPCLFEALDAIEVPLRDPKGPFRMPIIDKFKDMGTVVMGKVESGSVREGDSLLVMPNKDQVKVVAIFIDEDRVKRAGPGENLRIRLSGVEDEDILSGFVLSSVANPIPAVTEFVAQLVILELLDNAIFTAGYKAVLHIHSVVEECEIVELLQQIDTKTKKPMKKKVLFVKNGAVVMCRVQVNNSICIEKFSDFPQLGRFTLRTEGKTVAVGKVTGL

SEQ ID NO: 27779 - DNA, 1344 bp, Glycine max
  CDS (1)..(1344)
atgggtaaagagaaggttcacattaacattgtggtcattggccatgttgactctgggaagtcaaccaccactggccacttgatttacaagcttggaggtattgacaagcgtgttattgagaggtttgagaaagaagctgctgagatgaacaagaggtcattcaaatacgcctgggtgcttgacaagcttaaggctgagcgtgagagaggaattaccattgatattgcattatggaagtttgagaccaccaaatactactgcactgttattgatgctccaggacatcgtgatttcatcaagaacatgattactggaacttcccaggctgattgtgctgtccttatcattgattccacaactggtggttttgaagctggtatttccaaagatggacagactcgcgagcatgctctacttgccttcacccttggtgtcaagcaaatgatctgttgctgtaacaagatggatgccactaccccaaagtactctaaggccaggtatgaagaaattgtgaaggaagtttcttcctacttgaagaaggtaggttacaacccagacaagattccatttgttcccatctcaggttttgagggtgacaacatgattgagaggtccaccaatcttgattggtacaagggaccaacccttctcgaggctcttgaccagatcaatgagcccaagagaccctcagacaagcctttgaggcttcccttgcaggatgtctacaagattggtggtattggaacagtgccagtgggacgagttgaaactggtgtcttgaagcccggtatggtggtgacttttgctcccactggcctgacaactgaagttaagtctgtggagatgcaccatgaagctctccaggaggcccttccaggtgacaacgtaggatttaatgtgaagaatgttgcagtcaaggatctcaagcgtggttttgttgcctcaaactctaaggatgatcctgccaaggaggctgccaacttcacatcccaagtcattataatgaaccatcctggccaaattggaaatggttatgctcctgtgcttgactgccacacttctcacattgccgtcaagtttgccgaacttgtgaccaagattgacaggcgatctggtaaggagattgagaaggagcccaaattcttgaaaaatggagatgcaggttatgttaagatgattcccaccaagcctatggtggtcgaaactttctccgagtatcctcctcttggtcgttttgccgtgagggacatgcgacaaactgtggctgttggagtcatcaagagtgtggagaagaaggacccaactggagccaaggtcaccaaggctgcacagaagaagaagtga

SEQ ID NO: 27780 - protein, 447 aa, Glycine max
MGKEKVHINIVVIGHVDSGKSTTTGHLIYKLGGIDKRVIERFEKEAAEMNKRSFKYAWVLDKLKAERERGITIDIALWKFETTKYYCTVIDAPGHRDFIKNMITGTSQADCAVLIIDSTTGGFEAGISKDGQTREHALLAFTLGVKQMICCCNKMDATTPKYSKARYEEIVKEVSSYLKKVGYNPDKIPFVPISGFEGDNMIERSTNLDWYKGPTLLEALDQINEPKRPSDKPLRLPLQDVYKIGGIGTVPVGRVETGVLKPGMVVTFAPTGLTTEVKSVEMHHEALQEALPGDNVGFNVKNVAVKDLKRGFVASNSKDDPAKEAANFTSQVIIMNHPGQIGNGYAPVLDCHTSHIAVKFAELVTKIDRRSGKEIEKEPKFLKNGDAGYVKMIPTKPMVVETFSEYPPLGRFAVRDMRQTVAVGVIKSVEKKDPTGAKVTKAAQKKK

SEQ ID NO: 27781 - DNA, 1365 bp, Glycine max
  CDS (1)..(1365)
atggctacaatcgttctcagaaattgctcttccacttctcggcgcctcttccccttaacctctcaaatccactcttccttcactcgttcccctctctctcctcccgttttcaccaatgactccacatcttcttcttcttcttcttcttccagttccaacccctggtggagatccatggccaccttcaccagaacgaaacctcacgttaatgtcggaactattggacacgtggatcacgggaagaccacgcttactgcagcaatcaccagggtgcttgcggatgaagggaaagctaaagctgttgccttcgatgaaatcgataaggctcctgaagagaagaagagaggaatcacgattgcaacggcacatgtggagtatgagactgcgaaaagacattatgctcatgtggactgccctggacacgcagattatgttaaaaatatgattacaggagctgcccagatggatggaggtatacttgttgtatccgcacctgatggacctatgcctcaaaccaaggagcacattcttcttgctcgccaagttggtgtgccatctctggtgtgttttctaaataaagttgatgcagttgatgatccagagttgttagagcttgtagaaatggagctccgtgagcttctgagcttctacaagttccctggggatgaaatccctatcattagaggttcagcattgtctgccttacagggtacaaatgatgagatcggaagacaggccatcctaaaattaatggatgctgtggatgaatacattcctgaccctgttcgccaacttgacaagcctttcctaatgccaattgaagatgtgttctcaattcagggacgtggaacagttgccactggccgtgttgaacaagggatcattaaagttggtgatgaagtggaggtgttgggtctaatgcagggtggtcctctgaaaacaacagtaactggagttgagatgttcaagaagattttggatcaaggacaggctggtgataacgtgggtcttcttctccgtggtctgaagcgggaagacattcaacgtggtcaggtgattgccaaacctggttctgtaaaaacatccaagaaatttgaggcagagatatatgtactcacaaaggatgagggagggcgacacactgctttcttctctaactacaaacctcagttttacttgaggactgctgatgtcactggaaaagtagagttgcccgaaaatgttaaaatggttatgcctggagacaatgttactgccgtgtttgaattgatttcagcagttccacttgaagcaggacaaagatttgccttgagagaaggtggaagaacagttggtgccggtgtggtgtcaaaagtactgagctag

SEQ ID NO: 27782 - protein, 454 aa, Glycine max
MATIVLRNCSSTSRRLFPLTSQIHSSFTRSPLSPPVFTNDSTSSSSSSSSSSNPWWRSMATFTRTKPHVNVGTIGHVDHGKTTLTAAITRVLADEGKAKAVAFDEIDKAPEEKKRGITIATAHVEYETAKRHYAHVDCPGHADYVKNMITGAAQMDGGILVVSAPDGPMPQTKEHILLARQVGVPSLVCFLNKVDAVDDPELLELVEMELRELLSFYKFPGDEIPIIRGSALSALQGTNDEIGRQAILKLMDAVDEYIPDPVRQLDKPFLMPIEDVFSIQGRGTVATGRVEQGIIKVGDEVEVLGLMQGGPLKTTVTGVEMFKKILDQGQAGDNVGLLLRGLKREDIQRGQVIAKPGSVKTSKKFEAEIYVLTKDEGGRHTAFFSNYKPQFYLRTADVTGKVELPENVKMVMPGDNVTAVFELISAVPLEAGQRFALREGGRTVGAGVVSKVLS

SEQ ID NO: 27783 - DNA, 1359 bp, Glycine max
  CDS (1)..(1359)
atggctactctcgttctcaggaattgctcttccacttctcggcgcctcttccctttaacctctcaaatccactcttccttctctcgttcccctctctcccctctcgttttcaccaacgactccgcatcttcttcttcttcttccactcccaacccctggtggagatccatggccactttcaccagaacgaaacctcacgttaatgtcggaactattggacacgtggatcatgggaagaccacgcttaccgcggcaatcaccaaggtgcttgctgatgaagggaaggctaaggctgtggcattcgatgaaatcgataaggctcctgaagagaagaagagaggaatcacgattgcaacggcacatgtggagtatgagactgcaaaacgacattatgctcatgtggactgccccggacacgcggattatgttaaaaatatgattaccggagctgcccagatggatggtggtatacttgttgtatctgcacctgatggaccgatgcctcaaaccaaggagcacattcttcttgctcgccaagttggtgtgccatctctggtgtgttttctgaataaagttgatgcagttgatgatccagagttgttagagcttgtagaaatggagctccgtgagcttctgagcttctacaagttccctggagatgaaatccctatcattagaggttcagcattgtctgctttacagggtacaaatgatgagattggaagacaggccatcctaaaattaatggatgctgttgatgaatacattcctgaccctgttcgccaacttgataagccttttctaatgcccattgaagatgtattttcaattcagggacgaggaacagtagccactggacgtgttgaacaagggatcattaaagttggtgatgaagtggaggtgttgggtctaatgcagggtggtcctctgaaaacaacagtaactggagttgagatgttcaagaagattttggatcaaggacaagctggtgataacgttggtcttcttctccgtggtctgaagcgtgaagatattcaacgtggtcaggtgattgccaaacctggttctgtaaaaacgtccaagaaatttgaggcagatatatatgtactcacaaaggatgagggtggacgacacactgccttcttctctaactacaaacctcagttttacttgaggactgctgatgccactggaaaagtagagttgcccgaaaatgttaaaatggttatgcctggagacaatgttactgccgtgtttgaattgatttctgcagttccacttgaagcaggacaaagatttgccttgagagaaggtggtagaacagttggtgccggtgtggtgtcaaaagtactgagctag

SEQ ID NO: 27784 - protein, 452 aa, Glycine max
MATLVLRNCSSTSRRLFPLTSQIHSSFSRSPLSPLVFTNDSASSSSSSTPNPWWRSMATFTRTKPHVNVGTIGHVDHGKTTLTAAITKVLADEGKAKAVAFDEIDKAPEEKKRGITIATAHVEYETAKRHYAHVDCPGHADYVKNMITGAAQMDGGILVVSAPDGPMPQTKEHILLARQVGVPSLVCFLNKVDAVDDPELLELVEMELRELLSFYKFPGDEIPIIRGSALSALQGTNDEIGRQAILKLMDAVDEYIPDPVRQLDKPFLMPIEDVFSIQGRGTVATGRVEQGIIKVGDEVEVLGLMQGGPLKTTVTGVEMFKKILDQGQAGDNVGLLLRGLKREDIQRGQVIAKPGSVKTSKKFEADIYVLTKDEGGRHTAFFSNYKPQFYLRTADATGKVELPENVKMVMPGDNVTAVFELISAVPLEAGQRFALREGGRTVGAGVVSKVLS

SEQ ID NO: 27785 - DNA, 1350 bp, Linum usitatissimum
  CDS (1)..(1350)
atggcttccgtcgtcctccgaaaccctaattccaagcgtctcttcacatcctctttcccaatctactggggctgccgagggggatcagccattactcatcattcttctatccacggaaatgactccacctctccttctgttgcttcgtggtggagatccatggccaccttcacaaggactaagcctcacgtcaatgttggaacaattggccacgttgatcatggaaagactactcttactgcggcaattaccagggtactggctgaagaaggtaaagctaaagctgttgccttcgacgaaattgataaggccccagaagagaaaaagagaggaattactattgccactgcccatgtggagtatgaaactgcaaagcgtcattatgcacatgttgactgtcctggacacgcagattacgttaaaaacatgattacgggagctgcccaaatggatggtggaattttagtggtatcagcccctgatggtcccatgccgcagacaaaagaacacattttgcttgctcgccaggttggtgtcccatcgctggtttgtttcctaaataaatgtgatgccgttgatgacccagaactactagagcttgtcgaaatggagctccgtgagcttctgagtttctacaagtttcctggagatgatatccctatcattaggggttcagcattgtctgctttacaagggactaacgaagagctggggaaacaagccattttaaagttgatggatgctgtggatgagtatatcccggacccagtccgccaacttgaaaagccattcctcatgcccatcgaagatgttttctccattcagggtcgtggaactgttgcaactggccgtatcgaacaagggacaatcaaagtgggtgaagaagttgaaatcttgggacttacatcgggcggtcctcaaaaaacaacagttactggcgttgagatgttcaagaaaattttggacaatggacaagctggtgacaatgttggtctccttctgcgtggtttgaaacgtgaagatatagaacgaggacaggtgattgccaagcctggatctctgaaaacatacaagaaattcgaggcggagatatatgtcctgaccaaggacgaaggtggtcgccatactgccttcttctctaactacaggccccagttctacatgagaactgcagatattaccggtaaggtggaattgcctgaatccgtgaaaatggtcatgcccggcgacaatgtgactgccaatttcgagctgatccaaccggttcctatggaagcaggacaaagatttgctttgagggaaggaggtaggacagttggagcaggtgttgtctcgaaagtaattagctga

SEQ ID NO: 27786 - protein, 449 aa, Linum usitatissimum
MASVVLRNPNSKRLFTSSFPIYWGCRGGSAITHHSSIHGNDSTSPSVASWWRSMATFTRTKPHVNVGTIGHVDHGKTTLTAAITRVLAEEGKAKAVAFDEIDKAPEEKKRGITIATAHVEYETAKRHYAHVDCPGHADYVKNMITGAAQMDGGILVVSAPDGPMPQTKEHILLARQVGVPSLVCFLNKCDAVDDPELLELVEMELRELLSFYKFPGDDIPIIRGSALSALQGTNEELGKQAILKLMDAVDEYIPDPVRQLEKPFLMPIEDVFSIQGRGTVATGRIEQGTIKVGEEVEILGLTSGGPQKTTVTGVEMFKKILDNGQAGDNVGLLLRGLKREDIERGQVIAKPGSLKTYKKFEAEIYVLTKDEGGRHTAFFSNYRPQFYMRTADITGKVELPESVKMVMPGDNVTANFELIQPVPMEAGQRFALREGGRTVGAGVVSKVIS

SEQ ID NO: 27787 - DNA, 1344 bp, Hordeum vulgare
  CDS (1)..(1344)
atgggcaaggaaaagatccacatcagcattgtggtcattggccatgttgactctggcaagtcaaccacgactggccatctcatctacaagcttggaggcattgacaagcgtgtgatcgagaggtttgagaaggaagcagctgagatgaacaagaggtcattcaagtatgcctgggtgcttgacaagctcaaggctgagcgtgagagaggtatcaccattgatattgctctgtggaagttcgagaccaccaagtactcttgcactgtcattgatgctcctggtcaccgtgatttcatcaagaacatgatcactgggacctcccaggctgattgtgctgtgcttatcattgactccaccactggtggttttgaggctggtatctccaaggatggccagacccgtgagcatgctctccttgctttcactcttggtgtgaagcagatgatttgctgctgtaacaagatggacgccaccactcccaagtactcgaagtcccgttacgatgaaattgtcaaggaagtctcttcatacctgaagaaggtcggctacaaccctgacaaggttcccttcgtccccatctctgggtttgagggtgacaacatgattgagaggtcctccaaccttgactggtacaagggccctaccctgcttgaggcgcttgaccagatcaatgagcccaagaggccctcagacaagcccctgcgtcttccccttcaggatgtctacaagattggtggcattggaactgtgccagtgggacgtgttgagactggagtcatcaagccaggcatggttgtcacctttggccctactggccttaccactgaggtcaagtctgttgagatgcaccatgagtctctcctggaggcgcttcctggtgacaatgttggcttcaacgtcaagaacgtggctgtcaaggatctcaagcgtgggtatgttgcttccaactccaaggacgaccctgccaaggaggctgccaacttcactgcccaggtcatcatcatgaaccaccctggccagatcagcaacggttatgcccctgtgctggactgccacacatcccacatcgccgtcaagtttgccgagatccagaccaagatcgacaggcggtccggcaaggagctggaggcggcgcccaagttcctcaagaacggtgatgctgggttcgtcaagatgattccaaccaagcccatggtggtggagacctttgcccagtaccctcctctgggtcggtttgccgtgcgtgacatgaggcagacggttgctgtgggtgtgatcaagagcgtggagaagaaggagccgaccggcgccaaggttaccaaggctgcgatcaagaagaaatga

SEQ ID NO: 27788 - protein, 447 aa, Hordeum vulgare
MGKEKIHISIVVIGHVDSGKSTTTGHLIYKLGGIDKRVIERFEKEAAEMNKRSFKYAWVLDKLKAERERGITIDIALWKFETTKYSCTVIDAPGHRDFIKNMITGTSQADCAVLIIDSTTGGFEAGISKDGQTREHALLAFTLGVKQMICCCNKMDATTPKYSKSRYDEIVKEVSSYLKKVGYNPDKVPFVPISGFEGDNMIERSSNLDWYKGPTLLEALDQINEPKRPSDKPLRLPLQDVYKIGGIGTVPVGRVETGVIKPGMVVTFGPTGLTTEVKSVEMHHESLLEALPGDNVGFNVKNVAVKDLKRGYVASNSKDDPAKEAANFTAQVIIMNHPGQISNGYAPVLDCHTSHIAVKFAEIQTKIDRRSGKELEAAPKFLKNGDAGFVKMIPTKPMVVETFAQYPPLGRFAVRDMRQTVAVGVIKSVEKKEPTGAKVTKAAIKKK

SEQ ID NO: 27789 - DNA, 1350 bp, Brassica napus
  CDS (1)..(1350)
atgggtaaagagaagtttcacatcaacattgtggtcattggccatgtcgactctggcaaatcgaccacaactggtcacttgatctacaagcttggtggtattgacaagcgtgtcatcgagaggttcgagaaggaggctgctgagatgaacaagaggtccttcaagtacgcgtgggtgttggacaaacttaaggccgagcgtgagcgtggtatcaccattgacattgctctctggaagttcgagaccaccaagtactactgcactgtcattgatgcccctggacatcgtgatttcatcaagaacatgattactggtacctcccaggctgattgtgctgttcttatcattgactccaccactggtggttttgaggctggtatctccaaggatggtcagacccgtgagcatgctcttcttgctttcacccttggtgtcaagcaaatgatttgctgctgtaacaagatggatgccactacccccaagtactccaaggctaggtacgatgagatcatcaaggaggtgtcttcctacttgaagaaggttgggtacaaccctgacaaaatcccattcgtccccatctctggattcgagggtgacaacatgattgagaggtccaccaaccttgactggtacaagggaccaactctccttgaggctcttgaccagatcaacgagccaaagaggccttcagacaagcccctccgtcttccacttcaggatgtctacaagattggtggtattggaacggtgccggttggtcgtgttgagactggtatgctcaagcctggtatggttgtgacattcgctccttcgggtttgaccactgaggttaagtctgttgagatgcaccacgagtctcttgtggaggcgcttccaggtgacaacgtgggattcaatgtcaagaacgttgccgtcaaggatctcaagcgtgggtatgttgcatccaactccaaggatgatcctgccaagggagctgctaacttcacctcccaggtcatcatcatgaaccaccctggtcagatcggtaacggttacgcccctgtccttgattgccacacctcccacattgcagtcaagttctctgagatccttaccaagattgacagacggtctggtaaagagatcgagaaggagcctaagtttttgaagaatggagatgctggtatggtgaagatgactccaaccaagcccatggttgttgagactttctcagagtacccaccactgggacgattcgctgttagggatatgaggcagaccgtggctgttggtgtcatcaagagtgttgacaagaaggacccaaccggtgccaaggtcaccaaggctgcagtcaagaagggtgccaaatga

SEQ ID NO: 27790 - protein, 449 aa, Brassica napus
MGKEKFHINIVVIGHVDSGKSTTTGHLIYKLGGIDKRVIERFEKEAAEMNKRSFKYAWVLDKLKAERERGITIDIALWKFETTKYYCTVIDAPGHRDFIKNMITGTSQADCAVLIIDSTTGGFEAGISKDGQTREHALLAFTLGVKQMICCCNKMDATTPKYSKARYDEIIKEVSSYLKKVGYNPDKIPFVPISGFEGDNMIERSTNLDWYKGPTLLEALDQINEPKRPSDKPLRLPLQDVYKIGGIGTVPVGRVETGMLKPGMVVTFAPSGLTTEVKSVEMHHESLVEALPGDNVGFNVKNVAVKDLKRGYVASNSKDDPAKGAANFTSQVIIMNHPGQIGNGYAPVLDCHTSHIAVKFSEILTKIDRRSGKEIEKEPKFLKNGDAGMVKMTPTKPMVVETFSEYPPLGRFAVRDMRQTVAVGVIKSVDKKDPTGAKVTKAAVKKGAK

SEQ ID NO: 27791 - DNA, 1362 bp, Brassica napus
  CDS (1)..(1362)
atggcctccgtcgctcttcgaaacccaacctcgaagcgtctacttcccttctctactcagatctactcacgctgcggtggttccatctcttcgtctccctcgatctctcactcgatcggaggaggagatgatctctctccctcaagcttcggagcttccctgtggagatccatggccacctttacacgaaataaacctcatgtaaatgtcggaacgatcgggcatgtggatcacgggaagaccactttaactgctgcaatcacaaaggttcttgctgaagagggcaaagctaaagctattgcctttgatgaaattgataaagctcctgaggagaagaagagaggaattaccattgccacggctcatgtggagtatgagactgctaagcgtcactatgctcatgttgattgccctggacacgctgattatgttaagaatatgattactggagctgcacaaatggatggtgggattcttgtggtttcaggtccagatggacccatgcctcagaccaaggaacatattctacttgcccgtcaggttggtgttccatcacttgtgtgcttcctgaacaaagtcgatgtggtggatgatccagagttattggagcttgtagagatggaactacgtgaacttctcagcttctacaagttccctggggatgatatcccaatcatccggggatctgctctgtgtgcacttcagggcacaaacgatgaaattggaaggcaagctatattgaagcttatggatgctgtcgatgagtacatacctgaccctgttcgtgtgcttgacaaggctttcttgatgcctattgaagatgttttctcaatccaaggacgtggaactgttgcaaccggacgtattgagcaaggagtcatcaaagtgggtgaagaagtcgagatattgggtttaaaagacggacctccaatgaaatctactgtaactggggtcgagatgttcaagaagattttggataatggacaggctggtgacaatgtaggacttcttctgcgtgggctaaagagagaagacatccagcgtggaatggtaattgctaagcctggctcatgcaagacatacaagaagtttgaagcagagatttatgtgctcacaaaggacgaaggtggacgtcacactgcttttctctccaactacaggcctcagttttacttgaggactgcagatatcacgggaagagtagagttaccagaagaagtgaagatggttatgcctggtgacaatgtcactgcagttttcgagcttatcatgcctgtcccactcgaaataggtcaaagatttgctctgagggaaggaggtagaacagttggagctggtgttgtgtcaaaagtgatgacttag

SEQ ID NO: 27792 - protein, 453 aa, Brassica napus
MASVALRNPTSKRLLPFSTQIYSRCGGSISSSPSISHSIGGGDDLSPSSFGASLWRSMATFTRNKPHVNVGTIGHVDHGKTTLTAAITKVLAEEGKAKAIAFDEIDKAPEEKKRGITIATAHVEYETAKRHYAHVDCPGHADYVKNMITGAAQMDGGILVVSGPDGPMPQTKEHILLARQVGVPSLVCFLNKVDVVDDPELLELVEMELRELLSFYKFPGDDIPIIRGSALCALQGTNDEIGRQAILKLMDAVDEYIPDPVRVLDKAFLMPIEDVFSIQGRGTVATGRIEQGVIKVGEEVEILGLKDGPPMKSTVTGVEMFKKILDNGQAGDNVGLLLRGLKREDIQRGMVIAKPGSCKTYKKFEAEIYVLTKDEGGRHTAFLSNYRPQFYLRTADITGRVELPEEVKMVMPGDNVTAVFELIMPVPLEIGQRFALREGGRTVGAGVVSKVMT

SEQ ID NO: 27793 - DNA, 1605 bp, Brassica napus
  CDS (1)..(1605)
atggatattgaggctgatatccgcgcattacagctagattccgcagaagaaaacaatggagttggagttgtcattccgacagatcagaactcagatggagttgagatagtggataaaatggatgaagacctgaaagatgaggttcaagaatcagtgcctgcccctgatgtgcaacaagctcccgaggatcatgatcaggaaatgctccatccagtgcataacccagcgaaagctaaagagaaggcagcccaggagaaggctgccaaagaggaagctgaagaagaggcagaggcaaacaaaaagagacacttgaatgtggtgttcattggacatgttgatgctgggaagtctacaattggaggacaaattctcttccttagcggtcaggtggacgaccgacaaatccaaaagtatgaaaaggaagcaaaagaaaaaagtagagaaagctggtatatggcttatataatggacacaaatgaagaagagagggccaagggtaaaactgttgaagttggaagggctcattttgaaactgagaccactaggtttacaatcctagatgctccgggtcataagagttatgtaccaaatatgattagtggagcatctcaggccgacattggtgtgctggtgatctccgctcgtaaaggtgaatttgaaacaggatatgagaggggtgggcagacgcgtgaacatgttcaactggcaaaaacattgggcgtgtcaaagctggtggttgttgtgaacaaaatggatgacccaactgtgaactggtcgaaagagaggtacgatgaaatagaacaaaaaatggtaccatttcttaaatcctctggctacaacacaaagaaagatgttatcttcctgcctatatctggtctaatggggattaatatagacaagaggatggatccaaaagtttgtccttggttcagtggccctagcttttttgaagtcttggattcaattgaagttccgccacgagatcctaacggcccattcaggatgcccatcattgataaattcaaagacatggggactgtggttatgggaaaagtagaatcgggcagcattcgggagggtgattccttggtcattatgccaaataaggaacccgtgaaagttgttgcaatatattgtgatgaagataaagttaagcgtgctggaccgggtgagaatttgagagtccgtataactggcattgaggacgaggatatcctttcaggttttgttttatccagcgcggtaaagcctgtacctgccgttactgagttcgttgcccaattacaaatcctcgagctgcttgacaacgctatttttacagctggttacaaggctattctccacattcatgctgttgttgaggaatgtgacataattgaattgataagccaaattgatatgaagactaggaaacccatgaaaaagaaaattctgtttgtgaagaatggtgctgctgttgtctgccgtatacaggttagcaattcaatctgtgttgaaaaattctcagattttccgcaacttggaagattcactctgcgaactgaagggaaaacaattgctgttggaaaagtgactgcgctctcaggtgcttcctcaagcgcttga

SEQ ID NO: 27794 - protein, 534 aa, Brassica napus
MDIEADIRALQLDSAEENNGVGVVIPTDQNSDGVEIVDKMDEDLKDEVQESVPAPDVQQAPEDHDQEMLHPVHNPAKAKEKAAQEKAAKEEAEEEAEANKKRHLNVVFIGHVDAGKSTIGGQILFLSGQVDDRQIQKYEKEAKEKSRESWYMAYIMDTNEEERAKGKTVEVGRAHFETETTRFTILDAPGHKSYVPNMISGASQADIGVLVISARKGEFETGYERGGQTREHVQLAKTLGVSKLVVVVNKMDDPTVNWSKERYDEIEQKMVPFLKSSGYNTKKDVIFLPISGLMGINIDKRMDPKVCPWFSGPSFFEVLDSIEVPPRDPNGPFRMPIIDKFKDMGTVVMGKVESGSIREGDSLVIMPNKEPVKVVAIYCDEDKVKRAGPGENLRVRITGIEDEDILSGFVLSSAVKPVPAVTEFVAQLQILELLDNAIFTAGYKAILHIHAVVEECDIIELISQIDMKTRKPMKKKILFVKNGAAVVCRIQVSNSICVEKFSDFPQLGRFTLRTEGKTIAVGKVTALSGASSSA

SEQ ID NO: 27795 - DNA, 1362 bp, Brassica napus
  CDS (1)..(1362)
atggcctccgtcgctcttcgaaacccaacctcgaagcgtctacttcccttctctactcagacctactcacgctgcggtggttccatctcttcgtctccctcgatctctcactcgatcggaggaggagatgatctctctccctcaagcttcggagcttccctgtggagatccatggccacctttacacgaaataaacctcatgttaatgtcggaacgatcgggcatgtggatcacgggaagaccactttgactgctgcaatcacaaaggttcttgctgaggagggcaaagctaaagctattgcctttgatgagattgataaagctcctgaggagaagaagagaggaattaccattgccacggctcatgtggagtatgagactgctaagcgtcactatgctcatgttgattgccctggacacgctgattatgttaagaatatgattactggagctgcacaaatggatggtgggattcttgtggtttcaggtccagatggacccatgcctcagaccaaggaacatattctacttgcccgtcaggttggtgttccatcacttgtgtgtttcttgaacaaagtcgatgtggtggatgatccagagttattggagcttgtagagatggaactacgtgaactcctcagcttctacaagttccctggtgatgatatcccaatcatccggggatctgctctgtgtgcacttcagggcacaaacgatgaaattggaaggcaagctatattgaagcttatggatgctgtcgatgagtacatacctgaccctgttcgtgtgcttgacaaggctttcttgatgcctattgaagatgttttctcaatccaaggacgtggaactgttgcaaccggacgtattgagcaaggagtcatcaaagttggtgaagaagttgagatattgggtttaaaagacggacctccaatgaaatctactgtaactggggttgagatgttcaagaagattttggataatggacaggctggtgacaatgttggacttcttctgcgtgggctcaagagagaagacattcagcgtggaatggtgattgctaagcctggttcatgcaagacatacaagaagtttgaagcggagatctatgtgctcacaaaggacgaaggtggacgtcacactgcttttctctccaactacaggcctcagttctacttgaggactgcagatatcactgggagagtagagttaccagatgacgtgaagatggttatgcctggtgacaatgtcactgctgttttcgagcttatcatgcctgtcccactcgaaataggtcaaagatttgccctgagggaaggaggtagaacagttggagctggtgttgtatcaaaagtgatgacttga

SEQ ID NO: 27796 - protein, 453 aa, Brassica napus
MASVALRNPTSKRLLPFSTQTYSRCGGSISSSPSISHSIGGGDDLSPSSFGASLWRSMATFTRNKPHVNVGTIGHVDHGKTTLTAAITKVLAEEGKAKAIAFDEIDKAPEEKKRGITIATAHVEYETAKRHYAHVDCPGHADYVKNMITGAAQMDGGILVVSGPDGPMPQTKEHILLARQVGVPSLVCFLNKVDVVDDPELLELVEMELRELLSFYKFPGDDIPIIRGSALCALQGTNDEIGRQAILKLMDAVDEYIPDPVRVLDKAFLMPIEDVFSIQGRGTVATGRIEQGVIKVGEEVEILGLKDGPPMKSTVTGVEMFKKILDNGQAGDNVGLLLRGLKREDIQRGMVIAKPGSCKTYKKFEAEIYVLTKDEGGRHTAFLSNYRPQFYLRTADITGRVELPDDVKMVMPGDNVTAVFELIMPVPLEIGQRFALREGGRTVGAGVVSKVMT

SEQ ID NO: 27797 - DNA, 1359 bp, Zea mays
  CDS (1)..(1359)
atggcttccgccgcggtgctccggaacgccggctcccggcgcctcttctcctaccctactctccgcgccgctgcgatatatgtaccttctgcgctacccgatgcgcccgcggcggcggcagcgccggcccagccgccaccgacggccgggaccctctgggcgaggtctatggccaccttcacgcgcacgaagccccatgtgaacgtcggcaccattgggcacgtcgatcacggcaaaaccactctcactgctgccattaccaaggtcctggccgaggcagggaaggccaaagccgttgctttcgacgagatcgacaaggctccggaggagaaagccagaggaatcaccattgcgacagctcacgtcgagtatgagacggctaaaaggcattatgctcacgttgattgtccaggtcacgcagattatgtcaagaacatgatcactggagctgctcaaatggatggtggtattcttgtcgtgtcagctcctgatggcccgatgccacaaactaaggagcatattcttcttgcccgtcaggttggtgtaccttcccttgtgtgcttcttaaacaaagttgatgctgttgatgatccagagcttctggaacttgtagagatggagcttcgggagctcctcagtttctacaagttccccggtgatgagattccgatcatccgtgggtctgcgttgtctgctttgcaagggaacaatgatgagataggaaagaatgcaattttgaaattaatggacgcagttgatgagtacatccctgatcctgtgaggcagcttgataagcctttcttgatgccgatagaagatgtgttttctattcagggtcgtggaactgttgttactgggcgtgttgaacagggaacaatcaaaactggtgaagatgttgagatcttgggtttggcacagactggtcccttgaagactacagttactggtgttgagatgttcaaaaagatactggaccatggagaggctggtgacaacgttggtcttcttcttcgtggtctaaagcgtggtgatgtcgagcgtggccaggtggtgtgcaaacctggtagtctgaagacatacaaaaagtttgaggcagaaatatacgtcctgacaaaggatgaaggtggccggcacactgcctttgtcacaaattacacaccccaattctacttcaggactgctgatgtcactggaaaggttgagttgcttggtgagacgaagatggttttgcccggtgacaatgtaaccgcgaatttcgagttgatatcgcctgttcctcttgaaactgggcaaagatttgcgatgagggaaggagggaggacagttggtgccggggttgtctccaaagttattagctga

SEQ ID NO: 27798 - protein, 452 aa, Zea mays
MASAAVLRNAGSRRLFSYPTLRAAAIYVPSALPDAPAAAAAPAQPPPTAGTLWARSMATFTRTKPHVNVGTIGHVDHGKTTLTAAITKVLAEAGKAKAVAFDEIDKAPEEKARGITIATAHVEYETAKRHYAHVDCPGHADYVKNMITGAAQMDGGILVVSAPDGPMPQTKEHILLARQVGVPSLVCFLNKVDAVDDPELLELVEMELRELLSFYKFPGDEIPIIRGSALSALQGNNDEIGKNAILKLMDAVDEYIPDPVRQLDKPFLMPIEDVFSIQGRGTVVTGRVEQGTIKTGEDVEILGLAQTGPLKTTVTGVEMFKKILDHGEAGDNVGLLLRGLKRGDVERGQVVCKPGSLKTYKKFEAEIYVLTKDEGGRHTAFVTNYTPQFYFRTADVTGKVELLGETKMVLPGDNVTANFELISPVPLETGQRFAMREGGRTVGAGVVSKVIS

SEQ ID NO: 27799 - DNA, 1515 bp, Glycine max
  CDS (1)..(1515)
atggatattgaggaggacatccgttctttacagctcgattcagcagaagacaataatggggtggtaaatgcagaggatggaaggccagaagaagttgagaaatctgataagatggatgaagatccaaagcaggatgttgaggctgagccaaaggctgttgaggctgagccaaaagtgaaggataaggaggttccttctgttcaagatgaagaagatgaaccagagatgacaaaaagacacttgaatgttgtttttattggtcatgttgatgctggtaagtctacaactggaggccagatacttttccttagtggtcaagttgatgagcggactatccaaaaatacgagaaagaggctaaggacaaaagtcgagaaagctggtatatggcttatataatggacacgaatgaggaggagagggtaaagggaaagacagttgaagttggaagagcacattttgagactgaaacaacaaggtttactattttggatgcacctggtcacaaaagctatgttcctaacatgattagtggtgcatctcaagctgatattggagtgttggttatttctgctcggaagggagagtttgaaactggatacgagagaggtggacaaactcgtgaacatgtccagcttgcaaaaacgctgggtgtgtctaagcttcttgttgtcgtcaataaaatggatgagcctacagtgcaatggtcgaaagaaaggtatgatgaaattgagtcgaagatggttccatttttaaagcaatctggatacaacgtaaaaaaagatgtcttgtttttaccaatatctggtctaatgggtgcaaacatgaaaacaagagtggataaaagcgtttgtccatggtggaatggaccttgcttatttgaggcacttgacgctattgaagttccactgcgagatcccaaaggtcctttcaggatgcctattattgacaaattcaaagacatgggaactgttgttatgggcaaagttgaatctggcagtgttcgtgagggagattccttgttggtcatgccaaataaggatccagtgaaagttgttgccatatttattgatgaagatcgtgttaaacgtgctggacctggtgaaaatttacggattagattatctggtgttgaagaagaagacatattgtctgggtttgttctatctagtgttgctaatccaataccagcagttaccgagtttgttgctcagttggtgatccttgaattgctagacaatgctatttttactgctgggtacaaggctgttctgcacatccactctgtggttgaggaatgcgagattgttgaactcttgcagcaaatcgatacaaagacaaagaagcctatgaaaaagaaagttttgtttgtgaagaatggagctgttgtagtgtgccgtgttcaggttaataactctatttgcatcgagaagttctctgattttccccagcttgggaggttcactcttcgcactgaaggaaaaactgttgctgtgggaaaagtcactggtctgtga

SEQ ID NO: 27800 - protein, 504 aa, Glycine max
MDIEEDIRSLQLDSAEDNNGVVNAEDGRPEEVEKSDKMDEDPKQDVEAEPKAVEAEPKVKDKEVPSVQDEEDEPEMTKRHLNVVFIGHVDAGKSTTGGQILFLSGQVDERTIQKYEKEAKDKSRESWYMAYIMDTNEEERVKGKTVEVGRAHFETETTRFTILDAPGHKSYVPNMISGASQADIGVLVISARKGEFETGYERGGQTREHVQLAKTLGVSKLLVVVNKMDEPTVQWSKERYDEIESKMVPFLKQSGYNVKKDVLFLPISGLMGANMKTRVDKSVCPWWNGPCLFEALDAIEVPLRDPKGPFRMPIIDKFKDMGTVVMGKVESGSVREGDSLLVMPNKDPVKVVAIFIDEDRVKRAGPGENLRIRLSGVEEEDILSGFVLSSVANPIPAVTEFVAQLVILELLDNAIFTAGYKAVLHIHSVVEECEIVELLQQIDTKTKKPMKKKVLFVKNGAVVVCRVQVNNSICIEKFSDFPQLGRFTLRTEGKTVAVGKVTGL

SEQ ID NO: 27801 - DNA, 1440 bp, Glycine max
  CDS (1)..(1440)
atggcaatttcttgggcagcagcaacaacctcaaagctcgcataccctcctcatgtccacttctctccttcaccctcctccaattatctcttccttaaaacccacaaaccctccgccacacacctctcctcttccttcatccaccccaccacaatcctccacctcgccgctgccaacaccaccacccgccgccgctccttcaccgtccgcgccgcccgcggcaagttcgagcgcaagaagccccacgtcaacatcggcaccatcggccacgtcgaccacggtaagaccaccctcaccgccgccctcaccatggccctcgcctccctcggcaatagtgcccctaaaaaatacgacgagatcgacgccgcccccgaggagcgcgcccgcggcatcaccatcaacaccgccaccgtcgagtacgagaacgagaaccgccactacgcccacgtcgactgccccggccacgccgactacgtcaagaacatgatcaccggcgctgcccagatggacggcgccatcctcgtcgtctccggcgccgacggcccaatgccccaaaccaaagaacacattcttttggccaaacaagtcggcgttcccaacattgtcgtcttcctcaacaaacaggaccaggttgatgacgaggagcttcttcagttagtagaattggaggtccgggagcttctttccaagtacgagttccccggagacgatgttccgattatctccggttccgctttgctgtctttggaagctttgatggccaaccctgccatcaagcgcggcgaaaaccaatgggttgataaaatttacgagctcatggaagctgtggatgactacattcccatccctcagcgccaaactgaacttccctttttgctggccattgaggatgttttcaccatcaccggtcgtggaaccgtcgccaccggaagggttgagagaggtactattagggttggagagactgttgatattgttggtgtgaaggagactaggaacaccactgtgactggggtggaaatgtttcagaagattctggatgaggctttggctggggacaatgtgggcttgttgcttaggggtattcagaaaactgatattcagagagggatggttttggctaagcctggaaccattactcctcacaccaagttttctgcaattgtgtatgtcttgaagaaggaagagggtgggaggcactctcccttcttttccggctaccggcctcagttctacatgaggactaccgatgttactggcaaggtaactgaaattatgaatgacaaggatgaagagtccaagatggttatgccgggcgaccgtgttaagctggtggttgaacttattgtgcctgtggcttgtgaacaaggaatgaggtttgctattagagaaggaggcaaaactgttggagctggtgttatccaatccatcattgagtag

SEQ ID NO: 27802 - protein, 479 aa, Glycine max
MAISWAAATTSKLAYPPHVHFSPSPSSNYLFLKTHKPSATHLSSSFIHPTTILHLAAANTTTRRRSFTVRAARGKFERKKPHVNIGTIGHVDHGKTTLTAALTMALASLGNSAPKKYDEIDAAPEERARGITINTATVEYENENRHYAHVDCPGHADYVKNMITGAAQMDGAILVVSGADGPMPQTKEHILLAKQVGVPNIVVFLNKQDQVDDEELLQLVELEVRELLSKYEFPGDDVPIISGSALLSLEALMANPAIKRGENQWVDKIYELMEAVDDYIPIPQRQTELPFLLAIEDVFTITGRGTVATGRVERGTIRVGETVDIVGVKETRNTTVTGVEMFQKILDEALAGDNVGLLLRGIQKTDIQRGMVLAKPGTITPHTKFSAIVYVLKKEEGGRHSPFFSGYRPQFYMRTTDVTGKVTEIMNDKDEESKMVMPGDRVKLVVELIVPVACEQGMRFAIREGGKTVGAGVIQSIIE

SEQ ID NO: 27803 - DNA, 1365 bp, Glycine max
  CDS (1)..(1365)
atggctacaatcgttctcagaaattgctcttccacttctcggcgcctcttccccttaacctctcaaatccactcttccttcactcgttcccctctctctcctcccgttttcaccaatgactccacatcttcttcttcttcttcttcttccagttccaacccctggtggagatccatggccaccttcaccagaacgaaacctcacgttaatgtcggaactattggacacgtggatcatgggaagaccacgcttaccgcggcaatcaccaaggtgcttgctgatgaagggaaagctaaagctgtggcattcgatgaaatcgataaggctcctgaagagaagaagagaggaatcacgattgcaacggcacatgtggagtatgagactgcaaaacgacattatgctcatgtggactgccccggacacgcggattatgttaaaaatatgattaccggagctgcccagatggatggtggtatacttgttgtatctgcacctgatggaccgatgcctcaaaccaaggagcacattcttcttgctcgccaagttggtgtgccatctctggtgtgttttctgaataaagttgatgcagttgatgatccagagttgttagagcttgtagaaatggagctccgtgagcttctgagcttctacaagttccctggagatgaaatccctatcattagaggttcagcattgtctgccttacagggtacaaatgatgagatcggaagacaggccatcctaaaattaatggatgctgtggatgaatacattcctgaccctgttcgccaacttgacaagcctttcctaatgccaattgaagatgtgttctcaattcagggacgtggaacagttgccactggccgtgttgaacaagggatcattaaagttggtgatgaagtggaggtgttgggtctaatgcagggtggtcctctgaaaacaacagtaactggagttgagatgttcaagaagattttggatcaaggacaggctggtgataacgtgggtcttcttctccgtggtctgaagcgggaagacattcaacgtggtcaggtgattgccaaacctggttctgtaaaaacatccaagaaatttgaggcagagatatatgtactcacaaaggatgagggagggcgacacactgctttcttctctaactacaaacctcagttttacttgaggactgctgatgtcactggaaaagtagagttgcccgaaaatgttaaaatggttatgcctggagacaatgttactgccgtgtttgaattgatttcagcagttccacttgaagcaggacaaagatttgccttgagagaaggtggaagaacagttggtgccggtgtggtgtcaaaagtactgagctag

SEQ ID NO: 27804 - protein, 454 aa, Glycine max
MATIVLRNCSSTSRRLFPLTSQIHSSFTRSPLSPPVFTNDSTSSSSSSSSSSNPWWRSMATFTRTKPHVNVGTIGHVDHGKTTLTAAITKVLADEGKAKAVAFDEIDKAPEEKKRGITIATAHVEYETAKRHYAHVDCPGHADYVKNMITGAAQMDGGILVVSAPDGPMPQTKEHILLARQVGVPSLVCFLNKVDAVDDPELLELVEMELRELLSFYKFPGDEIPIIRGSALSALQGTNDEIGRQAILKLMDAVDEYIPDPVRQLDKPFLMPIEDVFSIQGRGTVATGRVEQGIIKVGDEVEVLGLMQGGPLKTTVTGVEMFKKILDQGQAGDNVGLLLRGLKREDIQRGQVIAKPGSVKTSKKFEAEIYVLTKDEGGRHTAFFSNYKPQFYLRTADVTGKVELPENVKMVMPGDNVTAVFELISAVPLEAGQRFALREGGRTVGAGVVSKVLS

SEQ ID NO: 27805 - DNA, 1440 bp, Glycine max
  CDS (1)..(1440)
atggcaatttcttcagcaacagcttcctccaaactcatactattcccccatgcatcatcatcctcttcccttaattccacacccttccgctcctccaccaccaacacccacaaactaacccctctctcctcctccttcctccaccccaccaccgtcctccgccgcaccccttcttccaccaccaccccgcgtcgcaccttcaccgtccgcgccgcccgcggcaaattcgagcgcaagaagccccacgtgaacatcggcaccatcggccacgtcgaccacggcaagaccacccttaccgccgccctgaccatggctcttgccgccctaggcaacagcgcccccaaaaaatacgacgagatcgacgccgccccggaggaacgcgcccgaggcatcaccatcaacaccgccaccgtggagtacgagaccgagaaccgccactacgcccacgtggactgccccggccacgctgactacatgaaaaacatgatcaccggcgcagcccaaatggacggcgccatattagtcgtctccggcgccgacggccccatgccccaaaccaaagaacacatcctcttagcgaaacaagtcggtgtccccaacatggtcgtgttcttaaacaagcaagaccaagtcgacgacgaagagcttctccaactagtggagctcgaagtccgcgaccttctgagctcctacgaattccccggtgacgatacccccattgtctcgggctccgcgctcttagccctagaagcactcatggccaaccctgcaatcaaacgcggcgacaacgagtgggtcgacaagattttccaactcatggacgaggtcgacaactacattcccatcccccagcgccagaccgacctccccttcctcctcgccgtcgaagacgtcttttccatcaccggccgtggcaccgtcgccactggccgtgtagagcgtggcaccatcaaagtaggggaaactgttgaccttgtaggtttgagagaaacaaggaacacaaccgtcacaggtgtagaaatgttccagaagattctagacgaagccctggctggagacaacgtggggctgttgcttagaggggttcagaagactgacattcagaggggaatggtgttggctaaaccaggcacgattacgccgcacaccaagttctcagcgattgtttatgttttgaagaaagaagaaggtggtaggcattcacctttctttgcagggtataggcctcagttttacatgaggaccaccgatgtgactgggaaggttacgtctatcatgaatgataaggatgaggagtccacgatggtgctgcccggtgaccgtgtcaagatggtggtggagcttattgttcctgtggcttgcgaacagggaatgaggtttgctattagggaaggtgggaagaccgttggtgctggtgttatccaatccattattgagtga

SEQ ID NO: 27806 - protein, 479 aa, Glycine max
MAISSATASSKLILFPHASSSSSLNSTPFRSSTTNTHKLTPLSSSFLHPTTVLRRTPSSTTTPRRTFTVRAARGKFERKKPHVNIGTIGHVDHGKTTLTAALTMALAALGNSAPKKYDEIDAAPEERARGITINTATVEYETENRHYAHVDCPGHADYMKNMITGAAQMDGAILVVSGADGPMPQTKEHILLAKQVGVPNMVVFLNKQDQVDDEELLQLVELEVRDLLSSYEFPGDDTPIVSGSALLALEALMANPAIKRGDNEWVDKIFQLMDEVDNYIPIPQRQTDLPFLLAVEDVFSITGRGTVATGRVERGTIKVGETVDLVGLRETRNTTVTGVEMFQKILDEALAGDNVGLLLRGVQKTDIQRGMVLAKPGTITPHTKFSAIVYVLKKEEGGRHSPFFAGYRPQFYMRTTDVTGKVTSIMNDKDEESTMVLPGDRVKMVVELIVPVACEQGMRFAIREGGKTVGAGVIQSIIE

SEQ ID NO: 27807 - DNA, 1347 bp, Glycine max
  CDS (1)..(1347)
atgggtaaggaaaaggttcacattaacatcgtggtcattggccatgtcgactctgggaagtcaaccaccaccggtcaccttatctacaagctcggaggtattgacaagcgtgtcatcgagagattcgagaaggaagctgctgagatgaataagaggtctttcaagtatgcctgggtgcttgacaagctcaaggctgagcgtgaaagaggaatcaccattgatattgctctgtggaagtttgagaccacaaagtactactgcacagtcattgatgcccctggacatagggatttcatcaagaacatgattactggaacatcccaagctgactgtgctgttcttattattgattccaccactggtggttttgaagctggtatttccaaggatggacagactcgtgagcatgctctccttgcattcactcttggtgtgaggcagatgatttgctgctgcaacaagatggatgccactacacctaagtactccaaggcaaggtacgatgaaattgtcaaggaagtttcttcctacatgaagaaggtcggatacaaccctgacaaaattccttttgttcccatctctggttttgagggagataacatgattgagaggtctacaaaccttgactggtacaagggtccaacccttcttgaggcccttgatcagatcaatgagcccaagaggccatcggacaagcctctccgattgccccttcaggatgtctacaagattggtgggataggaactgtgcctgttggacgggttgaaaccggtgtcttgaaacctggaatggtggttacctttgcaccaactggactaacaactgaagttaagtctgtggagatgcaccatgaaactctcactgaggcccatcctggtgacaatgtgggattcaatgttaagaatgttgctgtcaaggatctcaagcgtggttttgttgcgtctaactctaaggatgaccctgccaaggaggctgctaacttcacatcccaagttatcatcatgaaccaccctggacagattggaaatggctatgcacctgttcttgattgccacacctcccacattgccgtcaagtttgctgaactcttgaccaagattgacaggcgatctggtaaggaacttgagaaggagcccaaattcctgaagaatggtgatgctggtttggtcaagatgattcccaccaagcccatggtggttgaaaccttctccgagtatcctccacttggtcgttttgctgtgagagacatgcgtcaaactgtggctgtgggagtcatcaagagcgtcgagaagaaggaccctactggagctaaggtcaccaaggctgcacagaagaaggccaaatga

SEQ ID NO: 27808 - protein, 448 aa, Glycine max
MGKEKVHINIVVIGHVDSGKSTTTGHLIYKLGGIDKRVIERFEKEAAEMNKRSFKYAWVLDKLKAERERGITIDIALWKFETTKYYCTVIDAPGHRDFIKNMITGTSQADCAVLIIDSTTGGFEAGISKDGQTREHALLAFTLGVRQMICCCNKMDATTPKYSKARYDEIVKEVSSYMKKVGYNPDKIPFVPISGFEGDNMIERSTNLDWYKGPTLLEALDQINEPKRPSDKPLRLPLQDVYKIGGIGTVPVGRVETGVLKPGMVVTFAPTGLTTEVKSVEMHHETLTEAHPGDNVGFNVKNVAVKDLKRGFVASNSKDDPAKEAANFTSQVIIMNHPGQIGNGYAPVLDCHTSHIAVKFAELLTKIDRRSGKELEKEPKFLKNGDAGLVKMIPTKPMVVETFSEYPPLGRFAVRDMRQTVAVGVIKSVEKKDPTGAKVTKAAQKKAK

SEQ ID NO: 27809 - DNA, 1440 bp, Glycine max
  CDS (1)..(1440)
atggcaatttcttcagcaacagcttcctccaaactcatactattcccccatgcatcatcatcctcttcccttaattccacacccttccgctcctccaccaccaacacccacaaactaacccctctctcctcctccttcctccaccccaccaccgtcctccgccgcaccccttcttccaccaccaccccgcgtcgcaccttcaccgtccgcgccgcccgcggcaaattcgagcgcaagaagccccacgtgaacatcggcaccatcggccacgtcgaccacggcaagaccacccttaccgccgccctgaccatggctcttgccgccctaggcaacagcgcccccaaaaaatacgacgagatcgacgccgccccggaggaacgcgcccgaggcatcaccatcaacaccgccaccgtggagtacgagaccgagaaccgccactacgcccacgtggactgccccggccacgctgactacatgaaaaacatgatcaccggcgcagcccaaatggacggcgccatattagtcgtctccggcgccgacggccccatgccccaaaccaaagaacacatcctcttagcgaaacaagtcggtgtccccaacatggtcgtgttcttaaacaagcaagaccaagtcgacgacgaagagcttctccaactagtggagctcgaagtccgcgaccttctgagctcctacgaattccccggtgacgatacccccattgtctcgggctccgcgctcttagccctagaagcactcatggccaaccctgcaatcaaacgcggcgacaacgagtgggtcgacaagattttccaactcatggacgaggtcgacaactacattcccatcccccagcgccagaccgacctccccttcctcctcgccgtcgaagacgtcttttccatcaccggccgtggcaccgtcgccactggccgtgtagagcgtggcaccatcaaagtaggggaaactgttgaccttgtaggtttgagagaaacaaggaacacaaccgtcacaggtgtagaaatgttccagaagattctagacgaagccctggctggagacaacgtggggctgttgcttagaggggttcagaagactgacattcagaggggaatggtgttggctaaaccaggcacgattacgccgcacaccaagttctcagcgattgtttatgttttgaagaaagaacaaggtggtaggcattcacctttctttgcagggtataggcctcagttttacatgaggaccaccgatgtgactgggaaggttacgtctatcatgaatgataaggatgaggagtccacgatggtgctgcccggtgaccgtgtcaagatggtggtggagcttattgttcctgtggcttgcgaacagggaatgaggtttgctattagggaaggtgggaagaccgttggtgctggtgttatccaatccattattgagtga

SEQ ID NO: 27810 - protein, 479 aa, Glycine max
MAISSATASSKLILFPHASSSSSLNSTPFRSSTTNTHKLTPLSSSFLHPTTVLRRTPSSTTTPRRTFTVRAARGKFERKKPHVNIGTIGHVDHGKTTLTAALTMALAALGNSAPKKYDEIDAAPEERARGITINTATVEYETENRHYAHVDCPGHADYMKNMITGAAQMDGAILVVSGADGPMPQTKEHILLAKQVGVPNMVVFLNKQDQVDDEELLQLVELEVRDLLSSYEFPGDDTPIVSGSALLALEALMANPAIKRGDNEWVDKIFQLMDEVDNYIPIPQRQTDLPFLLAVEDVFSITGRGTVATGRVERGTIKVGETVDLVGLRETRNTTVTGVEMFQKILDEALAGDNVGLLLRGVQKTDIQRGMVLAKPGTITPHTKFSAIVYVLKKEQGGRHSPFFAGYRPQFYMRTTDVTGKVTSIMNDKDEESTMVLPGDRVKMVVELIVPVACEQGMRFAIREGGKTVGAGVIQSIIE

SEQ ID NO: 27811 - DNA, 1344 bp, Glycine max
  CDS (1)..(1344)
atgggtaaggaaaaggttcacatcactattgcggttattggccatgttgactctgggaagtccactaccactggccacctgatctacaagcttggaggcattgacaagcgtgttattgagagatttgagaaggaagctgctgagatgaacaagaggtctttcaagtatgcctgggtgcttgataagcttaaggctgagcgtgaaagaggaatcacaattgatattgccttgtggaagtttgaaaccaccaagtactattgcacagtcattgatgcccctggacacagggatttcatcaagaacatgatcactgggacatcccaagctgactgtgctgttcttatcattgattccactactggtggttttgaagctggaatttcaaaggatggacagactcgtgaacatgctctgctttcattcacccttggtgtgaaacagatgatttgttgctgtaacaagatggatgctactacaccaaagtactccaaggccaggtatgatgaaattgtgaaggaagtttcttcctatttgaagaaagtaggatacaaccctgacaagattccttttgttcctatatctggttttgagggagacaacatgattgagaggtccacaaaccttgactggtacaagggtcctactctgctagatgcacttgaccagatctctgagcccaagaggccttctgacaagcccctcaggctaccccttcaggatgtgtacaagattggaggaattggaactgtgcctgtgggacgggttgagactggtgtcttgaagcctggaatggtggtgacttttgcaccaactggactgacaaccgaagttaagtctgtggaaatgcaccatgaagctctcacagaggctcttcccggtgataatgttggattcaatgttaagaatgttgctgttaaggatctcaagcgtggttatgttgcctcgaactcaaaggatgatcctgccaaggaggctgctaacttcactgcccaggttatcatcatgaaccatcctggtcagattggaaatggctatgcccctgttcttgactgccacacttcccacattgctgtcaagtttgctgaactcatgaccaagattgacaggcgatctggcaaagagcttgagaaggaacccaagtttttgaagaatggtgatgctggttttgttaagatgattccgaccaaacccatggtgggtgaaactttctctgagtaccccccacttggtcgctttgctgtcagggatatgcgtcaaactgttgctgtgggagtcatcaagaacgtggagaagaaggatcctactggagccaaggtcaccaaggctgcccaaaagaagaagtga

SEQ ID NO: 27812 - protein, 447 aa, Glycine max
MGKEKVHITIAVIGHVDSGKSTTTGHLIYKLGGIDKRVIERFEKEAAEMNKRSFKYAWVLDKLKAERERGITIDIALWKFETTKYYCTVIDAPGHRDFIKNMITGTSQADCAVLIIDSTTGGFEAGISKDGQTREHALLSFTLGVKQMICCCNKMDATTPKYSKARYDEIVKEVSSYLKKVGYNPDKIPFVPISGFEGDNMIERSTNLDWYKGPTLLDALDQISEPKRPSDKPLRLPLQDVYKIGGIGTVPVGRVETGVLKPGMVVTFAPTGLTTEVKSVEMHHEALTEALPGDNVGFNVKNVAVKDLKRGYVASNSKDDPAKEAANFTAQVIIMNHPGQIGNGYAPVLDCHTSHIAVKFAELMTKIDRRSGKELEKEPKFLKNGDAGFVKMIPTKPMVGETFSEYPPLGRFAVRDMRQTVAVGVIKNVEKKDPTGAKVTKAAQKKK

SEQ ID NO: 27813 - DNA, 1344 bp, Glycine max
  CDS (1)..(1344)
atgggtaaggaaaaggttcacatcagtattgtggtcattggccatgtcgactctgggaaatccactaccactggtcacctgatttacaagcttggaggcattgacaagcgtgttattgagaggtttgagaaggaagctgctgagatgaacaagaggtctttcaagtatgcctgggtgctggacaaacttaaggctgagcgtgaaagaggaatcaccattgatattgctttgtggaagtttgaaacaacaaagtattattgcacagttattgatgcgcctggacatagggatttcattaagaatatgattactgggacatcccaagctgactgtgctgttcttatcattgattcgaccactggtggttttgaagctggtatttccaaggatggacagactcgtgaacatgctctgctttcattcacccttggtgtgaaacagatgatttgctgctgtaacaaaatggatgctactacacccaagtattccaaggccaggtatgatgaaattgtgaaggaagtctcttcctacttgaagaaagtaggatacaaccctgacaagattccttttgttcctatctctggttttgagggagacaacatgattgagaggtccacaaaccttgactggtacaagggtccaactctgcttgatgcacttgaccagattagtgagcccaagaggccctctgacaagcccctcaggcttccccttcaggatgtgtacaagattggaggtattggaactgtgccagtgggacgtgttgagaccggtgtcttgaagcctggaatggtggtgacttttgcaccaactggactgacaactgaagtcaagtctgtggagatgcaccatgaatctcttacagaggcacatcctggtgacaatgtgggattcaatgttaagaatgttgctgttaaggatttgaagcgtggttatgttgcctcaaactcaaaggatgaccctgcaaaggaggctgctaacttcacagcccaagtcatcatcatgaaccaccctggtcagattggaaatggctatgcccctgtcctcgactgccacacttctcacattgctgtcaagtttgctgaactcatgaccaagattgacaggcgatccggcaaagagcttgagaaggagcccaagtttttgaagaacggtgatgctggttttgttaagatgattccaaccaaacccatggttgttgaaactttctccgagtatcctccacttggtaggtttgctgttagggacatgcgtcaaactgttgctgtgggagtcatcaagaacgttgagaagaaggatcctaccggagccaaggtcaccaaggctgcccagaagaagaagtga

SEQ ID NO: 27814 - protein, 447 aa, Glycine max
MGKEKVHISIVVIGHVDSGKSTTTGHLIYKLGGIDKRVIERFEKEAAEMNKRSFKYAWVLDKLKAERERGITIDIALWKFETTKYYCTVIDAPGHRDFIKNMITGTSQADCAVLIIDSTTGGFEAGISKDGQTREHALLSFTLGVKQMICCCNKMDATTPKYSKARYDEIVKEVSSYLKKVGYNPDKIPFVPISGFEGDNMIERSTNLDWYKGPTLLDALDQISEPKRPSDKPLRLPLQDVYKIGGIGTVPVGRVETGVLKPGMVVTFAPTGLTTEVKSVEMHHESLTEAHPGDNVGFNVKNVAVKDLKRGYVASNSKDDPAKEAANFTAQVIIMNHPGQIGNGYAPVLDCHTSHIAVKFAELMTKIDRRSGKELEKEPKFLKNGDAGFVKMIPTKPMVVETFSEYPPLGRFAVRDMRQTVAVGVIKNVEKKDPTGAKVTKAAQKKK

SEQ ID NO: 27815 - DNA, 1443 bp, Glycine max
  CDS (1)..(1443)
atggcagtttcttctgcatctgcttcctccaaacttatactattcccccatgcttcatcttcttcccttatctccacacccttccgttcctccaccaacacccacaaactatcccctctctcctcctccttcctccaccccaccaccgtcctccgccgcaccccctcctccaccactaccaccacctccccgcgccgacccctcaccgtccgcgccgcccgcggcaagttcgagcgcaagaagccccacgtgaacatcggcaccatcggccacgtggaccacggcaagaccaccctgaccgccgccctcaccatggcccttgccgccctcggcaacagcgccccgaagaagtacgacgagatcgacgccgccccggaggaacgcgcccgcggcatcaccatcaacaccgccaccgtcgagtacgagaccgagaaccgccactacgcccacgtggactgccccggccacgccgactacgtcaagaacatgatcaccggcgccgcccagatggacggcgccatccttgtcgtctccggcgccgacggccccatgccccaaaccaaagaacacatcctcttagccaagcaagtcggtgtccccaacatggtcgtcttcctcaacaagcaagaccaagtcgacgacgaagagcttctccaactagtcgaactcgaagttcgcgaccttcttacctcctacgaattccccggtgacgatacccccatcgtctccggctccgcactcttagccctagaagcccttatggcgaaccctgccatcaaacgcggcgacaacgagtgggtcgacaaaatctacaaactcatggacgaagtcgacgactacattcccatcccccagcgccagaccgacctcccattcctcctcgccgtcgaagacgttttctccatcaccggccgtgggaccgtcgccaccggccgcgtagagcgtggcaccgtcaaagtaggggaaactgttgaccttgtaggattgagagagacaagaaacacaacggtcacaggtgtggaaatgttccagaagattctagacgaagccctcgccggggacaacgtggggctgttgctgagaggggttcaaaagacggacatccagagagggatggtgttggcgaagcctggcacgattacgccgcacaccaagttctcagcgattgtgtatgttttgaagaaggaagaaggtgggagacattcacctttctttgcagggtataggcctcagttttacatgaggaccaccgatgtgactgggaaggttacggctatcaccaacgatagggatgaagagtcgcagatggtgatgcccggtgaccgtgtgaagatggtggtggagctcattgtgcctgtggcttgcgaacagggaatgaggtttgctattagggaaggtggcaagaccgttggtgcaggtgttatccaatccatcattgagtga

SEQ ID NO: 27816 - protein, 480 aa, Glycine max
MAVSSASASSKLILFPHASSSSLISTPFRSSTNTHKLSPLSSSFLHPTTVLRRTPSSTTTTTSPRRPLTVRAARGKFERKKPHVNIGTIGHVDHGKTTLTAALTMALAALGNSAPKKYDEIDAAPEERARGITINTATVEYETENRHYAHVDCPGHADYVKNMITGAAQMDGAILVVSGADGPMPQTKEHILLAKQVGVPNMVVFLNKQDQVDDEELLQLVELEVRDLLTSYEFPGDDTPIVSGSALLALEALMANPAIKRGDNEWVDKIYKLMDEVDDYIPIPQRQTDLPFLLAVEDVFSITGRGTVATGRVERGTVKVGETVDLVGLRETRNTTVTGVEMFQKILDEALAGDNVGLLLRGVQKTDIQRGMVLAKPGTITPHTKFSAIVYVLKKEEGGRHSPFFAGYRPQFYMRTTDVTGKVTAITNDRDEESQMVMPGDRVKMVVELIVPVACEQGMRFAIREGGKTVGAGVIQSIIE

SEQ ID NO: 27817 - DNA, 1344 bp, Glycine max
  CDS (1)..(1344)
atgggtaaggaaaaggttcacatcaacattgtcgtcattggacatgtcgactctgggaagtcaactaccactggtcacttgatctacaagcttggaggtattgacaagcgtgtgattgagaggttcgagaaggaggctgccgagatgaacaagaggtcattcaagtatgcctgggtgctcgacaagctcaaagctgagcgtgaaagaggaattaccattgatattgctttgtggaagtttgaaaccaccaagtactactgcacggtcattgatgctcctggacatcgtgactttatcaagaacatgattactggtacctcccaggccgactgtgctgtccttattattgactccaccactggtggttttgaagctggtatttctaaggatggacagacccgtgagcatgctcttcttgctttcaccctaggtgtgaagcagatgatctgttgctgtaacaagatggatgccactacccccaagtactctaaggctaggtatgatgaaatcgtgaaggaagtctcttcttacttgaagaaggttggttacaacccagacaagattccctttgttcccatctctggttttgagggtgacaacatgattgagaggtccaccaaccttgactggtacaagggaccaactctccttgaggctcttgaccaaatcaatgagcccaagaggccctccgacaagcctctaaggcttccattgcaggatgtctacaagattggtggtattggtactgtgccagtgggacgtgtagagactggggttgtgaagcctggtatggtggtgacttttggtcccactgggctgacaactgaggttaagtctgttgagatgcaccatgaggctctcacagaggctcttccaggtgacaatgttggatttaatgtgaagaatgttgcagtcaaggatctcaagcgtggttttgttgcatccaactccaaggacgaccctgccaaggaagctgccaacttcacatcccaagtcattatcatgaaccatcctggccagattggtaatggatacgcaccagtccttgactgccacacttctcacattgctgtgaagttttctgaaatcttgaccaagattgacaggcgatctggtaaggagcttgagaaggagcccaaatttttgaagaatggtgatgctggtatggttaagatggttccaaccaagcccatggtggttgaaactttctctgagtatcctccccttggtcgttttgctgtgagggacatgcgtcagaccgtagctgttggagtcatcaagagtgttgagaagaaagaccccaccggagccaaggtcacaaaggctgccgccaagaagaagtga

SEQ ID NO: 27818 - protein, 447 aa, Glycine max
MGKEKVHINIVVIGHVDSGKSTTTGHLIYKLGGIDKRVIERFEKEAAEMNKRSFKYAWVLDKLKAERERGITIDIALWKFETTKYYCTVIDAPGHRDFIKNMITGTSQADCAVLIIDSTTGGFEAGISKDGQTREHALLAFTLGVKQMICCCNKMDATTPKYSKARYDEIVKEVSSYLKKVGYNPDKIPFVPISGFEGDNMIERSTNLDWYKGPTLLEALDQINEPKRPSDKPLRLPLQDVYKIGGIGTVPVGRVETGVVKPGMVVTFGPTGLTTEVKSVEMHHEALTEALPGDNVGFNVKNVAVKDLKRGFVASNSKDDPAKEAANFTSQVIIMNHPGQIGNGYAPVLDCHTSHIAVKFSEILTKIDRRSGKELEKEPKFLKNGDAGMVKMVPTKPMVVETFSEYPPLGRFAVRDMRQTVAVGVIKSVEKKDPTGAKVTKAAAKKK

SEQ ID NO: 27819 - DNA, 1365 bp, Glycine max
  CDS (1)..(1365)
atggctactctcgttctcaggaattgctcttccacttctcggcgcctcttccctttaacctctcaaatccactcttccttctctcgttcccctctctcccctcccgttttcaccaatgactccacatcttcttcttcttcttcttcttccagttccaacccctggtggagatccatggccaccttcaccagaacgaaacctcacgttaatgtcggaactattggacacgtggatcatgggaagaccacgcttaccgcggcaatcaccaaggtgcttgctgatgaagggaaggctaaggctgtggcattcgatgaaatcgataaggctcctgaagagaagaagagaggaatcacgattgcaacggcacatgtggagtatgagactgcaaaacgacattatgctcatgtggactgccccggacacgcggattatgttaaaaatatgattaccggagctgcccagatggatggtggtatacttgttgtatctgcacctgatggaccgatgcctcaaaccaaggagcacattcttcttgctcgccaagttggtgtgccatctctggtgtgttttctgaataaagttgatgcagttgatgatccagagttgttagagcttgtagaaatggagctccgtgagcttctgagcttctacaagttccctggagatgaaatccctatcattagaggttcagcattgtctgccttacagggtacaaatgatgagatcggaagacaggccatcctaaaattaatggatgctgtggatgaatacattcctgaccctgttcgccaacttgacaagcctttcctaatgccaattgaagatgtgttctcaattcagggacgtggaacagttgccactggccgtgttgaacaagggatcattaaagttggtgatgaagtggaggtgttgggtctaatgcagggtggtcctctgaaaacaacagtaactggagttgagatgttcaagaagattttggatcaaggacaggctggtgataacgtgggtcttcttctccgtggtctgaagcgggaagacattcaacgtggtcaggtgattgccaaacctggttctgtaaaaacatccaagaaatttgaggcagagatatatgtactcacaaaggatgagggagggcgacacactgctttcttctctaactacaaacctcagttttacttgaggactgctgatgtcactggaaaagtagagttgcccgaaaatgttaaaatggttatgcctggagacaatgttactgccgtgtttgaattgatttcagcagttccacttgaagcaggacaaagatttgccttgagagaaggtggaagaacagttggtgccggtgtggtgtcaaaagtactgagctag

SEQ ID NO: 27820 - protein, 454 aa, Glycine max
MATLVLRNCSSTSRRLFPLTSQIHSSFSRSPLSPPVFTNDSTSSSSSSSSSSNPWWRSMATFTRTKPHVNVGTIGHVDHGKTTLTAAITKVLADEGKAKAVAFDEIDKAPEEKKRGITIATAHVEYETAKRHYAHVDCPGHADYVKNMITGAAQMDGGILVVSAPDGPMPQTKEHILLARQVGVPSLVCFLNKVDAVDDPELLELVEMELRELLSFYKFPGDEIPIIRGSALSALQGTNDEIGRQAILKLMDAVDEYIPDPVRQLDKPFLMPIEDVFSIQGRGTVATGRVEQGIIKVGDEVEVLGLMQGGPLKTTVTGVEMFKKILDQGQAGDNVGLLLRGLKREDIQRGQVIAKPGSVKTSKKFEAEIYVLTKDEGGRHTAFFSNYKPQFYLRTADVTGKVELPENVKMVMPGDNVTAVFELISAVPLEAGQRFALREGGRTVGAGVVSKVLS

SEQ ID NO: 27821 - DNA, 1344 bp, Glycine max
  CDS (1)..(1344)
atgggtaaggaaaagactcacatcaacattgtcgtcattggacatgtcgactctgggaagtcaactaccactggtcatttgatctacaagcttggaggtattgacaagcgtgtgattgagaggttcgagaaggaggctgctgagatgaacaagaggtcattcaagtatgcctgggtgcttgacaagctcaaggctgagcgcgaaagaggaattaccattgatattgctttgtggaagtttgaaaccaccaagtactactgcacagtcatcgatgcccccggacatcgtgactttatcaagaacatgattactggtacctcccaggctgattgtgctgtccttatcattgactccaccactggtggttttgaagctggtatttctaaggatggacagactcgtgagcatgctcttcttgctttcacccttggtgtgaagcagatgatctgctgctgtaacaagatggatgccactaccccgaagtactctaaggctaggtatgatgaaattgtgaaggaagtctcttcctacttgaagaaggttggttacaacccagacaagattccatttgtgcccatctctggtttcgagggtgacaacatgattgagaggtccaccaaccttgactggtacaagggaccaactctccttgaggctcttgaccaaatcaatgagcccaagaggccctcagacaagccactcaggcttccattgcaggatgtctacaaaattggtggtattggtaccgtgccagtgggacgtgttgagactggtgtcgtgaagcccggtatggtggtgacttttggtcccactgggctgacaactgaggttaagtctgttgagatgcaccatgaggctctcacagaggctcttccaggtgacaatgttggctttaatgtgaagaatgttgcagtcaaggatctcaagcgtggttttgttgcatccaactccaaggatgaccctgccaaggaagctgccaacttcacatctcaagtcattatcatgaaccaccctggccagattggaaatggatacgcaccggtgcttgattgccacacttctcacattgctgtcaagttttctgaaatcttgaccaagattgacaggcgatctggtaaggagcttgagaaggagcccaaatttttgaagaatggtgatgcaggtatggttaagatgattccaaccaagcccatggtggttgaaactttctctgagtatcctccccttggtcgttttgctgtgagggacatgcgtcaaactgtggctgtcggagtcatcaagagtgttgagaagaaagaccccaccggagccaaggtcaccaaggccgctgccaagaagaagtga

SEQ ID NO: 27822 - protein, 447 aa, Glycine max
MGKEKTHINIVVIGHVDSGKSTTTGHLIYKLGGIDKRVIERFEKEAAEMNKRSFKYAWVLDKLKAERERGITIDIALWKFETTKYYCTVIDAPGHRDFIKNMITGTSQADCAVLIIDSTTGGFEAGISKDGQTREHALLAFTLGVKQMICCCNKMDATTPKYSKARYDEIVKEVSSYLKKVGYNPDKIPFVPISGFEGDNMIERSTNLDWYKGPTLLEALDQINEPKRPSDKPLRLPLQDVYKIGGIGTVPVGRVETGVVKPGMVVTFGPTGLTTEVKSVEMHHEALTEALPGDNVGFNVKNVAVKDLKRGFVASNSKDDPAKEAANFTSQVIIMNHPGQIGNGYAPVLDCHTSHIAVKFSEILTKIDRRSGKELEKEPKFLKNGDAGMVKMIPTKPMVVETFSEYPPLGRFAVRDMRQTVAVGVIKSVEKKDPTGAKVTKAAAKKK

SEQ ID NO: 27823 - DNA, 1350 bp, Oryza sativa
  CDS (1)..(1350)
atgggtaaggagaagacgcacatcaacattgtggtcattggccacgtcgactccggaattcccgggtcgaccaccacgggccatctgatctacaagcttggaggtatcgacaagcgtgtgatcgagaggttcgagaaggaagccgctgagatgaacaagaggtccttcaagtacgcgtgggtgctcgacaagctcaaggccgagcgtgagagaggtatcaccatcgatattgccctgtggaagttcgagaccaccaagtactactgcacggtcatcgatgcccctggtcaccgtgacttcatcaagaacatgatcacgggtacctcccaggctgactgtgccgtgctcatcattgactccaccactggtggttttgaggctggtatctccaaggatggccagacccgtgagcacgctcttcttgctttcactcttggagtgaagcagatgatctgctgctgcaacaagatggatgccaccactcccaagtactccaaggcccgttatgatgaaatcgtgaaggaagtctcatcctacctgaagaaggtcggctacaaccctgacaagattcccttcgttcccatctctgggtttgagggtgacaacatgattgagaggtccaccaaccttgactggtacaagggccccaccttgcttgaggctcttgaccagatcaacgagcccaagaggccatcagacaagcccctgcgtcttccccttcaggacgtgtacaagatcggtggtattggcaccgtgcctgtgggtcgtgttgagactggagtcctcaagcctggtatggtggtgacctttggtcccagcggcctgaccactgaggtcaagtcggttgagatgcaccacgaggctctccaggaggctcttcctggtgacaacgtcgggttcaacgtgaagaacgttgcggtgaaggatctgaagcgtgggtacgtggcctccaactccaaggatgaccctgccaaggaggctgccagcttcacctcccaggtgatcatcatgaaccaccctgggcagatcggcaacggctatgctccagtgctggactgccacacctcccacattgccgtcaagtttgctgagctggtgaccaagatcgacagacgatctggcaaggagctggagaaggagcccaagttcctcaagaacggtgatgctggtatggttaagatgattcccaccaagcccatggttgtggagaccttctctgagtaccctcctcttggtcgttttgccgtgcgtgacatgaggcaaacggtggctgttggcgtcatcaagaacgtggagaagaaggacccaaccggtgccaaggtgaccaaggctgccgccaagaagaaatga

SEQ ID NO: 27824 - protein, 449 aa, Oryza sativa
MGKEKTHINIVVIGHVDSGIPGSTTTGHLIYKLGGIDKRVIERFEKEAAEMNKRSFKYAWVLDKLKAERERGITIDIALWKFETTKYYCTVIDAPGHRDFIKNMITGTSQADCAVLIIDSTTGGFEAGISKDGQTREHALLAFTLGVKQMICCCNKMDATTPKYSKARYDEIVKEVSSYLKKVGYNPDKIPFVPISGFEGDNMIERSTNLDWYKGPTLLEALDQINEPKRPSDKPLRLPLQDVYKIGGIGTVPVGRVETGVLKPGMVVTFGPSGLTTEVKSVEMHHEALQEALPGDNVGFNVKNVAVKDLKRGYVASNSKDDPAKEAASFTSQVIIMNHPGQIGNGYAPVLDCHTSHIAVKFAELVTKIDRRSGKELEKEPKFLKNGDAGMVKMIPTKPMVVETFSEYPPLGRFAVRDMRQTVAVGVIKNVEKKDPTGAKVTKAAAKKK

SEQ ID NO: 27825 - DNA, 1359 bp, Zea mays
  CDS (1)..(1359)
atggcttccgccgcggtgctccggaacgccggctcccggcgcctcttctcctaccctactctccgcgccgctgcgatatatgtaccttctgcgctacccgatgcgcccgcggcggcggcagcgccggcccagccgccaccgatggccgggaccatctgggcgaggtccatggccaccttcacgcgcacgaagccccatgtgaacgtcggcaccattgggcacgtcgatcacggcaaaaccactctcactgctgccattaccaaggtcctggccgaggcagggaaggccaaagccgttgctttcgacgagatcgacaaggctccggaggagaaagccagaggaatcaccattgcgacagctcacgtcgagtatgagacggctaaaaggcattatgctcacgttgattgtccaggtcacgcagattatgtcaagaacatgatcactggagctgctcaaatggatggtggtattcttgtcgtgtcagctcctgatggcccgatgccacaaactaaggagcatattcttcttgcccgtcaggttggtgtaccttcccttgtgtgcttcttaaacaaagttgatgctgttgatgatccagagcttctggaacttgtagagatggagcttcgggagctcctcagtttctacaagttccccggtgatgagattccgatcatccgtgggtctgcgttgtctgctttgcaagggaacaatgatgagataggaaagaatgcaattttgaaattaatggacgcagttgatgagtacatccctgatcctgtgaggcagcttgataagcctttcttgatgccgatagaagatgtgttttctattcagggtcgtggaactgttgttactgggcgtgttgaacagggaacaatcaaaactggtgaagatgttgagatcttgggtttggcacagactggtcccttgaagactacagttactggtgttgagatgttcaaaaagatactggaccatggagaggctggtgacaacgttggccttcttctccgtggtcttaagcgtggtgatgttgagcgtggccaggtggtgtgcaaacctggtagtctgaagacatgcaaaaagttcgaggcggaaatatatgtcctgacaaaggatgaaggtggccggcacactgcctttgtcacaaattacagcccccaattctacttcaggacagctgatgtcactggaagggttgagctgcttggggagatgaagatggttttgcccggtgacaatgtaactgcgaattttgagttgatatcacctgttcctcttgaacctgggcaaagatttgcgattagggaaggaggaagaacggtcggtgctggagtcgtctccaaagttcttagctga

SEQ ID NO: 27826 - protein, 452 aa, Zea mays
MASAAVLRNAGSRRLFSYPTLRAAAIYVPSALPDAPAAAAAPAQPPPMAGTIWARSMATFTRTKPHVNVGTIGHVDHGKTTLTAAITKVLAEAGKAKAVAFDEIDKAPEEKARGITIATAHVEYETAKRHYAHVDCPGHADYVKNMITGAAQMDGGILVVSAPDGPMPQTKEHILLARQVGVPSLVCFLNKVDAVDDPELLELVEMELRELLSFYKFPGDEIPIIRGSALSALQGNNDEIGKNAILKLMDAVDEYIPDPVRQLDKPFLMPIEDVFSIQGRGTVVTGRVEQGTIKTGEDVEILGLAQTGPLKTTVTGVEMFKKILDHGEAGDNVGLLLRGLKRGDVERGQVVCKPGSLKTCKKFEAEIYVLTKDEGGRHTAFVTNYSPQFYFRTADVTGRVELLGEMKMVLPGDNVTANFELISPVPLEPGQRFAIREGGRTVGAGVVSKVLS

SEQ ID NO: 27827 - DNA, 1344 bp, Zea mays
  CDS (1)..(1344)
atgggtaaggagaagtcccacatcaacattgtggttattggccatgtcgactctggcaagtcaaccaccaccggccacctgatctacaagcttggaggcattgacaagcgtgtgattgagaggttcgagaaggaagccgctgaaatgaacaaacggtccttcaagtacgcttgggtgcttgacaagctcaaggctgagcgtgagagaggtatcaccattgatatcgctctgtggaagtttgagaccaccaagtactactgcactgtcattgatgcccctggacatcgcgacttcatcaagaacatgatcacgggtacctcccaggctgactgtgctgtcctgatcattgactccaccactggtggttttgaggccggtatctctaaggatggccagacccgtgagcatgctctccttgctttcacccttggggtcaagcagatgatttgctgctgcaacaagatggatgcgaccactcccaagtattccaaggcccgttacgatgagattgtgaaggaagtttcatcctacctcaagaaggttggatacaaccctgacaagattgcctttgtccctatctctggttttgagggtgacaacatgattgagaggtccaccaaccttgactggtacaagggtccaaccctgcttgaggctcttgaccagatcaccgagcccaagaggccttcagacaagcccctgcgtctgcccctccaggatgtgtacaagattggtggtattggaactgttccggttggtcgtgtggagactggtgtcatcaagcctggaatggttgtcaccttcggtccaactggcctgaccactgaggtgaagtctgttgagatgcaccacgaggctctccaggaggcccttcctggtgacaacgttggcttcaatgtgaagaacgttgctgtgaaggatctcaaacgtgggtacgtggcctccaactctaaggatgaccctgccaaggaggctgctagcttcacctcccaagtcatcatcatgaaccaccctgggcagattggcaatggctatgccccagtgctggactgccacacctcccacattgctgtcaagtttgctgagctcataaccaagatcgataggcggtctggcaaggagcttgagaaggagcccaagttcctgaagaatggtgatgccggtatggtgaagatgattcccactaagcccatggtggttgagaccttctctcagtatcctcctctgggtcgttttgctgtccgtgacatgaggcagacggttgctgttggagtcatcaagagcgtggagaagaaggacccaactggtgccaaggtgaccaaggctgcaataaagaagaaatga

SEQ ID NO: 27828 - protein, 447 aa, Zea mays
MGKEKSHINIVVIGHVDSGKSTTTGHLIYKLGGIDKRVIERFEKEAAEMNKRSFKYAWVLDKLKAERERGITIDIALWKFETTKYYCTVIDAPGHRDFIKNMITGTSQADCAVLIIDSTTGGFEAGISKDGQTREHALLAFTLGVKQMICCCNKMDATTPKYSKARYDEIVKEVSSYLKKVGYNPDKIAFVPISGFEGDNMIERSTNLDWYKGPTLLEALDQITEPKRPSDKPLRLPLQDVYKIGGIGTVPVGRVETGVIKPGMVVTFGPTGLTTEVKSVEMHHEALQEALPGDNVGFNVKNVAVKDLKRGYVASNSKDDPAKEAASFTSQVIIMNHPGQIGNGYAPVLDCHTSHIAVKFAELITKIDRRSGKELEKEPKFLKNGDAGMVKMIPTKPMVVETFSQYPPLGRFAVRDMRQTVAVGVIKSVEKKDPTGAKVTKAAIKKK

SEQ ID NO: 27829 - DNA, 1344 bp, Zea mays
  CDS (1)..(1344)
atggggaaggagaaggttcacatcaacattgtggtcattggccatgtcgactccggcaagtccacaaccaccggccacctcatctacaagcttggaggcattgacaagcgtgtcatcgagaggtttgagaaggaggctgccgagatgaacaagaggtccttcaagtacgcctgggtccttgacaagctcaaggccgagcgcgagaggggcatcaccattgacattgccctgtggaagtttgagacaaccaagtactactgcaccgtgattgatgcccctgggcaccgtgacttcatcaagaacatgatcaccggcacctcccaggctgattgtgcggtgctcatcattgactccaccactggtggcttcgaggctggtatctccaaggacggccagacccgtgagcatgcgctccttgctttcactcttggtgtgaggcagatgatctgctgctgcaacaagatggatgccactacccccaagtactccaaggctcggtacgacgagatcgtcaaggaagtgggttcctacctgaagaaggtggggtacaacccggacaagatccccttcgtgcccatctctgggttcgagggtgacaacatgatcgagaggtcgacgaacctggactggtacaagggccccaccctccttgaggcgctggaccagatcaacgagcccaagcggccctcggacaagcccctgcggcttcctctgcaggacgtgtacaagatcggcggcatcggcaccgtcccggtgggccgcgtggaaactgggctcctgaagcccggcatggtggtcacctttgcgcccacgggcctgacgacggaggtcaagtcggtggagatgcaccacgagacgatgcaggaggcgctgcccggcgacaacgtcggcttcaacgtcaagaacgtggcggtcaaggacctgaagcgcggttacgtggcctccaactccaaggacgaccccgccaaggaggctgccagcttcaccgcgcaggtgatcatcatgaaccacccggggcagatcggcaacggctacgccccggtgctggactgccacacgtcccacatcgccgtgaagttctcggagctgctcaccaagattgaccggcggtcgggcaaggagctggagagcgcccccaagtttctcaagaacggtgacgccggcttcgtcaagatgatccccacgaagcccatggtggtggagactttctccgagtatcctccactggggcgcttcgcggttcgcgacatgaggcagacggttgcagtcggcgtgataaagagcgtggagaagaaggacccaacgggagccaaggtgaccaaggcggctgccaagaagaaatga

SEQ ID NO: 27830 - protein, 447 aa, Zea mays
MGKEKVHINIVVIGHVDSGKSTTTGHLIYKLGGIDKRVIERFEKEAAEMNKRSFKYAWVLDKLKAERERGITIDIALWKFETTKYYCTVIDAPGHRDFIKNMITGTSQADCAVLIIDSTTGGFEAGISKDGQTREHALLAFTLGVRQMICCCNKMDATTPKYSKARYDEIVKEVGSYLKKVGYNPDKIPFVPISGFEGDNMIERSTNLDWYKGPTLLEALDQINEPKRPSDKPLRLPLQDVYKIGGIGTVPVGRVETGLLKPGMVVTFAPTGLTTEVKSVEMHHETMQEALPGDNVGFNVKNVAVKDLKRGYVASNSKDDPAKEAASFTAQVIIMNHPGQIGNGYAPVLDCHTSHIAVKFSELLTKIDRRSGKELESAPKFLKNGDAGFVKMIPTKPMVVETFSEYPPLGRFAVRDMRQTVAVGVIKSVEKKDPTGAKVTKAAAKKK

SEQ ID NO: 27831 - DNA, 1344 bp, Zea mays
  CDS (1)..(1344)
atgggcaaggagaagactcacatcaacattgtggtcattggacatgtcgactctggcaagtcgaccaccactggccacctgatctacaagctcggcggtattgacaagcgtgtgattgagaggttcgagaaagaggccgcggagatgaacaagcggtcattcaagtatgcctgggtgcttgacaagctcaaggccgagcgtgagagaggtatcacaattgatattgctttgtggaagttcgagaccaccaagtactactgcactgtcattgatgcccctggacaccgtgacttcatcaagaatatgattactggcacttcccaagctgactgcgctgttcttatcattgactccactactggtggttttgaggctggtatctccaaggatggacagacccgcgagcatgctctccttgctttcacgcttggagtgaagcagatgatttgctgttgcaacaagatggatgccaccacacccaagtactccaaggcccgttatgatgagattgtgaaggaagtctcttcctacctgaagaaggttggatacaaccctgacaagatccactttgttcccatctctggtttcgaaggtgacaacatgattgagaggtccaccaaccttgactggtacaagggcccaaccctacttgaggctttggacttgatcaatgagccgaagaggccttcagacaagcccctgcgtctccccctacaggatgtgtacaagattggtggtattggaactgttcctgttgggcgtgttgagactggtatcatcaagcctggtatggttgttacctttggtcctagtggccttactactgaggtgaagtctgttgaaatgcaccatgaggctctccaggaggcccttcctggtgacaatgttggcttcaatgttaagaatgttgctgtgaaggatctgaagcgtgggtatgtggcctccaactccaaggatgaccctgccaaggaggctgctagcttcacgtcccaggtcatcatcatgaaccaccctgggcagattggcaacggctatgccccagtgctggactgccacacctcgcacattgctgtcaagtttgcggagctcattaccaagattgataggcggtctggcaaagagcttgagaaggagcccaaattcctcaagaatggtgatgctggtatggtgaagatggttcccactaagcccatggtagtggagaccttttctgaatatcctcctcttggtcgctttgctgtccgtgacatgaggcaaacggtggctgtcggagtcatcaagagtgtggagaagaaggatccaactggagccaaggtgaccaaggctgccgcaaagaagaaatga

SEQ ID NO: 27832 - protein, 447 aa, Zea mays
MGKEKTHINIVVIGHVDSGKSTTTGHLIYKLGGIDKRVIERFEKEAAEMNKRSFKYAWVLDKLKAERERGITIDIALWKFETTKYYCTVIDAPGHRDFIKNMITGTSQADCAVLIIDSTTGGFEAGISKDGQTREHALLAFTLGVKQMICCCNKMDATTPKYSKARYDEIVKEVSSYLKKVGYNPDKIHFVPISGFEGDNMIERSTNLDWYKGPTLLEALDLINEPKRPSDKPLRLPLQDVYKIGGIGTVPVGRVETGIIKPGMVVTFGPSGLTTEVKSVEMHHEALQEALPGDNVGFNVKNVAVKDLKRGYVASNSKDDPAKEAASFTSQVIIMNHPGQIGNGYAPVLDCHTSHIAVKFAELITKIDRRSGKELEKEPKFLKNGDAGMVKMVPTKPMVVETFSEYPPLGRFAVRDMRQTVAVGVIKSVEKKDPTGAKVTKAAAKKK

SEQ ID NO: 27833 - DNA, 1344 bp, Zea mays
  CDS (1)..(1344)
atggggaaggagaagactcacatcaacattgtggtcattggccatgtcgactctggcaagtcgaccaccactggccacctgatctacaagcttggcggtattgacaagcgtgtgatcgagaggttcgagaaggaggctgcggaaatgaacaagcgttcattcaagtatgcctgggtgcttgacaagcttaaggctgagcgtgagagaggtatcacaattgatattgccctgtggaagttcgagaccaccaagtactactgcacggtcattgatgcccctggccaccgtgacttcatcaagaatatgatcactggcacttctcaggctgactgtgctgttcttatcattgactccaccactggtggttttgaggctggtatctccaaggatggccagacccgtgagcatgctctccttgctttcacacttggagtgaagcagatgatttgctgctgcaataagatggatgccaccacacccaagtactcgaaggcccgttatgatgaaattgtgaaggaagtctcttcctacctgaagaaggttggatacaacccagacaagatccactttgttcccatctctggttttgaaggtgacaacatgattgagaggtccaccaaccttgactggtacaagggcccaaccctgcttgaggctctggacttaatcaatgagccaaagaggccttcagacaagcccctgcgtctcccccttcaggatgtgtacaagattggtggtattggaactgttcctgtgggacgtgttgagactggtatcatcaagccgggtatggttgtcaccttcggtcctagtggccttacaactgaggttaagtctgttgagatgcaccacgaggctctccaggaggcccttcctggtgacaatgttggcttcaacgttaagaatgttgctgtgaaggatctgaagcgtgggtatgtggcctccaactccaaggatgaccctgccaaggaggctgctagcttcacctcacaggtcatcatcatgaaccaccctgggcagattggcaatggctatgccccagtgctggactgccacacctcacacatcgctgtcaagtttgctgagcttgttaccaagattgataggcgatctggcaaggagcttgagaaggagcccaaattcctcaagaacggtgatgctggtatggtgaagatggttcccactaagcccatggtggtggagaccttctctgagtatcctcctcttggtcgatttgctgtccgtgacatgaggcaaacggtggctgttggagtcatcaagagtgtggagaagaaggacccaactggagccaaggtgaccaaggctgctgccaagaagaaatga

SEQ ID NO: 27834 - protein, 447 aa, Zea mays
MGKEKTHINIVVIGHVDSGKSTTTGHLIYKLGGIDKRVIERFEKEAAEMNKRSFKYAWVLDKLKAERERGITIDIALWKFETTKYYCTVIDAPGHRDFIKNMITGTSQADCAVLIIDSTTGGFEAGISKDGQTREHALLAFTLGVKQMICCCNKMDATTPKYSKARYDEIVKEVSSYLKKVGYNPDKIHFVPISGFEGDNMIERSTNLDWYKGPTLLEALDLINEPKRPSDKPLRLPLQDVYKIGGIGTVPVGRVETGIIKPGMVVTFGPSGLTTEVKSVEMHHEALQEALPGDNVGFNVKNVAVKDLKRGYVASNSKDDPAKEAASFTSQVIIMNHPGQIGNGYAPVLDCHTSHIAVKFAELVTKIDRRSGKELEKEPKFLKNGDAGMVKMVPTKPMVVETFSEYPPLGRFAVRDMRQTVAVGVIKSVEKKDPTGAKVTKAAAKKK

SEQ ID NO: 27835 - DNA, 1401 bp, Zea mays
  CDS (1)..(1401)
atggcctccctcacctcggcgtccacttcactcctcttcccgcaggcctcctcatccaggagccgcatccggctctccacccccctgggcttctccgcgcagcctgcgcggctgcggagccagggggcggcagtgggcgcgcggcggcgcgggcgcctgctggtggtgcgcgcggcgaggggcaagttcgagcgcaccaaaccacacgtcaacataggcaccatcggccatgtcgaccacggaaagaccactctcaccgccgcgctcaccatggtgctcgcctccgtcggcggcagcgcgcctaagaagtacgacgagatcgacgccgcccccgaggagcgcgcccgcggtatcaccatcaacaccgccaccgtcgagtacgagaccgagacccgccactacgcacacgtcgactgccccggccacgccgactatgtcaagaacatgatcaccggcgctgcgcagatggacggtgccatcctcgtcgtatccggcgccgacgggcccatgccgcagaccaaagagcacattctcctcgccaagcaagtcggcgttcccaagatcgttgtcttcctcaacaagaaggacatggtcgacgacgaggagctgctcgagctcgtcgagctggaagtccgcgagctgctcagcaactatgagtacgacggcgacgaggtaccaatcgtcgctggctccgccctcaaggcgctcgaggctctcatggtcaaccctgccctgaagcgcggcgacgatgagtgggtcgactacatcttctcgttggttgataaagtggattcctacattccagtcccacagaggcagaccgacctcccgttcttactcgctgttgaagatgtcttctccatcaccggtcgtggtacagttgccactggccgtatagagcgtggcaccgtcaagattggtgacacagtcgatatcgttggaatccgggacacccggaactgcaccgtgactggcgttgagatgttccagaagaccatggacgatgccatggctggagacaatgtcggactgctgctccgtggtatgcagaaggatgacattgagagaggcatggtgctggcaaagcccggctctatcacaccgcacaccaagtttgaggctgttgtgtatgtgcttaagaaggaagagggtggccggcactcacctttcttccctggttaccgcccgcagttctacatgaggacaaccgatgtgacagggaatgtgactgtgattatgaatgacaaagatgaggaggcgaagatgtgcatgcctggtgaccgtatcaagatggttgttcagctcatccagcctgttgcttgtgagcagggtatgaggtttgctatccgtgagggtggtaagactgttggtgctggtgtcatcaacaaaatcattgagtaa

SEQ ID NO: 27836 - protein, 466 aa, Zea mays
MASLTSASTSLLFPQASSSRSRIRLSTPLGFSAQPARLRSQGAAVGARRRGRLLVVRAARGKFERTKPHVNIGTIGHVDHGKTTLTAALTMVLASVGGSAPKKYDEIDAAPEERARGITINTATVEYETETRHYAHVDCPGHADYVKNMITGAAQMDGAILVVSGADGPMPQTKEHILLAKQVGVPKIVVFLNKKDMVDDEELLELVELEVRELLSNYEYDGDEVPIVAGSALKALEALMVNPALKRGDDEWVDYIFSLVDKVDSYIPVPQRQTDLPFLLAVEDVFSITGRGTVATGRIERGTVKIGDTVDIVGIRDTRNCTVTGVEMFQKTMDDAMAGDNVGLLLRGMQKDDIERGMVLAKPGSITPHTKFEAVVYVLKKEEGGRHSPFFPGYRPQFYMRTTDVTGNVTVIMNDKDEEAKMCMPGDRIKMVVQLIQPVACEQGMRFAIREGGKTVGAGVINKIIE

SEQ ID NO: 27837 - DNA, 1344 bp, Zea mays
  CDS (1)..(1344)
atgggcaaggagaagactcacatcaacattgtggtcattggacatgtcgactctggcaagtcgaccaccactggccacctgatctacaagctcggcggtattgacaagcgtgtgattgagaggttcgagaaagaggccgcggagatgaacaagcggtcattcaagtatgcctgggtgcttgacaagctcaaggccgagcgtgagagaggtatcacaattgatattgctttgtggaagttcgagaccaccaagtactactgcactgtcattgatgcccctggacaccgtgacttcatcaagaatatgattactggcacttcccaagctgactgcgctgttcttatcattgactccaccactggtggttttgaggctggtatctccaaggatggacagacccgtgagcatgctctccttgctttcacgcttggagtgaagcagatgatttgctgttgcaacaagatggatgccaccacacccaagtactccaaggcccgttatgatgagattgtgaaggaagtctcttcctacctgaagaaggttggatacaaccctgacaagatccacttcgttcccatctctggtttcgaaggtgacaacatgattgagaggtccaccaaccttgactggtacaagggcccaaccctacttgaggctttggacttgatcaacgagccgaagaggccttcagacaagcccctgcgtctccccctacaggatgtgtacaagattggcggtattggaactgttcctgttgggcgtgttgagactggtatcatcaagcctggtatggttgttacctttggtcctagtggccttactactgaggtgaagtctgttgaaatgcaccatgaggctctccaggaggccctacctggtgacaatgttggcttcaatgttaagaatgttgctgtgaaggatctgaagcgtgggtatgtggcctccaactccaaggatgaccctgccaaggaggctgctagcttcacatcccaggtcatcatcatgaaccaccctgggcagattggcaacggctatgccccagtgctggactgccacaccccgcacattgctgtcaagtttgcagagctcattaccaaaattgataggcggtctggcaaggagcttaaaaaggagcccaaatttctcaaaaatggtgatgctggtatggtaaaaatggttccccctaagcccatggtagtggagcccttttttgaaaacccccctcttggtcgctttgctgtccgtgacatgaggcaaacggtggctgtcggagtcatcaaaagtgtggaaaaaaaggatccaactggagccaaggtgaccaaggctgccccaaaaaaaaaataa

SEQ ID NO: 27838 - protein, 447 aa, Zea mays
MGKEKTHINIVVIGHVDSGKSTTTGHLIYKLGGIDKRVIERFEKEAAEMNKRSFKYAWVLDKLKAERERGITIDIALWKFETTKYYCTVIDAPGHRDFIKNMITGTSQADCAVLIIDSTTGGFEAGISKDGQTREHALLAFTLGVKQMICCCNKMDATTPKYSKARYDEIVKEVSSYLKKVGYNPDKIHFVPISGFEGDNMIERSTNLDWYKGPTLLEALDLINEPKRPSDKPLRLPLQDVYKIGGIGTVPVGRVETGIIKPGMVVTFGPSGLTTEVKSVEMHHEALQEALPGDNVGFNVKNVAVKDLKRGYVASNSKDDPAKEAASFTSQVIIMNHPGQIGNGYAPVLDCHTPHIAVKFAELITKIDRRSGKELKKEPKFLKNGDAGMVKMVPPKPMVVEPFFENPPLGRFAVRDMRQTVAVGVIKSVEKKDPTGAKVTKAAPKKK

SEQ ID NO: 27839 - DNA, 1344 bp, Zea mays
  CDS (1)..(1344)
atgggtaaggagaagtcccacatcaacattgtggtcattggccatgtcgactctggcaagtcgaccaccaccggccacctgatctacaagcttggaggcattgacaagcgtgtaattgagaggtttgagaaggaggctgctgacatgaacaagcggtccttcaagtatgcttgggtgctcgacaagctcaaggctgagcgtgagagaggtatcaccattgatattgctctgtggaagtttgagaccaccaagtattactgcaccgtcattgatgcccctggacaccgtgacttcatcaagaacatgatcactggtacctcccaggctgactgtgctgtccttatcattgactccaccactggtggttttgaggctggtatctccaaggatggccagacccgtgagcatgctctccttgcgttcactcttggagtgaaacagatgatttgctgctgcaacaagatggatgcaacgactcccaaatactccaaggcgcgttatgatgagattgtgaaggaagtctcatcctacctcaagaaagttgggtacaaccctgataagattgcctttgtccccatctctggttttgagggcgccaacatgattgagaggtccaccaaccttgactggtacaaaggcccaaccctgcttgaggctcttgaccagatcaccgagccgaagaggccttcagacaagcccctgcgtctccccctgcaggatgtgtacaagattggtggtattggaactgtaccggttggtcgtgtggagactggtgtcatcaagcctggtatggttgtcaccttcggtccaactggcctgactactgaggtgaagtctgttgagatgcaccacgaggcacttcaggaggctcttccgggtgacaatgttggcttcaacgtgaagaacgttgctgtcaaggatctcaagcgtgggtttgtggcctcaaactccaaggatgaccctgccaaggaggctgccagcttcacgtcccaggtcatcatcatgaaccaccctgggcagataggcaatggctatgccccagttctggactgcctcacctcacacattgctgtcaagtttgctgagctcgttaccaagattgataggcgatccggcaaggagctggagaaggagcccaaatttctcaagaacggtgatgctggtatggtgaagatggttcccactaagcccatggtggtggagaccttttctcagtatcctccccttggtcgatttgctgtccgtgacatgaggcaaacggtggctgtcggagtcatcaagagtgtggagaagaaggacccaactggagccaaggtgacgaaggctgctgccaagaagaaatga

SEQ ID NO: 27840 - protein, 447 aa, Zea mays
MGKEKSHINIVVIGHVDSGKSTTTGHLIYKLGGIDKRVIERFEKEAADMNKRSFKYAWVLDKLKAERERGITIDIALWKFETTKYYCTVIDAPGHRDFIKNMITGTSQADCAVLIIDSTTGGFEAGISKDGQTREHALLAFTLGVKQMICCCNKMDATTPKYSKARYDEIVKEVSSYLKKVGYNPDKIAFVPISGFEGANMIERSTNLDWYKGPTLLEALDQITEPKRPSDKPLRLPLQDVYKIGGIGTVPVGRVETGVIKPGMVVTFGPTGLTTEVKSVEMHHEALQEALPGDNVGFNVKNVAVKDLKRGFVASNSKDDPAKEAASFTSQVIIMNHPGQIGNGYAPVLDCLTSHIAVKFAELVTKIDRRSGKELEKEPKFLKNGDAGMVKMVPTKPMVVETFSQYPPLGRFAVRDMRQTVAVGVIKSVEKKDPTGAKVTKAAAKKK

SEQ ID NO: 27841 - DNA, 1344 bp, Zea mays
  CDS (1)..(1344)
atgggtaaggagaagtcccacatcaacattgtggtcattggccacgtcgactctggcaagtcgaccaccaccggccacctgatctacaagcttggaggcattgacaagcgtgtaatagagaggtttgagaaggaggctgctgagatgaacaagcggtccttcaagtatgcttgggtgctcgacaagctcaaggctgagcgtgagaggggtatcaccattgatattgctctgtggaagtttgagaccaccaagtattactgcaccgtcattgatgcccctggacaccgtgacttcatcaagaacatgatcactggtacctcccaggctgactgtgctgtccttatcattgactccaccactggtggttttgaggctggtatctccaaggatggccagacccgtgagcatgctctccttgcgttcactcttggagtgaaacagatgatttgctgctgcaacaagatggatgcaacgactcccaaatactccaaggcgcgttatgatgagattgtgaaggaagtctcatcctacctcaagaaagttgggtacaaccctgataagattgcctttgtccccatctctggttttgagggcgacaacatgattgagaggtccaccaaccttgactggtacaaaggcccgaccctgcttgaggctcttgaccagatcaccgagcccaagagaccttcggacaagcccctgcgtctccccctgcaggatgtgtacaagattggtggtattggaactgtaccggttggtcgtgtggagactggtgtcatcaagcctggtatggttgtcaccttcggtccaactggcctgactactgaggtgaagtctgttgagatgcaccacgaggctcttcaggaggcccttcctggtgacaatgttggcttcaacgtgaagaacgttgctgtgaaggatctcaagcgtggttttgtggcctcaaactccaaggatgaccctgccaaggaggctgccagcttcacgtcccaggtcatcatcatgaaccaccctgggcagataggcaatggctatgccccagtgctggactgccacacctcccacattgctgtcaagtttgctgaactcattaccaagatcgacaggcggtctggcaaggagcttgagaaggagcccaagttcctgaagaacggtgatgctggtatggtgaagatgattcccaccaagcccatggtggtggagacattctcgcagtatcctccccttggtaggtttgctgtccgcgacatgaggcagacagttgctgttggagtcatcaagagtgtggagaagaaggacccgaccggcgccaaggttaccaaggcagctgccaaaaagaaatga

SEQ ID NO: 27842 - protein, 447 aa, Zea mays
MGKEKSHINIVVIGHVDSGKSTTTGHLIYKLGGIDKRVIERFEKEAAEMNKRSFKYAWVLDKLKAERERGITIDIALWKFETTKYYCTVIDAPGHRDFIKNMITGTSQADCAVLIIDSTTGGFEAGISKDGQTREHALLAFTLGVKQMICCCNKMDATTPKYSKARYDEIVKEVSSYLKKVGYNPDKIAFVPISGFEGDNMIERSTNLDWYKGPTLLEALDQITEPKRPSDKPLRLPLQDVYKIGGIGTVPVGRVETGVIKPGMVVTFGPTGLTTEVKSVEMHHEALQEALPGDNVGFNVKNVAVKDLKRGFVASNSKDDPAKEAASFTSQVIIMNHPGQIGNGYAPVLDCHTSHIAVKFAELITKIDRRSGKELEKEPKFLKNGDAGMVKMIPTKPMVVETFSQYPPLGRFAVRDMRQTVAVGVIKSVEKKDPTGAKVTKAAAKKK

SEQ ID NO: 27843 - DNA, 1344 bp, Zea mays
  CDS (1)..(1344)
atgggtaaagagaagtcccacatcaacattgtggttattggccatgtcgactctggcaagtcgaccaccacaggacaccttatctacaagcttggaggcattgacaagcgtgtgatcgagaggttcgagaaggaggctgctgaaatgaacaagcggtccttcaagtacgcgtgggtgctcgacaagctcaaggctgagcgtgagagaggtatcaccattgatatcgctctgtggaagtttgagaccaccaagtactactgcacggtcattgatgcccctggacaccgtgacttcatcaagaacatgatcactggtacctcccaggctgactgtgctgtccttatcattgactccaccactggtggttttgaggctggtatctccaaggatggccagacccgtgaacatgctctccttgcgttcacccttggagtgaagcagatgatttgctgctgcaacaagatggatgcaaccactcccaaatactccaaggcacgttatgaagagattgtgaaggaagtctcatcctacctcaagaaagttgggtacaaccctgataagattgcctttgttcccatttctggttttgagggcgacaacatgattgagaggtccaccaaccttgactggtacaaaggcccaaccctgcttgaggctcttgaccagatcaccgagcccaagaggccttcagacaagcccctgcgtctgcccctccaggatgtgtacaagattggtggtattggaactgtaccggttggtcgtgtggagactggtgtcatcaagcctggtatggtagtcacctttggtccaactggcctgactaccgaggtgaagtctgttgagatgcaccacgaggcacttcaggaggctcttccgggtgacaatgttggcttcaacgtgaagaatgttgctgtcaaggatctcaagcgtgggtttgtggcctccaactccaaggatgaccctgccaaggaggctgccagcttcacctcccaggtcatcatcatgaaccaccctgggcagattggcaacggctatgccccagtgctggactgccacacctcccacatcgctgtcaagtttgctgagctcattaccaagatcgacaggcggtctggcaaggagcttgagaaggagccaaagttcctgaagaacggtgatgctggtatggtgaagatgatacccaccaagcccatggtggtggagacattctcagcgtatcctccccttggtaggtttgctgtccgtgacatgaggcagacggttgctgttggagttatcaagagtgtggagaagaaggacccaaccggcgccaaggtgaccaaggctgctgccaagaagaaatga

SEQ ID NO: 27844 - protein, 447 aa, Zea mays
MGKEKSHINIVVIGHVDSGKSTTTGHLIYKLGGIDKRVIERFEKEAAEMNKRSFKYAWVLDKLKAERERGITIDIALWKFETTKYYCTVIDAPGHRDFIKNMITGTSQADCAVLIIDSTTGGFEAGISKDGQTREHALLAFTLGVKQMICCCNKMDATTPKYSKARYEEIVKEVSSYLKKVGYNPDKIAFVPISGFEGDNMIERSTNLDWYKGPTLLEALDQITEPKRPSDKPLRLPLQDVYKIGGIGTVPVGRVETGVIKPGMVVTFGPTGLTTEVKSVEMHHEALQEALPGDNVGFNVKNVAVKDLKRGFVASNSKDDPAKEAASFTSQVIIMNHPGQIGNGYAPVLDCHTSHIAVKFAELITKIDRRSGKELEKEPKFLKNGDAGMVKMIPTKPMVVETFSAYPPLGRFAVRDMRQTVAVGVIKSVEKKDPTGAKVTKAAAKKK

SEQ ID NO: 27845 - DNA, 1344 bp, Zea mays
  CDS (1)..(1344)
atgggtaaggagaagtctcacatcaacattgtggttattggccacgtcgactctggcaagtcgacaaccaccggccacctgatctacaagcttggaggcattgacaagcgtgtgatcgagaggtttgagaaggaggccgctgaaatgaacaagcggtcctttaagtatgcttgggtgcttgacaagctcaaggctgagcgtgagaggggtatcaccattgatattgctctgtggaagtttgagaccaccaagtactattgcaccgttattgatgcccctggacaccgtgactttatcaagaacatgatcactggtacctcccaggctgactgtgctgtccttatcattgactccaccactggtggttttgaggctggtatctccaaggatggccagacacgtgagcatgctctccttgcgttcacacttggagtgaagcagatgatttgctgctgcaacaagatggatgcaaccactcccaaatactccaaggcacgttatgatgagattgtgaaggaagtctcatcttacctcaagaaagttgggtacaaccctgataagatagcatttgttcccatctctggttttgagggtgacaacatgattgagaggtccaccaaccttgactggtacaaaggcccaaccctgcttgaggctcttgaccagatcaccgagcccaagagaccctcggacaagcccctgcgtctccccctccaggatgtgtacaagattggtggtattggaactgtgccagttggtcgtgtggagactggtgtcatcaagcctggtatggttgtcacctttggtccaactggcctgactactgaggtgaagtctgttgagatgcaccatgaggctcttcaggaggcccttcctggtgacaatgttggcttcaacgtgaagaacgtcgctgtgaaggatatcaagcgtggttatgtggcctccaactccaaggatgaccctgccaaggaggctgccagcttcacctcccaggtcatcatcatgaaccaccctgggcagatcggtaacggttatgccccagtgctggactgccacacctcccatattgctgtcaagtttgctgagctcattaccaagatcgacaggcgttctggcaaggagcttgagaaagagcccaagttcttgaagaacggtgatgctggtatggtgaagatgattcccaccaagcccatggtggtggagacattctcgcagtatcctcccctgggtaggtttgctgtccgtgacatgagacagacggttgctgttggagtcatcaagagtgtggagaagaaggacccgaccggtgccaaggtgaccaaggctgctgccaagaagaaatga

SEQ ID NO: 27846 - protein, 447 aa, Zea mays
MGKEKSHINIVVIGHVDSGKSTTTGHLIYKLGGIDKRVIERFEKEAAEMNKRSFKYAWVLDKLKAERERGITIDIALWKFETTKYYCTVIDAPGHRDFIKNMITGTSQADCAVLIIDSTTGGFEAGISKDGQTREHALLAFTLGVKQMICCCNKMDATTPKYSKARYDEIVKEVSSYLKKVGYNPDKIAFVPISGFEGDNMIERSTNLDWYKGPTLLEALDQITEPKRPSDKPLRLPLQDVYKIGGIGTVPVGRVETGVIKPGMVVTFGPTGLTTEVKSVEMHHEALQEALPGDNVGFNVKNVAVKDIKRGYVASNSKDDPAKEAASFTSQVIIMNHPGQIGNGYAPVLDCHTSHIAVKFAELITKIDRRSGKELEKEPKFLKNGDAGMVKMIPTKPMVVETFSQYPPLGRFAVRDMRQTVAVGVIKSVEKKDPTGAKVTKAAAKKK

SEQ ID NO: 27847 - DNA, 1344 bp, Zea mays
  CDS (1)..(1344)
atgggtaaagagaagtcccacatcaacattgtggttattggccatgtcgactctggcaagtcgaccaccacaggacaaaatatctacaagcttggaggcattgacaagcgtgtgatcgagaggttcgagaaggaggctcctgaaatgaacaagcggtccttcaagtacgcgtgggtgctcgacaagctcaaggctgagcgtgagagaggtttcaccattgatatcgctctgtggaagtttgagaccaccaagtactactgcacggtcattgatgcccgtggacaccgtcacttcatcaagaacatgatcactcgtacctcccaggctgactgtgctgtccttatcattgactcaaccactggtggttttgaggctggtatctccaaggatggccagacccgtgagcatgctctccttgctttcacacttggtgtgaagcagatgatttgctgctgcaacaagatggatgctactacacccaagtattccaaggcccgttatgatgagattgtgaaggaagtctcttcctacctcaagaaagttggatacaaccctgataagattgcctttgttccaatctctggttttgaaggtgacaacatgattgagaggtccaccaaccttgactggtacaagggcccaaccctacttgaggctcttgacaagatcaccgaggccaagaggccttcacacaagcccctgcgtctagccctccaggatgtgtaccagattggtggtattgggactgtaccggttggtcgtgtggaggctggtgtcatcaagcctggtatggtagtcacgtttggtccaacaggcctgactaccgaggtgaagtctgttgagatgcagcacgaggcacttcaggaggctcttccgggtgacaatgttggcttcaacgtgaagaatgttgctgtcaaggatctcaagcgtgggtttgtggcctccaactccagggatgaccctgccaaggaggctggcagcttcacctcccaagtcatcatcatgaaccaccctgggcagattggcaacggctatgcccctgtgctggactgccacacctcccacatcgctgtcaagtttgctgagctcattaccaagatcgacaggcgctctggcaaagagcttgagaaggagccaaagttcctgaagtacggtgatgctggtatggtgaagatgataccaaccaagcctatggtggtggagacattctccgcgtatcctcctctgggtaggtttgccgtccgtgacatgaggcaaacggtggctgtcggagtcatcaagagtgtggagaagaaggacccaactggagccaaggtgacgaaggctgctgccaagaagaaatga

SEQ ID NO: 27848 - protein, 447 aa, Zea mays
MGKEKSHINIVVIGHVDSGKSTTTGQNIYKLGGIDKRVIERFEKEAPEMNKRSFKYAWVLDKLKAERERGFTIDIALWKFETTKYYCTVIDARGHRHFIKNMITRTSQADCAVLIIDSTTGGFEAGISKDGQTREHALLAFTLGVKQMICCCNKMDATTPKYSKARYDEIVKEVSSYLKKVGYNPDKIAFVPISGFEGDNMIERSTNLDWYKGPTLLEALDKITEAKRPSHKPLRLALQDVYQIGGIGTVPVGRVEAGVIKPGMVVTFGPTGLTTEVKSVEMQHEALQEALPGDNVGFNVKNVAVKDLKRGFVASNSRDDPAKEAGSFTSQVIIMNHPGQIGNGYAPVLDCHTSHIAVKFAELITKIDRRSGKELEKEPKFLKYGDAGMVKMIPTKPMVVETFSAYPPLGRFAVRDMRQTVAVGVIKSVEKKDPTGAKVTKAAAKKK

SEQ ID NO: 27849 - DNA, 1344 bp, Zea mays
  CDS (1)..(1344)
atgggtaaagagaagtcccacatcaacattgtggttattggccatgtcgactctggcaagtcgaccaccacaggacaccttatctacaagcttggaggcattgacaagcgtgtgatcgagaggttcgggaaggaggctgctgaaatgaacaagcggtccttcaagtacgcgtgggtgctcgacaagctcaaggctgagcgtgagagaggtatcaccattgatatcgctctgtggaagtttgagaccaccaagtactactgcacggtcattgatgcccctggacaccgtgacttcatcaagaacatgatcactggtacctcccaggctgactgtgctgtccttatcattgactccaccactggtggttttgaggctggtatctccaaggatggccagacacgtgagcatgctctccttgcgttcacacttggagtgaagcagatgatttgctgctgcaacaagatggatgcaaccactcccaaatactccaaggcacgttatgatgagattgtgaaggaagtctcatcttacctcaagaaagttgggtacaaccctgataagatagcatttgttcccatctctggttttgagggtgacaacatgattgagaggtccaccaaccttgactggtacaaaggcccaaccctgcttgaggctcttgaccagatcaccgagcccaagagaccctcggacaagcccctgcgtctccccctgcaggatgtgtacaagattggtggtattggaactgtgccagttggtcgtgtggagactggtgtcatcaagcctggtatggttgtcaccttcggtccaactggcctgactactgaggtgaagtctgttgagatgcaccacgaggctcttcaggaggcccttcctggtgacaatgttggcttcaacgtgaagaacgttgctgtgaaggatctcaagcgtggttttgtggcctcaaactccaaggatgaccctgccaaggaggctgccagcttcacgtcccaggtcatcatcatgaaccaccctggccagatcggtaacggctatgccccagtgctggactgccatacctcccatattgctgtcaagtttgctgagctgattaccaagatcgacaggcgttctggcaaggagcttgagaaagagcccaagttcttgaagaacggcgatgctggtatggtgaagatgattcccaccaagcccatggtggtggagacattctcgcagtatcctccccttggtaggtttgctgtccgcgacatgaggcagacagttgctgttggagtcatcaagagtgtggagaagaaggacccgaccggcgccaaggttaccaaggcagctgccaaaaagaaatga

SEQ ID NO: 27850 - protein, 447 aa, Zea mays
MGKEKSHINIVVIGHVDSGKSTTTGHLIYKLGGIDKRVIERFGKEAAEMNKRSFKYAWVLDKLKAERERGITIDIALWKFETTKYYCTVIDAPGHRDFIKNMITGTSQADCAVLIIDSTTGGFEAGISKDGQTREHALLAFTLGVKQMICCCNKMDATTPKYSKARYDEIVKEVSSYLKKVGYNPDKIAFVPISGFEGDNMIERSTNLDWYKGPTLLEALDQITEPKRPSDKPLRLPLQDVYKIGGIGTVPVGRVETGVIKPGMVVTFGPTGLTTEVKSVEMHHEALQEALPGDNVGFNVKNVAVKDLKRGFVASNSKDDPAKEAASFTSQVIIMNHPGQIGNGYAPVLDCHTSHIAVKFAELITKIDRRSGKELEKEPKFLKNGDAGMVKMIPTKPMVVETFSQYPPLGRFAVRDMRQTVAVGVIKSVEKKDPTGAKVTKAAAKKK

SEQ ID NO: 27851 - DNA, 1353 bp, Zea mays
  CDS (1)..(1353)
atggcttccaccgttgtgctccggaacgcctgctcccgccgactcttctgctactccactctccgcgccgccgcaatattgggacccgccgcgccacctgatgcgcccgcggcggcgtcggcccagccgccaccgatggcaggaaccctctgggcgaggtccatggccactttcacgcgcacgaagccacatgtgaacgtcggcaccattgggcacgtcgatcacggcaaaaccacactcactgctgccattaccaaggttctggcagaggcagggaaggccaaagcagttgcttttgacgagatcgacaaggccccggaagagagagccagaggaatcaccattgcaacagctcatgtcgagtatgagactgctaaaaggcattatgctcatgttgattgtccaggtcacgcagattatgtcaagaacatgatcactggagctgctcaaatggatggtggtattcttgtcgtgtcagctcctgatggcccaatgccacaaacaaaggagcacattcttcttgcccgtcaggttggtgtaccttcccttgtgtgcttcttaaacaaagttgatgctgttgatgacccagagcttctggaacttgtagagatggagcttcgggagctcctcagtttctacaagttccctggtgatgagatttcgatcatccgtgggtctgcgttgtctgctttgcaagggaacaacgatgagataggaaagaatgccattttgaaactaatggatgcagttgatgagtacattcctgatcctgtaaggcagcttgataaggctttcttgatgccgatagaagatgtgttttctatccagggtcgtggaactgttgttactgggcgtgttgagcagggaacaattaaaactggcgaagatgttgagatcttgggtttgacacagagtggtcccttgaagactacagttactggtgttgagatgttcaaaaagatactggaccatggagaggctggtgacaacgttggtcttcttcttcgtggtctaaagcgtggtgatgttgagcgtggccaggtggtgtgcaaacctggtagtctgaagacatacaaaaagtttgaggcagaaatatacgtcctgacaaaggatgaaggtggccggcacactgcctttgtcacaaattacacaccccaattctacttcaggactgctgatgtcactggaaaggttgagttgcttggtgagacgaagatggttttgcccggtgacaatgtaaccgcgaatttcgagttgatatcgcctgttcctcttgaaactgggcaaagatttgcgatgagggaaggagggagaacagttggtgccggggttgtctccaaagttattagctga

SEQ ID NO: 27852 - protein, 450 aa, Zea mays
MASTVVLRNACSRRLFCYSTLRAAAILGPAAPPDAPAAASAQPPPMAGTLWARSMATFTRTKPHVNVGTIGHVDHGKTTLTAAITKVLAEAGKAKAVAFDEIDKAPEERARGITIATAHVEYETAKRHYAHVDCPGHADYVKNMITGAAQMDGGILVVSAPDGPMPQTKEHILLARQVGVPSLVCFLNKVDAVDDPELLELVEMELRELLSFYKFPGDEISIIRGSALSALQGNNDEIGKNAILKLMDAVDEYIPDPVRQLDKAFLMPIEDVFSIQGRGTVVTGRVEQGTIKTGEDVEILGLTQSGPLKTTVTGVEMFKKILDHGEAGDNVGLLLRGLKRGDVERGQVVCKPGSLKTYKKFEAEIYVLTKDEGGRHTAFVTNYTPQFYFRTADVTGKVELLGETKMVLPGDNVTANFELISPVPLETGQRFAMREGGRTVGAGVVSKVIS

SEQ ID NO: 27853 - DNA, 1344 bp, Zea mays
  CDS (1)..(1344)
atgggcaaggagaagactcacatcaacattgtggtcattggacatgtcgactctggcaagtcgaccaccactggccacctgatctacaagctcggcggtattgacaagcgtgtgattgagaggttcgagaaagaggccgcggagatgaacaagcggtcattcaagtatgcgtgggtgcttgacaagctcaaggctgagcgtgagagaggtattacaattgatattgccctgtggaagttcgagaccaccaagtactactgcactgttattgatgccccgggacaccgtgacttcatcaaaaatatgatcactggcacttcccaagctgactgtgctgttcttatcattgactcaaccactggtggttttgaggctggtatctccaaggatggccagacccgtgagcatgctctccttgctttcacacttggtgtgaagcagatgatttgctgctgcaacaagatggatgctactacacccaagtattcaaaggcccgttatgatgagattgtgaaggaagtctcttcctacctgaagaaggttggatacaaccctgataagatctacttcgttccaatctctggttttgaaggtgacaacatgattgagaggtccaccaaccttgactggtacaagggcccaaccctacttgaggctctggacttgatcaatgagccaaagaggccttcagacaagcccctgcgtctcccccttcaggatgtgtacaagattggtggtattggaactgtccctgttggacgtgttgagactggtgtcattaagcctggtatggttgttacttttgggcctactggtcttactactgaggttaagtccgttgagatgcaccatgaggctctccaggaggcccttcccggtgacaatgttggcttcaacgtgaagaatgttgctgtgaaggatctgaagcgtgggtatgtggcctccaactccaaggatgaccctgccaaggaggctgctagcttcacctcccaggtcatcatcatgaaccaccctggccagattggcaatggctatgccccagttctggactgccacacctcacacattgctgtcaagtttgctgagctcgttaccaagattgataggcgatccggcaaggagctggagaaggagcccaaatttctcaagaacggtgatgctggtatggtgaagatggttcccactaagcccatggtggtggagaccttttctcagtatcctcctcttggtcgatttgctgtccgtgacatgaggcaaacggtggctgtcggagtcatcaagagtgtggagaagaaggacccaactggagccaaggtgacgaaggctgctgccaagaagaaatga

SEQ ID NO: 27854 - protein, 447 aa, Zea mays
MGKEKTHINIVVIGHVDSGKSTTTGHLIYKLGGIDKRVIERFEKEAAEMNKRSFKYAWVLDKLKAERERGITIDIALWKFETTKYYCTVIDAPGHRDFIKNMITGTSQADCAVLIIDSTTGGFEAGISKDGQTREHALLAFTLGVKQMICCCNKMDATTPKYSKARYDEIVKEVSSYLKKVGYNPDKIYFVPISGFEGDNMIERSTNLDWYKGPTLLEALDLINEPKRPSDKPLRLPLQDVYKIGGIGTVPVGRVETGVIKPGMVVTFGPTGLTTEVKSVEMHHEALQEALPGDNVGFNVKNVAVKDLKRGYVASNSKDDPAKEAASFTSQVIIMNHPGQIGNGYAPVLDCHTSHIAVKFAELVTKIDRRSGKELEKEPKFLKNGDAGMVKMVPTKPMVVETFSQYPPLGRFAVRDMRQTVAVGVIKSVEKKDPTGAKVTKAAAKKK

SEQ ID NO: 27855 - DNA, 1401 bp, Zea mays
  CDS (1)..(1401)
atggcctccctcacctcggcgtccacctcactcctcttcccgcaggcctcctcatccaggagccgcatccggctctccacccccctgggcttctccgcgcagcctgcgcggctgcggagccagggggcggcagtgggcgcgcggcggcgcgggcgcctgctggtggtgcgcgcggcgaggggcaagttcgagcgcaccaaaccacacgtcaacataggcaccatcggccatgtcgaccacggaaagaccaccctcaccgccgcgctcaccatggtgctcgcctccgtcggcggcagcgcgcccaagaagtacgacgagatcgacgccgcccccgaggagcgcgcccgcggtatcaccatcaacaccgccaccgtcgagtacgagaccgagacccgccactacgcacacgtcgactgccccggccacgccgactatgtcaagaacatgatcaccggcgctgcgcagatggacggtgccatcctcgtcgtatccggcgccgacgggcccatgccgcagaccaaagagcacattctcctcgccaagcaagtcggcgttcccaagatcgttgtcttcctcaacaagaaggacatggtcgacgacgaggagctgctcgagctcgtcgagctggaagtccgcgagctgctcagcaactatgagtacgacggcgacgaggtgccaatcgtcgctggctccgccctcaaggcgctcgaggccctcatgggcaaccctaccctgaagcgcggcgacgatgagtgggtggactgcatcttcaagctggttgattctgtggattcctacattccagtcccacagaggcagaccgacctcccgttcttactcgctgttgaagatgtcttctccatcaccggtcgtggtacagttgccactggccgtatagagcgtggcaccgtcaagattggtgacacagtcgatatcgtcggaatccgggacacccggaactgcaccgtcactggcgttgagatgttccagaagaccatggacgatgccatggccggagacaatgtcggactgctgctccgtggtatgcagaaggatgacattgaaagaggcatggtgctggcaaagcccggctctatcacaccgcacaccaagtttgaggctgttgtgtatgtgcttaagaaggaagagggtggccggcactcacctttcttccctggttaccgcccgcagttctacatgaggacaaccgatgtgacagggaatgtgactgtgattatgaatgacaaagatgaggaggcgaagatgtgcatgcctggtgaccgtatcaagatggttgttcagctcatccagcctgttgcttgtgagcagggtatgaggtttgctatccgtgagggtggtaagactgttggtgctggtgtcatcaacaaaatcattgagtaa

SEQ ID NO: 27856 - protein, 466 aa, Zea mays
MASLTSASTSLLFPQASSSRSRIRLSTPLGFSAQPARLRSQGAAVGARRRGRLLVVRAARGKFERTKPHVNIGTIGHVDHGKTTLTAALTMVLASVGGSAPKKYDEIDAAPEERARGITINTATVEYETETRHYAHVDCPGHADYVKNMITGAAQMDGAILVVSGADGPMPQTKEHILLAKQVGVPKIVVFLNKKDMVDDEELLELVELEVRELLSNYEYDGDEVPIVAGSALKALEALMGNPTLKRGDDEWVDCIFKLVDSVDSYIPVPQRQTDLPFLLAVEDVFSITGRGTVATGRIERGTVKIGDTVDIVGIRDTRNCTVTGVEMFQKTMDDAMAGDNVGLLLRGMQKDDIERGMVLAKPGSITPHTKFEAVVYVLKKEEGGRHSPFFPGYRPQFYMRTTDVTGNVTVIMNDKDEEAKMCMPGDRIKMVVQLIQPVACEQGMRFAIREGGKTVGAGVINKIIE

SEQ ID NO: 27857 - DNA, 1344 bp, Zea mays
  CDS (1)..(1344)
atgggtaaggagaagtcccacatcaacattgtggtcattggccacgtcgactctggcaagtcgaccaccaccggccacctgatctacaagcttggaggcattgacaagcgtgtaatagagaggtttgagaaggaggctgctgagatgaacaagcggtccttcaagtatgcttgggtgctcgacaagctcaaggctgagcgtgagaggggtatcaccattgatattgctctgtggaagtttgagaccaccaagtattactgcaccgtcattgatgcccctggacaccgtgacttcatcaagaacatgatcactggtacctcccaggctgactgtgctgtccttatcattgactccaccactggtggttttgaggctggtatctccaaggatggccagacccgtgagcatgctctccttgcgttcactcttggagtgaaacagatgatttgctgctgcaacaagatggatgcaacgactcccaaatactccaaggcgcgttatgatgagattgtgaaggaagtctcatcctacctcaagaaagttgggtacaaccctgataagattgcctttgtccccatctctggttttgagggcgacaacatgattgagaggtccaccaaccttgactggtacaaaggcccgaccctgcttgaggctcttgaccagatcaccgagcccaagagaccttcggacaagcccctgcgtctccccctgcaggatgtgtacaagattggtggtattggaactgtgccagttggtcgtgtggagactggtgtcatcaagcctggtatggttgtcacctttggtccaactggcctgactactgaggtgaagtctgttgagatgcaccatgaggctcttcaggaggcccttcctggtgacaatgttggcttcaacgtgaagaacgtcgctgtgaaggatatcaagcgtggttatgtggcctccaactccaaggatgaccctgccaaggaggctgccagcttcacctcccaggtcatcatcatgaaccaccctgggcagatcggtaacggttatgccccagtgctggactgccacacctcccatattgctgtcaagtttgctgagctcattaccaagatcgacaggcgttctggcaaggagcttgagaaagagcccaagttcttgaagaacggtgatgctggtatggtgaagatgattcccaccaagcccatggtggtggagacattctcgcagtatcctcccctgggtaggtttgctgtccgtgacatgagacagacggctgctgttggagtcatcaagagtgtggagaagaaggacccgaccggtgccaaggtgaccaaggctgctgccaagaagaaatga

SEQ ID NO: 27858 - protein, 447 aa, Zea mays
MGKEKSHINIVVIGHVDSGKSTTTGHLIYKLGGIDKRVIERFEKEAAEMNKRSFKYAWVLDKLKAERERGITIDIALWKFETTKYYCTVIDAPGHRDFIKNMITGTSQADCAVLIIDSTTGGFEAGISKDGQTREHALLAFTLGVKQMICCCNKMDATTPKYSKARYDEIVKEVSSYLKKVGYNPDKIAFVPISGFEGDNMIERSTNLDWYKGPTLLEALDQITEPKRPSDKPLRLPLQDVYKIGGIGTVPVGRVETGVIKPGMVVTFGPTGLTTEVKSVEMHHEALQEALPGDNVGFNVKNVAVKDIKRGYVASNSKDDPAKEAASFTSQVIIMNHPGQIGNGYAPVLDCHTSHIAVKFAELITKIDRRSGKELEKEPKFLKNGDAGMVKMIPTKPMVVETFSQYPPLGRFAVRDMRQTAAVGVIKSVEKKDPTGAKVTKAAAKKK

SEQ ID NO: 27859 - DNA, 1344 bp, Zea mays
  CDS (1)..(1344)
atgggtaaagagaagtcccacatcaacattgtggttattggccacgttgactctggcaagtcgaccaccacaggacacctgatctacaagcttggaggcattgacaagcgtgtgatcgagaggtttgagaaggaggctgctgaaatgaacaagcggtccttcaagtacgcgtgggtgctcgacaagctcaaggctgagcgtgagagaggtatcaccattgatatcgctctgtggaagtttgagaccaccaagtactactgcacggtcattgatgcccctggacaccgtgacttcatcaagaacatgatcactggtacctcccaggctgactgtgctgtccttatcattgactccaccactggtggttttgaggctggtatctccaaggatggccagacccgtgaacatgctctccttgcgttcacccttggagtgaagcagatgatttgctgctgcaacaagatggatgcaaccactccgaaatactccaaggcacgttatgatgagattgtgaaggaagtctcatcctacctcaagaaagttgggtacaaccctgataagattgcctttgttcccatttctggttttgagggcgacaacatgattgagaggtccaccaaccttgactggtacaaaggcccaaccctgcttgaggctcttgaccagatcaccgagcccaagaggccttcggacaagcccctgcgtctgcccctccaggatgtgtacaagattggtggtattggaactgtaccggttggtcgtgtggagactggtgtcatcaagcctggtatggtagtcacctttggtccaactggcctgactactgaggtgaagtctgttgagatgcaccacgaggcgcttcaggaggctcttccgggcgacaatgttggcttcaacgtgaagaacgttgctgtcaaggatctcaagcgtgggttcgtggcctccaactccaaggatgaccctgccaaggaggctgccagcttcacctcccaggtcatcatcatgaaccaccctgggcagattggcaacggctatgccccagtgctggactgccacacctcccacatcgccgtcaagtttgctgagctcattaccaagatcgacaggcgatctggcaaggagctcgagaaggagcccaagttcctgaagaacggtgatgctggtatggtgaagatgattcccaccaagcctatggtggtggagacattctccgcgtatcctcccctgggtaggtttgccgtccgcgacatgaggcagacggttgctgttggagtcatcaagagtgtggagaagaaggacccaaccggcgccaaggtgaccaaggctgctgccaagaagaaatga

SEQ ID NO: 27860 - protein, 447 aa, Zea mays
MGKEKSHINIVVIGHVDSGKSTTTGHLIYKLGGIDKRVIERFEKEAAEMNKRSFKYAWVLDKLKAERERGITIDIALWKFETTKYYCTVIDAPGHRDFIKNMITGTSQADCAVLIIDSTTGGFEAGISKDGQTREHALLAFTLGVKQMICCCNKMDATTPKYSKARYDEIVKEVSSYLKKVGYNPDKIAFVPISGFEGDNMIERSTNLDWYKGPTLLEALDQITEPKRPSDKPLRLPLQDVYKIGGIGTVPVGRVETGVIKPGMVVTFGPTGLTTEVKSVEMHHEALQEALPGDNVGFNVKNVAVKDLKRGFVASNSKDDPAKEAASFTSQVIIMNHPGQIGNGYAPVLDCHTSHIAVKFAELITKIDRRSGKELEKEPKFLKNGDAGMVKMIPTKPMVVETFSAYPPLGRFAVRDMRQTVAVGVIKSVEKKDPTGAKVTKAAAKKK

SEQ ID NO: 27861 - DNA, 1359 bp, Zea mays
  CDS (1)..(1359)
atggcttccgccgcggtgctccggaacgccggctcccggcgcctcttctcctaccctactctccgcgccgctgcgatatatgtaccttctgcgctacccgatgcgcccgcggcggcggcagcgccggcccagccgccaccgacggccgggaccctctgggcgaggtctatggccaccttcacgcgcacgaagccccatgtgaacgtcggcaccattgggcacgtcgatcacggcaaaaccactctcactgctgccattaccaaggtcctggccgaggcagggaaggccaaagccgttgctttcgacgagatcgacaaggctccggaggagaaagccagaggaatcaccattgcgacagctcacgtcgagtatgagacggctaaaaggcattatgctcacgttgattgtccaggtcacgcagattatgtcaagaacatgatcactggagctgctcaaatggatggtggtattcttgtcgtgtcagctcctgatggcccgatgccacaaactaaggagcatattcttcttgcccgtcaggttggtgtaccttcccttgtgtgcttcttaaacaaagttgatgctgttgatgatccagagcttctggaacttgtagagatggagcttcgggagctcctcagtttctacaagttccccggtgatgagattccgatcatccgtgggtctgcgttgtctgctttgcaagggaacaatgatgagataggaaagaatgcaattttgaaattaatggacgcagttgatgagtacatccctgatcctgtgaggcagcttgataagcctttcttgatgccgatagaagatgtgttttctattcagggtcgtggaactgttgttactgggcgtgttgaacagggaacaatcaaaactggtgaagatgttgagatcttgggtttggcacagactggtcccttgaagactacagttactggtgttgagatgttcaaaaagatactggaccatggagaggctggtgacaacgttggccttcttctccgtggtcttaagcgtggtgatgttgagcgtggccaggtggtgtgcaaacctggtagtctgaagacatgcaaaaagttcgaggcggaaatatatgtcctgacaaaggatgaaggtggccggcacactgcctttgtcacaaattacagcccccaattctacttcaggacagctgatgtcactggaagggttgagctgcttggggagatgaagatggttttgcccggtgacaatgtaactgcgaattttgagttgatatcacctgttcctcttgaacctgggcaaagatttgcgattagggaaggaggaagaacggtcggtgctggagtcgtctccaaagttcttagctga

SEQ ID NO: 27862 - protein, 452 aa, Zea mays
MASAAVLRNAGSRRLFSYPTLRAAAIYVPSALPDAPAAAAAPAQPPPTAGTLWARSMATFTRTKPHVNVGTIGHVDHGKTTLTAAITKVLAEAGKAKAVAFDEIDKAPEEKARGITIATAHVEYETAKRHYAHVDCPGHADYVKNMITGAAQMDGGILVVSAPDGPMPQTKEHILLARQVGVPSLVCFLNKVDAVDDPELLELVEMELRELLSFYKFPGDEIPIIRGSALSALQGNNDEIGKNAILKLMDAVDEYIPDPVRQLDKPFLMPIEDVFSIQGRGTVVTGRVEQGTIKTGEDVEILGLAQTGPLKTTVTGVEMFKKILDHGEAGDNVGLLLRGLKRGDVERGQVVCKPGSLKTCKKFEAEIYVLTKDEGGRHTAFVTNYSPQFYFRTADVTGRVELLGEMKMVLPGDNVTANFELISPVPLEPGQRFAIREGGRTVGAGVVSKVLS

SEQ ID NO: 27863 - DNA, 1401 bp, Zea mays
  CDS (1)..(1401)
atggcctccctcacctcggcgtccacttcactcctcttcccgcaggcctcctcatccaggagccgcatccgtctctccacccccctgggcttctccgcgcagcctgcgcggctgcggagccagggggcggcagtgggcgcgcggcggcgcgggcgcctgctggtggtgcgcgcggcgaggggcaagttcgagcgcaccaaaccacacgtcaacataggcaccatcggccatgtcgaccacggaaagaccactctcaccgccgcgctcaccatggtgctcgcctccgtcggtggcagcgcgcctaagaagtacgacgagatcgacgccgcccccgaggagcgcgcccgcggtatcaccatcaacaccgccaccgtcgagtacgagaccgagacccgccactacgcacacgtcgactgccccggccacgccgactatgtcaagaatatgatcaccggcgctgcgcagatggacggtgccatcctcgtcgtatccggtgccgacgggcccatgccgcagaccaaagagcacatcctcctcgccaagcaagtcggtgttcccaagatcgttgtcttcctcaacaagaaggacatggtcgacgacgaggagctgctcgagctcgtcgagctcgaggtccgcgagctgctcagcaactacgagtacgacggcgacgacgtaccaatcgtcgctggctccgccctcaaggcgctcgaggctctcatggtcaaccctgccctgaagcgcggcgacgatgagtgggtcgactacatcttctcgttggttgataaagtggattcctatattccagtcccgcagaggcagactgacctcccgttcttgctcgctgttgaagatgtcttctccatcaccggtcgtggtacagttgccactggccgtatagatcgtggcaccgtcaagattggtgacacagtcgatatcgtcggaatccgggacacccggaactgcacggtcactggtgttgagatgttccagaagaccatggatgatgccatggccggagacaatgttgggctgctgctccgtggtatgcagaaggatgacattgaaagaggcatggtgctggcaaagcctggctctatcacaccgcacaccaagtttgaggctgttgtgtatgtgcttaagaaggaagagggtggccgacactcacctttcttccctggttaccgcccacagttctacatgcggacaactgatgtgacagggagtgtgactacgattatgaatgacaaggatgaggaggcgaagatgtgcatgcctggtgaccgtatcaaaatgattgttcagctcatccagcctgttgcttgtgagcagggtatgaggtttgctatccgtgagggtggtaagaccgttggtgccggtgtcatcaacaaaatcattgagtaa

SEQ ID NO: 27864 - protein, 466 aa, Zea mays
MASLTSASTSLLFPQASSSRSRIRLSTPLGFSAQPARLRSQGAAVGARRRGRLLVVRAARGKFERTKPHVNIGTIGHVDHGKTTLTAALTMVLASVGGSAPKKYDEIDAAPEERARGITINTATVEYETETRHYAHVDCPGHADYVKNMITGAAQMDGAILVVSGADGPMPQTKEHILLAKQVGVPKIVVFLNKKDMVDDEELLELVELEVRELLSNYEYDGDDVPIVAGSALKALEALMVNPALKRGDDEWVDYIFSLVDKVDSYIPVPQRQTDLPFLLAVEDVFSITGRGTVATGRIDRGTVKIGDTVDIVGIRDTRNCTVTGVEMFQKTMDDAMAGDNVGLLLRGMQKDDIERGMVLAKPGSITPHTKFEAVVYVLKKEEGGRHSPFFPGYRPQFYMRTTDVTGSVTTIMNDKDEEAKMCMPGDRIKMIVQLIQPVACEQGMRFAIREGGKTVGAGVINKIIE

SEQ ID NO: 27865 - DNA, 1353 bp, Zea mays
  CDS (1)..(1353)
atggcttccaccgttgtgctccggaacgcctgctcccgccgactcttctgctactccactctccgcgccgccgcaatattgggacccgccgcgccacctgatgcgcccgcggcggcgtcggcccagccgccaccgatggcaggaaccctctgggcgaggtccatggccactttcacgcgcacgaagccacatgtgaacgtcggcaccattgggcacgtcgatcacggcaaaaccacactcactgctgccattaccaaggttctggcagaggcagggaaggccaaagcagttgcttttgacgagatcgacaaggccccggaagagagagccagaggaatcaccattgcaacagctcatgtcgagtatgagactgctaaaaggcattatgctcatgttgattgtccaggtcacgcagattatgtcaagaacatgatcactggagctgctcaaatggatggtggtattcttgtcgtgtcagctcctgatggcccaatgccacaaacaaaggagcacattcttcttgcccgtcaggttggtgtaccttcccttgtgtgtttcttaaacaaagttgatgctgttgatgacccagagctactggaacttgtagagatggagcttcgggagctcctcagtttctacaagttccctggtgatgagattccgatcatccgtgggtctgcgttgtctgctttgcaagggaacaacgatgagataggaaagaatgccattttgaaactaatggatgcagttgatgagtacattcctgatcctgtaaggcagcttgataaggctttcttgatgccgatagaagatgtgttttctatccagggtcgtggaactgttgttactgggcgtgttgagcagggaacaattaaaactggcgaagatgttgagatcttgggtttgacacagagtggtcccttgaagactacagttactggtgttgagatgttcaaaaagatactggaccatggagaggctggtgacaacgttggtcttcttcttcgtggtctaaagcgtggtgatgttgagcgtggccaggtggtgtgcaaacctggtagtctgaagacatacaaaaagtttgaggcagaaatatacgtcctgacaaaggatgaaggtggccggcacactgcctttgtcacaaattacacaccccaattctacttcaggactgctgatgtcactggaaaggttgagttgcttggtgagacgaagatggttttgcccggtgacaatgtaaccgcgaatttcgagttgatatcgcctgttcctcttgaaactgggcaaagatttgcgatgagggaaggagggagaacagttggtgccggggttgtctccaaagttattagctga

SEQ ID NO: 27866 - protein, 450 aa, Zea mays
MASTVVLRNACSRRLFCYSTLRAAAILGPAAPPDAPAAASAQPPPMAGTLWARSMATFTRTKPHVNVGTIGHVDHGKTTLTAAITKVLAEAGKAKAVAFDEIDKAPEERARGITIATAHVEYETAKRHYAHVDCPGHADYVKNMITGAAQMDGGILVVSAPDGPMPQTKEHILLARQVGVPSLVCFLNKVDAVDDPELLELVEMELRELLSFYKFPGDEIPIIRGSALSALQGNNDEIGKNAILKLMDAVDEYIPDPVRQLDKAFLMPIEDVFSIQGRGTVVTGRVEQGTIKTGEDVEILGLTQSGPLKTTVTGVEMFKKILDHGEAGDNVGLLLRGLKRGDVERGQVVCKPGSLKTYKKFEAEIYVLTKDEGGRHTAFVTNYTPQFYFRTADVTGKVELLGETKMVLPGDNVTANFELISPVPLETGQRFAMREGGRTVGAGVVSKVIS

SEQ ID NO: 27867 - DNA, 1344 bp, Zea mays
  CDS (1)..(1344)
atgggtaaagagaagtcacatttcaacattgtggtcattggacatgtcgactctggcaagtcgaccaccactggccacctgatctacaagctcggcggtattgacaagcgtgtgattgagaggttcgagaaagaggccgcggagatgaacaagcggtcattcaagtatgcctgggtgcttgacaagctcaaggccgagcgtgagagaggtatcacaattgatattgctttgtggaagttcgagaccaccaagtactactgcactgtcattgatgcccctggacaccgtgacttcatcaagaatatgattactggcacttcccaagctgactgcgctgttcttatcattgactccactactggtggttttgaggctggtatctccaaggatggacagacccgcgagcatgctctccttgctttcacgcttggagtgaagcagatgatttgctgttgcaacaagatggatgccaccacacccaagtactccaaggcccgttatgatgagattgtgaaggaagtctcttcctacctgaagaaggttggatacaaccctgacaagatccactttgttcccatctctggtttcgaaggtgacaacatgattgagaggtccaccaaccttgactggtacaagggcccaaccctacttgaggctttggacttgatcaatgagccgaagaggccttcagacaagcccctgcgtctccccctacaggatgtgtacaagattggtggtattggaactgttcctgttgggcgtgttgagactggtatcatcaagcctggtatggttgttacctttggtcctagtggccttactactgaggtgaagtctgttgaaatgcaccatgaggctctccaggaggcccttcctggtgacaatgttggcttcaatgttaagaatgttgctgtgaaggatctgaagcgtgggtatgtggcctccaactccaaggatgaccctgccaaggaggctgctagcttcacgtcccaggtcatcatcatgaaccaccctgggcagattggcaacggctatgccccagtgctggactgccacacctcgcacattgctgtcaagtttgcggagctcattaccaagattgataggcggtctggcaaagagcttgagaaggagcccaaattcctcaagaatggtgatgctggtatggtgaagatggttcccactaagcccatggtagtggagaccttttctgaatatcctcctcttggtcgctttgctgtccgtgacatgaggcaaacggtggctgtcggagtcatcaagagtgtggagaagaaggatccaactggagccaaggtgaccaaggctgccgcaaagaagaaatga

SEQ ID NO: 27868 - protein, 447 aa, Zea mays
MGKEKSHFNIVVIGHVDSGKSTTTGHLIYKLGGIDKRVIERFEKEAAEMNKRSFKYAWVLDKLKAERERGITIDIALWKFETTKYYCTVIDAPGHRDFIKNMITGTSQADCAVLIIDSTTGGFEAGISKDGQTREHALLAFTLGVKQMICCCNKMDATTPKYSKARYDEIVKEVSSYLKKVGYNPDKIHFVPISGFEGDNMIERSTNLDWYKGPTLLEALDLINEPKRPSDKPLRLPLQDVYKIGGIGTVPVGRVETGIIKPGMVVTFGPSGLTTEVKSVEMHHEALQEALPGDNVGFNVKNVAVKDLKRGYVASNSKDDPAKEAASFTSQVIIMNHPGQIGNGYAPVLDCHTSHIAVKFAELITKIDRRSGKELEKEPKFLKNGDAGMVKMVPTKPMVVETFSEYPPLGRFAVRDMRQTVAVGVIKSVEKKDPTGAKVTKAAAKKK

SEQ ID NO: 27869 - DNA, 1467 bp, Zea mays
  CDS (1)..(1467)
atgaacaagtcattgagctgttactattggcgacgactacaaagaattcggcgaccacgccgtctgccttctgcgcctccatttcggcctctgtcccttgcaagttcaatctcacctccaaccatgggtaaagagaagtcccacatcaacattgtggttattggccacgttgactctggcaagtcgaccaccacaggacacctgatctacaagcttggaggcattgacaagcgtgtgatcgagaggtttgagaaggaggctgctgaaatgaacaagcggtccttcaagtacgcatgggtgctcgacaagctcaaggctgagcgtgagagaggtatcaccattgatatcgctctgtggaagtttgagaccaccaagtactactgcacggtcattgatgcccctggacaccgtgacttcatcaagaacatgatcactggtacctcccaggctgactgtgctgtccttatcattgactccaccactggtggttttgaggctggtatctccaaggatggccagacccgtgaacatgctctccttgcgttcacccttggagtgaagcagatgatttgctgctgcaacaagatggatgcaaccactccgaaatactccaaggcacgttatgatgagattgtgaaggaagtctcatcctacctcaagaaagttgggtacaaccctgataagattgccttcgttcccatttctggttttgagggtgacaacatgattgagaggtccaccaaccttgactggtacaaaggcccaaccctgcttgaggctcttgaccagatcaccgagcccaagaggccttcggacaagcccctgcgtctgcccctccaggatgtgtacaagattggtggtattggaactgtaccggttggtcgtgtggagactggtgtcatcaagcctggtatggtagtcacctttggtccaactggcctgactactgaggtgaagtctgttgagatgcaccacgaggcgcttcaggaggctcttccgggcgacaatgttggcttcaacgtgaagaacgttgctgtcaaggatctcaagcgtgggttcgtggcctccaactccaaggatgaccctgccaaggaggctgccagcttcacctcccaggtcatcatcatgaaccaccctgggcagattggcaacggctatgccccagtgctggactgccacacctcccacatcgccgtcaagtttgctgagctcattaccaagatcgacaggcgatctggcaaggagctcgagaaggagcccaagttcctgaagaacggtgatgctggtatggtgaagatgattcccaccaagcctatggtggtggagacattctccgcgtatcctcccctgggtaggtttgccgtccgcgacatgaggcagacggttgctgttggagtcatcaagagtgtggagaagaaggacccaaccggcgccaaggtgaccaaggcggccgccaagaagaaatga

SEQ ID NO: 27870 - protein, 488 aa, Zea mays
MNKSLSCYYWRRLQRIRRPRRLPSAPPFRPLSLASSISPPTMGKEKSHINIVVIGHVDSGKSTTTGHLIYKLGGIDKRVIERFEKEAAEMNKRSFKYAWVLDKLKAERERGITIDIALWKFETTKYYCTVIDAPGHRDFIKNMITGTSQADCAVLIIDSTTGGFEAGISKDGQTREHALLAFTLGVKQMICCCNKMDATTPKYSKARYDEIVKEVSSYLKKVGYNPDKIAFVPISGFEGDNMIERSTNLDWYKGPTLLEALDQITEPKRPSDKPLRLPLQDVYKIGGIGTVPVGRVETGVIKPGMVVTFGPTGLTTEVKSVEMHHEALQEALPGDNVGFNVKNVAVKDLKRGFVASNSKDDPAKEAASFTSQVIIMNHPGQIGNGYAPVLDCHTSHIAVKFAELITKIDRRSGKELEKEPKFLKNGDAGMVKMIPTKPMVVETFSAYPPLGRFAVRDMRQTVAVGVIKSVEKKDPTGAKVTKAAAKKK

SEQ ID NO: 27871 - DNA, 21 bp, Artificial sequence
  primer
atggctaaggaaaagttcgag

SEQ ID NO: 27872 - DNA, 21 bp, Artificial sequence
  primer
ttactcgatgatcttggccac

SEQ ID NO: 27873 - protein, 552 aa, Artificial sequence
  consensus sequence
  Variant (2)..(2): Xaa in position 2 is any amino acid
  Variant (3)..(54): Xaa in position 3 to 54 is any or no amino acid
  Variant (56)..(56): Xaa in position 56 is any amino acid
  Variant (58)..(58): Xaa in position 58 is any amino acid
  Variant (60)..(61): Xaa in position 60 to 61 is any amino acid
  Variant (62)..(62): Xaa in position 62 is any or no amino acid
  Variant (68)..(68): Xaa in position 68 is any amino acid
  Variant (71)..(71): Xaa in position 71 is any amino acid
  Variant (72)..(73): Xaa in position 72 to 73 is any or no amino acid
  Variant (75)..(75): Xaa in position 75 is any amino acid
  Variant (77)..(92): Xaa in position 77 to 92 is any amino acid
  Variant (93)..(112): Xaa in position 93 to 112 is any or no amino acid
  Variant (114)..(117): Xaa in position 114 to 117 is any amino acid
  Variant (119)..(120): Xaa in position 119 to 120 is any amino acid
  Variant (126)..(133): Xaa in position 126 to 133 is any amino acid
  Variant (135)..(142): Xaa in position 135 to 142 is any amino acid
  Variant (143)..(143): Xaa in position 143 is any or no amino acid
  Variant (145)..(145): Xaa in position 145 is any amino acid
  Variant (149)..(149): Xaa in position 149 is any amino acid
  Variant (151)..(152): Xaa in position 151 to 152 is any amino acid
  Variant (159)..(160): Xaa in position 159 to 160 is any amino acid
  Variant (162)..(162): Xaa in position 162 is any amino acid
  Variant (164)..(164): Xaa in position 164 is any amino acid
  Variant (166)..(166): Xaa in position 166 is any amino acid
  Variant (168)..(172): Xaa in position 168 to 172 is any amino acid
  Variant (173)..(173): Xaa in position 173 is any or no amino acid
  Variant (175)..(183): Xaa in position 175 to 183 is any amino acid
  Variant (184)..(196): Xaa in position 184 to 196 is any or no amino acid
  Variant (199)..(201): Xaa in position 199 to 201 is any amino acid
  Variant (202)..(206): Xaa in position 202 to 206 is any or no amino acid
  Variant (209)..(215): Xaa in position 209 to 215 is any amino acid
  Variant (216)..(217): Xaa in position 216 to 217 is any or no amino acid
  Variant (220)..(220): Xaa in position 220 is any amino acid
  Variant (222)..(233): Xaa in position 222 to 233 is any amino acid
  Variant (234)..(244): Xaa in position 234 to 244 is any or no amino acid
  Variant (246)..(249): Xaa in position 246 to 249 is any amino acid
  Variant (251)..(254): Xaa in position 251 to 254 is any amino acid
  Variant (255)..(257): Xaa in position 255 to 257 is any or no amino acid
  Variant (259)..(261): Xaa in position 259 to 261 is any amino acid
  Variant (262)..(262): Xaa in position 262 is any or no amino acid
  Variant (264)..(267): Xaa in position 264 to 267 is any amino acid
  Variant (269)..(291): Xaa in position 269 to 291 is any amino acid
  Variant (292)..(321): Xaa in position 292 to 321 is any or no amino acid
  Variant (323)..(324): Xaa in position 323 to 324 is any amino acid
  Variant (326)..(326): Xaa in position 326 is any amino acid
  Variant (328)..(329): Xaa in position 328 to 329 is any amino acid
  Variant (331)..(331): Xaa in position 331 is any amino acid
  Variant (333)..(335): Xaa in position 333 to 335 is any amino acid
  Variant (337)..(338): Xaa in position 337 to 338 is any amino acid
  Variant (339)..(339): Xaa in position 339 is any or no amino acid
  Variant (342)..(343): Xaa in position 342 to 343 is any amino acid
  Variant (345)..(345): Xaa in position 345 is any amino acid
  Variant (346)..(347): Xaa in position 346 to 347 is any or no amino acid
  Variant (349)..(349): Xaa in position 349 is any amino acid
  Variant (353)..(354): Xaa in position 353 to 354 is any amino acid
  Variant (357)..(357): Xaa in position 357 is any amino acid
  Variant (359)..(359): Xaa in position 359 is any amino acid
  Variant (361)..(362): Xaa in position 361 to 362 is any amino acid
  Variant (364)..(364): Xaa in position 364 is any amino acid
  Variant (366)..(375): Xaa in position 366 to 375 is any amino acid
  Variant (376)..(381): Xaa in position 376 to 381 is any or no amino acid
  Variant (383)..(387): Xaa in position 383 to 387 is any amino acid
  Variant (390)..(399): Xaa in position 390 to 399 is any amino acid
  Variant (400)..(400): Xaa in position 400 is any or no amino acid
  Variant (404)..(404): Xaa in position 404 is any amino acid
  Variant (406)..(417): Xaa in position 406 to 417 is any amino acid
  Variant (418)..(420): Xaa in position 418 to 420 is any or no amino acid
  Variant (423)..(423): Xaa in position 423 is any amino acid
  Variant (425)..(448): Xaa in position 425 to 448 is any amino acid
  Variant (449)..(449): Xaa in position 449 is any or no amino acid
  Variant (451)..(455): Xaa in position 451 to 455 is any amino acid
  Variant (456)..(459): Xaa in position 456 to 459 is any or no amino acid
  Variant (461)..(461): Xaa in position 461 is any amino acid
  Variant (463)..(467): Xaa in position 463 to 467 is any amino acid
  Variant (469)..(485): Xaa in position 469 to 485 is any amino acid
  Variant (486)..(510): Xaa in position 486 to 510 is any or no amino acid
  Variant (513)..(522): Xaa in position 513 to 522 is any amino acid
  Variant (524)..(526): Xaa in position 524 to 526 is any amino acid
  Variant (528)..(530): Xaa in position 528 to 530 is any amino acid
  Variant (531)..(537): Xaa in position 531 to 537 is any or no amino acid
  Variant (541)..(541): Xaa in position 541 is any amino acid
  Variant (543)..(546): Xaa in position 543 to 546 is any amino acid
  Variant (549)..(550): Xaa in position 549 to 550 is any amino acid
MXXXXXXXXXXXXXXXXXXXXXXXXXXXXXXXXXXXXXXXXXXXXXXXXXXXXXKXHXNXXXIGHVDXGKXXXTXTXXXXXXXXXXXXXXXXXXXXXXXXXXXXXXXXXXXXDXXXXEXXRGITIXXXXXXXXTXXXXXXXXXDXPGHXDXXKNMITGXXQXDXAXLXXXXXXGXXXXXXXXXXXXXXXXXXXXXXLLXXXXXXXXGVXXXXXXXXXNKXDXXXXXXXXXXXXXXXXXXXXXXXEXXXXLXXXXXXXPXXXXPXXXXSXXXXXXXXXXXXXXXXXXXXXXXXXXXXXXXXXXXXXXXXXXXXXXXXXXXXXIXXPXRXXDXPXXXPXXXDVXXIXXXGXGTVXXGRXEXGXXKXGXXXXXXXXXXXXXXXXTXXXXXEMXXXXXXXXXXXGDNXGXXXXXXXXXXXXXXXRGXVXXXXXXXXXXXXXXXXXXXXXXXXXGXXXXXXXXXYXPXXXXXTXXXXXXXXXXXXXXXXXXXXXXXXXXXXXXXXXXXXXXXXXXGDXXXXXXXXXXPXXXEXXXXXXXXXXRFAXRXXXXTVXXGV

SEQ ID NO: 27874 - protein, 15 aa, Artificial sequence
  protein pattern
  Variant (2)..(2): Xaa in position 2 is Ala or Cys
  Variant (6)..(6): Xaa in position 6 is any amino acid
  Variant (8)..(8): Xaa in position 8 is Phe or Tyr
  Variant (9)..(9): Xaa in position 9 is Ile or Val
DXPGHXDXXKNMITG

SEQ ID NO: 27875 - protein, 21 aa, Artificial sequence
  protein pattern
  Variant (2)..(2): Xaa in position 2 is any amino acid
  Variant (4)..(4): Xaa in position 4 is Ile, Leu or Val
  Variant (5)..(5): Xaa in position 5 is Gly or Val
  Variant (6)..(6): Xaa in position 6 is Thr or Val
  Variant (12)..(12): Xaa in position 12 is any amino acid
  Variant (15)..(15): Xaa in position 15 is any or no amino acid
  Variant (18)..(18): Xaa in position 18 is any amino acid
  Variant (19)..(19): Xaa in position 19 is Gly, Ser or Thr
  Variant (20)..(20): Xaa in position 20 is any amino acid
  Variant (21)..(21): Xaa in position 21 is Ala or Leu
HXNXXXIGHVDXGKXTTXXXX

SEQ ID NO: 27876 - protein, 20 aa, Artificial sequence
  protein pattern
  Variant (3)..(3): Xaa in position 3 is Lys or Arg
  Variant (6)..(6): Xaa in position 6 is any or no amino acid
  Variant (9)..(12): Xaa in position 9 to 12 is any amino acid
  Variant (13)..(13): Xaa in position 13 is any or no amino acid
  Variant (16)..(17): Xaa in position 16 to 17 is any amino acid
  Variant (18)..(18): Xaa in position 18 is Ile, Leu or Met
  Variant (19)..(19): Xaa in position 19 is Ile or Val
  Variant (20)..(20): Xaa in position 20 is Cys or Val
QTXEHXLLXXXXXGVXXXXX

SEQ ID NO: 27877 - protein, 20 aa, Artificial sequence
  protein pattern
  Variant (2)..(2): Xaa in position 2 is any amino acid
  Variant (3)..(3): Xaa in position 3 is Ala or Leu
  Variant (4)..(4): Xaa in position 4 is any amino acid
  Variant (5)..(5): Xaa in position 5 is Ala or Glu
  Variant (7)..(7): Xaa in position 7 is Lys or Arg
  Variant (8)..(8): Xaa in position 8 is Ala or Glu
  Variant (14)..(14): Xaa in position 14 is Ala, Asp, Asn or Ser
  Variant (15)..(15): Xaa in position 15 is any amino acid
  Variant (16)..(16): Xaa in position 16 is Ala or Ser
  Variant (17)..(18): Xaa in position 17 to 18 is any amino acid
  Variant (19)..(19): Xaa in position 19 is Glu or Lys
  Variant (20)..(20): Xaa in position 20 is Phe or Tyr
DXXXXEXXRGITIXXXXXXX

SEQ ID NO: 27878 - protein, 18 aa, Artificial sequence
  protein pattern
  Variant (2)..(2): Xaa in position 2 is Phe or Leu
  Variant (3)..(3): Xaa in position 3 is any amino acid
  Variant (4)..(4): Xaa in position 4 is Leu or Met
  Variant (5)..(5): Xaa in position 5 is Ala, Pro or Ser
  Variant (6)..(6): Xaa in position 6 is Ile, Leu or Val
  Variant (7)..(7): Xaa in position 7 is Glu or Gln
  Variant (8)..(8): Xaa in position 8 is Ala, Asp, Glu, Asn or Ser
  Variant (10)..(11): Xaa in position 10 to 11 is any amino acid
  Variant (13)..(13): Xaa in position 13 is any amino acid
  Variant (15)..(15): Xaa in position 15 is any amino acid
PXXXXXXXVXXIXGXGTV

SEQ ID NO: 27879 - protein, 15 aa, Artificial sequence
  protein pattern
  Variant (2)..(3): Xaa in position 2 to 3 is any or no amino acid
  Variant (5)..(5): Xaa in position 5 is Cys or Gly
  Variant (7)..(7): Xaa in position 7 is Ile or Val
  Variant (9)..(9): Xaa in position 9 is Ile or Val
  Variant (10)..(10): Xaa in position 10 is any amino acid
  Variant (11)..(11): Xaa in position 11 is Ala, Asp, Gly or Ser
  Variant (12)..(12): Xaa in position 12 is Ala, Gly, Ser or Thr
  Variant (13)..(14): Xaa in position 13 to 14 is any amino acid
AXXDXAXLXXXXXXG

SEQ ID NO: 27880 - protein, 14 aa, Artificial sequence
  protein pattern
  Variant (2)..(2): Xaa in position 2 is Ala or Thr
  Variant (3)..(3): Xaa in position 3 is Ile, Leu or Val
  Variant (5)..(5): Xaa in position 5 is Asp or Glu
  Variant (6)..(8): Xaa in position 6 to 8 is any amino acid
  Variant (9)..(9): Xaa in position 9 is Asn or Thr
  Variant (11)..(11): Xaa in position 11 is any or no amino acid
  Variant (13)..(13): Xaa in position 13 is any or no amino acid
FXXRXXXXXVXAXG

SEQ ID NO: 27881 - protein, 18 aa, Artificial sequence
  protein pattern
  Variant (3)..(3): Xaa in position 3 is Ile or Val
  Variant (5)..(5): Xaa in position 5 is any amino acid
  Variant (7)..(7): Xaa in position 7 is any amino acid
  Variant (8)..(8): Xaa in position 8 is Ile, Leu or Val
  Variant (9)..(10): Xaa in position 9 to 10 is any amino acid
  Variant (12)..(13): Xaa in position 12 to 13 is any amino acid
  Variant (14)..(14): Xaa in position 14 is Ile, Leu or Val
  Variant (15)..(15): Xaa in position 15 is any amino acid
  Variant (16)..(16): Xaa in position 16 is Phe, Ile, Leu or Val
  Variant (17)..(17): Xaa in position 17 is Ala, Gly, Ile, Leu or Val
  Variant (18)..(18): Xaa in position 18 is Gly or Pro
GRXEXGXXXXGXXXXXXX

SEQ ID NO: 27882 - DNA, 744 bp, Azotobacter vinelandii
  CDS (1)..(744): transl_table=11
atggattacaactgggactggggcgtgttcttcaggtccaccgggatcggcgacgagatctacctcgactggttcgtcgccggcttcggctggaccctcgccgtcgccctggtcggctggatcatcgccctgctgctgggctcgctgctcggcgtgctgcgcaccctgccaaaccgctggctgtccggcatcgccagcgcctacgtggagctgtttcgcaacgtgccgctgctggtgcaactgttcctctggtacttcctggtgccggacctcttgcccacgccgctggagctgtggttcaagcaggacctcagcccggccacctcggcctacctgagcgtggtggtgtgcctcggcctgttcaccgccgcacgggtctgcgaacaggtacgcaccggcatccaggcgctgcccaggggccagaccgccgcggcccaggcgctgggcctgcggagcggacagatctaccgccaggtgctgctgccacaggcctttcgcatcatcatcccgccgctgacctcggagttcctcaacatcatcaagaactcctcggtggcttcgctgatcggcctgatggaactgctcgcgcagacccgccagacagcggaattcaccaccaacctgttcgaggccttcaccctggccacgctgatctacttcaccctgaacatgagcctgatgctgttcatgcgctggatcgagaaaaaggtcgcggtgccgggtctgatcgggggaggcaagtga

SEQ ID NO: 27883 - protein, 247 aa, Azotobacter vinelandii
MDYNWDWGVFFRSTGIGDEIYLDWFVAGFGWTLAVALVGWIIALLLGSLLGVLRTLPNRWLSGIASAYVELFRNVPLLVQLFLWYFLVPDLLPTPLELWFKQDLSPATSAYLSVVVCLGLFTAARVCEQVRTGIQALPRGQTAAAQALGLRSGQIYRQVLLPQAFRIIIPPLTSEFLNIIKNSSVASLIGLMELLAQTRQTAEFTTNLFEAFTLATLIYFTLNMSLMLFMRWIEKKVAVPGLIGGGK

SEQ ID NO: 27884 - DNA, 741 bp, Klebsiella pneumoniae subsp. pneumoniae MGH 78578
  CDS (1)..(741): transl_table=11
atgtcaatagactggaactgggggatattcctgcaacaggcccccttcggcaacactacctacctgggctggctgtggagcggttttcaaatcaccgtcgccctctccatctcggcctggatcatcgcttttctcgtcggctcactgttcggcattttacgcacggtacccaatcgcttcctctcgggcattggcacctgctatgtcgaactgtttcgcaacgtgccgctgatcgtgcagttctttacctggtacctggtggtgccggagttcctgccggaaaatatcggcatgtggtttaaatcggagctggacccaaacattcaattctttgtctcctccatgctgtgcctggggctgtttaccgccgctcgcgtctgcgagcaggtacgcgccgccatccagtcgctgccgcgcgggcagaagaacgccggcctggcgatgggcctgaccctgccgcaaacctaccgctacgtgctgctgccgaacgcctaccgcgttattgtgccgccgatgacctcggagatgatgaacctggtgaaaaactcggccatcgcctccaccatcggtctggccgatatggccgcgcaggcgggcaaactgctggactactccgctcatgcctgggagtcttttaccgccatcaccctggcctatgttttcatcaacgcggtgattatgctgattatgtatgtggtcgagcgtaaggttcgcctgcctggcaatatgggaggcaaataa

SEQ ID NO: 27885 - protein, 246 aa, Klebsiella pneumoniae subsp. pneumoniae MGH 78578
MSIDWNWGIFLQQAPFGNTTYLGWLWSGFQITVALSISAWIIAFLVGSLFGILRTVPNRFLSGIGTCYVELFRNVPLIVQFFTWYLVVPEFLPENIGMWFKSELDPNIQFFVSSMLCLGLFTAARVCEQVRAAIQSLPRGQKNAGLAMGLTLPQTYRYVLLPNAYRVIVPPMTSEMMNLVKNSAIASTIGLADMAAQAGKLLDYSAHAWESFTAITLAYVFINAVIMLIMYVVERKVRLPGNMGGK

SEQ ID NO: 27886 - DNA, 741 bp, Escherichia coli O157:H7 EDL933
  CDS (1)..(741): transl_table=11
  misc_feature (471)..(471): m is a or c
atgtctatagactggaactggggtatttttttacaacaagccccgttcggcaacaccacctatcttggttggatctggagtggttttcaggtgacgatcgctttgtcgatctgcgcctggattatcgctttcctcgtcggttcatttttcggtattttacgtaccgttccaaaccgttttctctccggtctgggtacgttgtatgtcgaactgttccgcaacgtgccgttgattgtgcaattctttacctggtatctggtgatcccggagctgctgccggagaaaatcggcatgtggtttaaggccgagctggatcccaatattcagtttttcctttcatccatgctctgcctggggctgtttaccgccgcccgtgtttgcgaacaggtacgcgccgcgattcagtcgctgccgcgtgggcagaagaatgccgcgctggctatgggtctgacgctgccgcaggcttaccgmtacgtactgctgcctaatgcttatcgcgttatcgtcccgccgatgacctcagagatgatgaacctggtgaaaaactccgccatcgcctcgaccatcggtctggtagatatggcagcgcaggcgagtaaattgctcgattactcggctcacgcctgggagtcgtttaccgccattacgctagcgtatgtgtttattaacgcttttatcatgctggtgatgacgctggttgaacgtaaagttcgcctgcctggcaacatggggggcaaataa

SEQ ID NO: 27887 - protein, 246 aa, Escherichia coli O157:H7 EDL933
MSIDWNWGIFLQQAPFGNTTYLGWIWSGFQVTIALSICAWIIAFLVGSFFGILRTVPNRFLSGLGTLYVELFRNVPLIVQFFTWYLVIPELLPEKIGMWFKAELDPNIQFFLSSMLCLGLFTAARVCEQVRAAIQSLPRGQKNAALAMGLTLPQAYRYVLLPNAYRVIVPPMTSEMMNLVKNSAIASTIGLVDMAAQASKLLDYSAHAWESFTAITLAYVFINAFIMLVMTLVERKVRLPGNMGGK

SEQ ID NO: 27888 - DNA, 669 bp, Escherichia coli O157:H7 EDL933
  CDS (1)..(669): transl_table=11
  misc_feature (144)..(144): m is a or c
atgcaagaaagtatacaactggttattgattccttgccgttcctgctgaaaggggctgggtatacgctgcaactcagtatcggcggcatgttttttggtttactgctagggtttattctcgcgctgatgcgcctgtcgccaatmtggcccgtgcgctggctggcgcgtttttatatctctatttttcgtggtacgccgctcatcgcacaactgtttatgatctattacggcctgccgcagtttggtatcgaattagatcccattccgtcagcaatgattggtctgtcgctcaacactgccgcctatactgccgaaacgcttcgcgccgccatttcttctattgataaaggtcagtgggaagcagctgccagtattggtatgacgccatggcagactatgcgtcgcgcgattttgccacaggcggcgcgggtggcgttgccgccgctctcgaacagctttatcagtctggtaaaagatacgtcgctggccgcgacaatccaggtgccggagctgttccgtcaggcgcagttgattacctcgcgtacgctggaggtattcaccatgtatctggcggcttcgctcatctactggatcatggcgactgtgttatcgacgttgcagaaccattttgagaatcaacttaatcgccaggagagagaacccaaatga

SEQ ID NO: 27889 - protein, 222 aa, Escherichia coli O157:H7 EDL933
MQESIQLVIDSLPFLLKGAGYTLQLSIGGMFFGLLLGFILALMRLSPIWPVRWLARFYISIFRGTPLIAQLFMIYYGLPQFGIELDPIPSAMIGLSLNTAAYTAETLRAAISSIDKGQWEAAASIGMTPWQTMRRAILPQAARVALPPLSNSFISLVKDTSLAATIQVPELFRQAQLITSRTLEVFTMYLAASLIYWIMATVLSTLQNHFENQLNRQEREPK

SEQ ID NO: 27890 - DNA, 693 bp, Agrobacterium tumefaciens str. C58
  CDS (1)..(693): transl_table=11
atgatgtatggttacgaatgggacacgaccacctggatcacctacacaacctcgatcctgcccatcattctgatcggcctgaccgtaacgctgaaagcagccgccgccggttttgccatcgcgcttgttctggggctggtttttgcgctgctacgccgcagccgggtgaagttgatttcctggccgaccgcggtggttgtcgaattccttcgcgatacgccgcttctggtgcagcttttcttcctctattacgtgcttccggaattcggcatcgttctgccggcgtttctcaccggtgcgctggcgctcggcctgcaatatgccgcctatacctccgaggtctatcgcggtggcatggaggcggtgcatcacggccagtgggaagcggcgacggcgcttaatctcacgcgcatgcagacctatcgggacatcatcatcccgcaggccatcccgcgcatcgtcccggccatgggcaactatcttgtcgccatgatcaaggaaacgccggtgctttccgtcgtcacggttctcgagatgatggggctggcaaatatgatcggcgagcgcaccttcgaatatctggtgccactgacgcttgtcggtctgatcttccttctcctgaccataatctgctcggcaggcctcagccgcctgcaaagggcgcttccaaaagcaggaataccgttgcgatga

SEQ ID NO: 27891 - protein, 230 aa, Agrobacterium tumefaciens str. C58
MMYGYEWDTTTWITYTTSILPIILIGLTVTLKAAAAGFAIALVLGLVFALLRRSRVKLISWPTAVVVEFLRDTPLLVQLFFLYYVLPEFGIVLPAFLTGALALGLQYAAYTSEVYRGGMEAVHHGQWEAATALNLTRMQTYRDIIIPQAIPRIVPAMGNYLVAMIKETPVLSVVTVLEMMGLANMIGERTFEYLVPLTLVGLIFLLLTIICSAGLSRLQRALPKAGIPLR

SEQ ID NO: 27892 - DNA, 705 bp, Agrobacterium tumefaciens str. C58
  CDS (1)..(705): transl_table=11
atgtcctatacatttcaattcggcgcacttgcccaatatcagaacgaattgttgagcggcatatggctgacgatcaagctatcggtcctctccatcgtgctcggctgtgctttcggcattcttctggcctcactgcggtccatcaatggcggcatcgtccgcatcatcgtggacggctatgtcgaggtgatccgcaacacgccatttctggtgcagctctttatcgtctatttcggcctgccgggtctcggctttcgcgttggagccgatacggcagcacttatcggcatgacgatcaatcttgccgcctactcgacggaaatcatccgcgccggcatcgaggcggtgcacaagtcgcagatcgaggctggcgaggcgctcggatttacgaagtaccagatctatcgccacgttatcatcgtgccagcgattgccaaggtctatccttcgctgtgcagccagttcgtgctgatgatgctggcatcgagcatatgttcggccatttccacccatgaactcgcggccgccgcagccttcgtggaatcgcagacctatcgctccttcgaggtctatatcgtcgtcacgctcatctatcttgcgctggcgctcagcctgcggctcatccttgcccttgtcggcatgtggctgttcggccgccgcgtggcccgcaagacgatgaccgccttgccggaggtgcagtcatga

SEQ ID NO: 27893 - protein, 234 aa, Agrobacterium tumefaciens str. C58
MSYTFQFGALAQYQNELLSGIWLTIKLSVLSIVLGCAFGILLASLRSINGGIVRIIVDGYVEVIRNTPFLVQLFIVYFGLPGLGFRVGADTAALIGMTINLAAYSTEIIRAGIEAVHKSQIEAGEALGFTKYQIYRHVIIVPAIAKVYPSLCSQFVLMMLASSICSAISTHELAAAAAFVESQTYRSFEVYIVVTLIYLALALSLRLILALVGMWLFGRRVARKTMTALPEVQS

SEQ ID NO: 27894 - DNA, 651 bp, Agrobacterium tumefaciens str. C58
  CDS (1)..(651): transl_table=11
atggcatcaatcggtcccaacgaactcttcttcctgatgcaaggcctgaaatggacccttgcgctgaccttgatcggcttcataggcggcggtgtcttcggcctttgcgtggcgctggcccgcgtcgcggacagcccggcaatccagcgtgcgagcatggctttcatcgccgttttccagggcacgccgctcctgatgcagcttttcgtggtttattacggcgtggcgcttgcgggcctcaacgtcgatgcctggatcgcggtcgccattgcctttaccctgcatgccagcgccttcctcggcgaaatctggcgcggcggcatccaggcagtgccgaagggccagaccgaggctgccaatgcgctcggcctgcattacgtgtcacgcatgaaggacgtggttctgccgcaggccttcaagatttcgctgccggccaccatcggtttcctcgtgcagctcatcaagggcacctcgcttgcggcaatcgtcggcttcgtcgagctgtcgcgcgccggccagatcgtctccaaccagacgttccgtccgctcaccgtcttcgccatcgtcggcatcatttatttcctgatctgctggccgctttccctgtggggcgccggcgttgaaaagcggctgcaggccgcatcccgctaa

SEQ ID NO: 27895 - protein, 216 aa, Agrobacterium tumefaciens str. C58
MASIGPNELFFLMQGLKWTLALTLIGFIGGGVFGLCVALARVADSPAIQRASMAFIAVFQGTPLLMQLFVVYYGVALAGLNVDAWIAVAIAFTLHASAFLGEIWRGGIQAVPKGQTEAANALGLHYVSRMKDVVLPQAFKISLPATIGFLVQLIKGTSLAAIVGFVELSRAGQIVSNQTFRPLTVFAIVGIIYFLICWPLSLWGAGVEKRLQAASR

SEQ ID NO: 27896 - DNA, 708 bp, Agrobacterium tumefaciens str. C58
  CDS (1)..(708): transl_table=11
gtgagcggctttgatctttcggctatcctgagcaatcaggaatatatcgcgatgctgctgcacggcatcgagatgaccttcattatcttcatcggttcgtggtcgcttgccatgtcgctcgcgctcatcctgctctgcatccgcttttcgccttcccgcttcggagatcggctggtcgcagcctatgtttcctatcatcgcaacgtgccgacgctggtgcagttgatgctatggtacttcggcatcttcactctgttgccttccggcctgacaggctggctgacggaacataacgcagaagcaatcttcgcggtggttggcctcggcctgtgtcaggcggcgtatttcagtgaggatctgcgttccggtctgcgctcggtcagtccggggcagatggaagcggcaaaggcgctgggacacagctatctctcggcgatgcgtttcatcatcatgccgcagggcgtgcgcaacgcgctgcctccgctcatcaatcacagcgtctccctgttcaagaacagtagtctggcgcttgtcatcggcgcgtctgaattgacccatgcggtcaaggaaatcgaaaatctgagtttccagaccttcgaaatctacctcgtcggcacggttctctatctcttcttttcgctgttgatcatgggggccggcgcctatctgtccatgcgccttgatccggcctggagggcgcgcgcatga

SEQ ID NO: 27897 - protein, 235 aa, Agrobacterium tumefaciens str. C58
MSGFDLSAILSNQEYIAMLLHGIEMTFIIFIGSWSLAMSLALILLCIRFSPSRFGDRLVAAYVSYHRNVPTLVQLMLWYFGIFTLLPSGLTGWLTEHNAEAIFAVVGLGLCQAAYFSEDLRSGLRSVSPGQMEAAKALGHSYLSAMRFIIMPQGVRNALPPLINHSVSLFKNSSLALVIGASELTHAVKEIENLSFQTFEIYLVGTVLYLFFSLLIMGAGAYLSMRLDPAWRARA

SEQ ID NO: 27898 - DNA, 702 bp, Agrobacterium tumefaciens str. C58
  CDS (1)..(702): transl_table=11
ttggagaaagacgtgaagggttggaactgggaaggtttcttcgaatatctgacgaattattatctgttcgagggcgcgctggtgacgctcggtctcacggtgtttgccatgacggcgggtcttgcgctgggtttcgtcattgcggtcatgcgcatgtctaaataccggttcttgtccggtccggcctatttctacacctggatctttcgcggcactccgcttctggtgcagctcatcatcatctataccggcctgccgcaaatgggcatcaagctgacggtgctgcaatccacccttatcggcctgtcgctctgcgaagcggcctatctttctgaaatcgtccgggcgggcatcgccgccgtgccgaagggccagatcaatgcggcgcgggccatcggcatgaccgaggcgcaggtgatgcgctacatcgttgccccgcaggccttccgcatcatcatcccgccgcttggcaactccgtgaacggcgttttgaagacgacatcgatcgcctcgatcatttccatggaggagcttctgcgccgcacgcaggtgctcattcaggaaaagttcctcgtgctggagctgttcaccgtcgcggcgctttattatctggccatgacgaccgcctgggaactcattcagcgccgtatcgagaagcgcttcggcaaggcctatggtcccatgtcgactgacatacattaa

SEQ ID NO: 27899 - protein, 233 aa, Agrobacterium tumefaciens str. C58
MEKDVKGWNWEGFFEYLTNYYLFEGALVTLGLTVFAMTAGLALGFVIAVMRMSKYRFLSGPAYFYTWIFRGTPLLVQLIIIYTGLPQMGIKLTVLQSTLIGLSLCEAAYLSEIVRAGIAAVPKGQINAARAIGMTEAQVMRYIVAPQAFRIIIPPLGNSVNGVLKTTSIASIISMEELLRRTQVLIQEKFLVLELFTVAALYYLAMTTAWELIQRRIEKRFGKAYGPMSTDIH

SEQ ID NO: 27900 - DNA, 744 bp, Agrobacterium tumefaciens str. C58
  CDS (1)..(744): transl_table=11
atgcaggattcgtttacagcgcgcttcattgaactcgccgcgcatctcggcctcaactatgattttctgaacagcggttacgaggttcagatctggcttgatggcatgaagatgacgctcatcctcgtcgccgttaccttgccgctcagcctcgttttcggcttcattttcgcggccatgctcacgtcaggcaaagtctggctcgccggtcccgtgcgcgcctatgtcgaactgacacgcaacacgccgacgctggtacagctgatgtgcggtttcctcgtgctcaacatgctgatttccaatgcgctgggcggtgcgcagaacaatccgctgacaccttttttctgggttgttgccatcacctgcctgcacgttgccgccttccatgcggaagcgttgcgtggcggtatcgaggcggtgccgaccaccaccatcgaggcggcgcgcgccatcggtttcagttcgctggagattttgcgttacgtcgagtttccgctggcaatccgcacggcgctcccctcgatcatcaacaatctcgtcaacctggtgaagctcacaacggtcggttcggcgattgcggtgggtgaaatcacctatgcctcgatcctgatctggacgcagcgcgacaatgtggtcgagttgatgctcgtcatcctcatcttcttcagcgtcatcaatttcatcgtcgcaagggccggtctctggcttgaacgacgccttgcggttccggggttcggccaatga

SEQ ID NO: 27901 - protein, 247 aa, Agrobacterium tumefaciens str. C58
MQDSFTARFIELAAHLGLNYDFLNSGYEVQIWLDGMKMTLILVAVTLPLSLVFGFIFAAMLTSGKVWLAGPVRAYVELTRNTPTLVQLMCGFLVLNMLISNALGGAQNNPLTPFFWVVAITCLHVAAFHAEALRGGIEAVPTTTIEAARAIGFSSLEILRYVEFPLAIRTALPSIINNLVNLVKLTTVGSAIAVGEITYASILIWTQRDNVVELMLVILIFFSVINFIVARAGLWLERRLAVPGFGQ

SEQ ID NO: 27902 - DNA, 855 bp, Agrobacterium tumefaciens str. C58
  CDS (1)..(855): transl_table=11
atggcactctttgcgcaaccgatcagcatgaccgtcgccccgccaaacggcaaacctgtacggtggggccaacttgcaactggcagcatcgcgatcctcatgctggccctcatgaccttggctatcgggcgcaatcagagcgtccagtggagcgagatcccgcgctacatgatcgaccccgtcattcttggcggcgtcattctgaccctcgaactgacagccggcgccatggtcgccggcatcatcatcggttgtctcgtcgccgtcatggcaacgagccagaacatcgttctcaaggcgatcgccgtcgcctttgtctggtggtttcgcggcgtaccgctaatcgttcagatattcttctggttcaacatcgcgctcttcgtccccgagatcggatttggttcatggtcggtttcggtaaacgacatcgtaacacccgctttcgcaggctttttggcgctgggtctgcacgaggcggcaaatatgagtgagatcattcgcagcggcctgactgccgtggatcggggacagcgcgaggccgcatcgtctctgggcctcagaccactacagactctgcgaaccgtggtcctccctcaggcaatacgtctgatcgtgccgccgaccggaaaccaggcgattggcatgctgaaggcgagtgccatcgtctcggttatcggcatgcaggatttgttgacgcaggcgcaggccatctacgcccgtaacttcctggtcatcgaactcctgtgcgttgcctcgctttggtatcttgggatcaccacgatcgcatcgataggccagcactatctggaacggaaactcgcgccgaaaggccgctcgaacagcgacaagatttga

SEQ ID NO: 27903 - protein, 284 aa, Agrobacterium tumefaciens str. C58
MALFAQPISMTVAPPNGKPVRWGQLATGSIAILMLALMTLAIGRNQSVQWSEIPRYMIDPVILGGVILTLELTAGAMVAGIIIGCLVAVMATSQNIVLKAIAVAFVWWFRGVPLIVQIFFWFNIALFVPEIGFGSWSVSVNDIVTPAFAGFLALGLHEAANMSEIIRSGLTAVDRGQREAASSLGLRPLQTLRTVVLPQAIRLIVPPTGNQAIGMLKASAIVSVIGMQDLLTQAQAIYARNFLVIELLCVASLWYLGITTIASIGQHYLERKLAPKGRSNSDKI

SEQ ID NO: 27904 - DNA, 741 bp, Yersinia pestis CO92
  CDS (1)..(741): transl_table=11
atggcaatagactggaactggggcatttttttacagccagcccctttcggcaataccacctatctcggttggatttggtccggctttcaggtcacggtcgcattatcattatgtgcttgggtgatcgccttcttcgtcggttcactatttggtattttaagaacggtgcccaaccgaatcctttcaggaataggggcttgttacgttgaattgtttcgtaacgtaccactgatcgtgcaatttcttacctggtatctggtggttcccgaactattgccagtgaaccttggcacatggtttaaaagtgaactggcacccaatatacagttcttcctctcatctatgatttgccttggattattcactgcggcgcgggtttgtgaacaggttcgcgcaggaattcaatcactgcctcgtggtcaaaaagcagcgggcctggcaatggggctcaccctcacacagacttaccgctatgttttactgcccaatgcatatcgggtgattattcccccgatgacctcagaaatgctcaatctggtaaaaaactccgcaattgcctcaaccatcgggctagtcgaaatggcggcacaagcgggtaaattgctggattattcagcgcatgcctatgaatccttcaccgccatcaccctaggttatgtactgatcaatgccgtgatcatgctgttaatgcgcttagttgaaaagaaagtgcaattacccggcaatctggggagtaaataa

SEQ ID NO: 27905 - protein, 246 aa, Yersinia pestis CO92
MAIDWNWGIFLQPAPFGNTTYLGWIWSGFQVTVALSLCAWVIAFFVGSLFGILRTVPNRILSGIGACYVELFRNVPLIVQFLTWYLVVPELLPVNLGTWFKSELAPNIQFFLSSMICLGLFTAARVCEQVRAGIQSLPRGQKAAGLAMGLTLTQTYRYVLLPNAYRVIIPPMTSEMLNLVKNSAIASTIGLVEMAAQAGKLLDYSAHAYESFTAITLGYVLINAVIMLLMRLVEKKVQLPGNLGSK

SEQ ID NO: 27906 - DNA, 675 bp, Salmonella typhimurium LT2
  CDS (1)..(675): transl_table=11
atgtacgaatttgactggagttcgattatcccctcactgccttacctactggccgggttggtcatcacgctgaagatcaccgtcaccgccgttatcgtggggatagtctggggaaccattctggccgtcatgcgcctctcaagctttgcccctatcgcctggtttgctaaagcgtatgttaacgttttccgttccatcccgttggtgatggtcttgctgtggttctatctgattgtacccggctttctgcaaaacgtgctgggactatcgccgaaaaccgatatccgcctgatctccgcgatggtggcattctccatgtttgaagcggcctactattccgagattattcgcgccggtattcaaagtatttcccgcgggcagtccagcgccgcgctggcgctggggatgacccactggcagtcgatgaagctcattattctgccgcaggcgtttcgggcgatggtgccgctgttgcttacgcagggcatcgtgctatttcaggacacctctttagtttatgtactcagcctggcggacttcttccgcaccgcgtcgactatcggcgagcgtgacggtactcaggtcgaaatgattctgttcgccggcgccgtttattttgttatcagcctgagcgcgtcgttgctggtcagctatttgaagaaaaggactgtttaa

SEQ ID NO: 27907 - protein, 224 aa, Salmonella typhimurium LT2
MYEFDWSSIIPSLPYLLAGLVITLKITVTAVIVGIVWGTILAVMRLSSFAPIAWFAKAYVNVFRSIPLVMVLLWFYLIVPGFLQNVLGLSPKTDIRLISAMVAFSMFEAAYYSEIIRAGIQSISRGQSSAALALGMTHWQSMKLIILPQAFRAMVPLLLTQGIVLFQDTSLVYVLSLADFFRTASTIGERDGTQVEMILFAGAVYFVISLSASLLVSYLKKRTV

SEQ ID NO: 27908 - DNA, 741 bp, Salmonella typhimurium LT2
  CDS (1)..(741): transl_table=11
atgtcaatagactggaactggggtatttttttacaggaagcccccttcggcaataccacctatctcggctggctatggagtggttttcaggtcaccgtcgccctttcgattaccgcctggattatcgctttcctggtaggatctattttcggcattttacgtaccgttcccaaccgtttcctctccggactgggcacgttgtacgtagaactgttccgtaatgtgccgctgatcgtgcaattcttcacctggtacctggtggtgcctgaactgttgccggaagatcttggcatgtggtttaaggcggaactcgatcccaatattcagtttttcctctcctcaatgatctgtctgggactgtttaccgccgcccgcgtttgcgaacaggtgcgcgccgcgattcagtctctgcctcgcgggcagaagaacgcggcgctggcgatggggctaacgctgccgcaggcttatcgctatgtcctgctgccgaatgcctatcgcgttatcgtaccgccaatgacgtcagagatgatgaacctggtgaaaaactcggctattgcctcaaccatcggcctggtggatatggcggcgcaggcaggcaaactgttggattactcggcgcacgcctgggaatccttcaccgccattacgctggcctatgtgctgattaacgccgttatcatgctggtcatgagcctggttgaacgcaaagtccgcctgccgggcaacgtggggagcaaataa

SEQ ID NO: 27909 - protein, 246 aa, Salmonella typhimurium LT2
MSIDWNWGIFLQEAPFGNTTYLGWLWSGFQVTVALSITAWIIAFLVGSIFGILRTVPNRFLSGLGTLYVELFRNVPLIVQFFTWYLVVPELLPEDLGMWFKAELDPNIQFFLSSMICLGLFTAARVCEQVRAAIQSLPRGQKNAALAMGLTLPQAYRYVLLPNAYRVIVPPMTSEMMNLVKNSAIASTIGLVDMAAQAGKLLDYSAHAWESFTAITLAYVLINAVIMLVMSLVERKVRLPGNVGSK

SEQ ID NO: 27910 - DNA, 669 bp, Salmonella typhimurium LT2
  CDS (1)..(669): transl_table=11
atgcttgagtatttacctgaactgctaaaagggctacacaccagcctgacgctgaccgtggcttctattgccgtcgctttggtgctggcgttagtttttaccatcatcctgacgctaaaaacaccgttcgtggtgtggctggtgcgcggctatatcacgctgtttaccggtacgccgttgttggtgcaaattttcctgatctactacggacccggtcaattcccgacgctgcaagagtatccactactctggcatctactgtctgaaccgtggctgtgcgcactgatcgcgttgtcgctaaacagcgccgcttacaccacgcagctattttatggcgcgattcgcgcgattccggaaggtcagtggcagtcctgtagcgcgctggggatgagtaagaaagatacgctggcgattttgttgccctatgcgtttaaacgcgccctctcctcctattctaatgaggtggtactggtcttcaaaagtacctcgctggcctataccatcaccttgatggaagtcatggggtacagtcagttgctctatggtcgtacctacgatgtggtggtatttggcgcggcaggcgtaatttacctggtcgtcaacggtctattgacgctgatgatgcgtttgattgagcgtaaagctctggcgtttgagcggcgcaattaa

SEQ ID NO: 27911 - protein, 222 aa, Salmonella typhimurium LT2
MLEYLPELLKGLHTSLTLTVASIAVALVLALVFTIILTLKTPFVVWLVRGYITLFTGTPLLVQIFLIYYGPGQFPTLQEYPLLWHLLSEPWLCALIALSLNSAAYTTQLFYGAIRAIPEGQWQSCSALGMSKKDTLAILLPYAFKRALSSYSNEVVLVFKSTSLAYTITLMEVMGYSQLLYGRTYDVVVFGAAGVIYLVVNGLLTLMMRLIERKALAFERRN

SEQ ID NO: 27912 - DNA, 669 bp, Salmonella typhimurium LT2
  CDS (1)..(669): transl_table=11
atgcaagaaagtatccaactggttattgaatcgctgccgtatttgcttaaaggcgccgtctttaccctgcaactgagtattggcggtatgttttttggtctgctgctgggatttgtgctggcgctgatgcggatgtctccgctatggccggttcgctggctggcgcgcttttatatctcgatttttcgcggtacgccgcttatcgcccagttatttatgatctattacggcctgccgcaatttggtattgagctggaccctatcccggcggcgatgattggtttatcgctcaataccgcggcttacacgtccgagacgctgcgcgcggcgatctcggctatcgacaagggacaatgggaagcggcggcgagcattggcatgacgccgtggcaaacgctacgtcgcgctattttgccgcaggccgctcgcgtcgcgcttccgccgttgagcaacagctttatcagcctggtgaaagatacgtcgctcgccgcgacgattcaggtgccggagttgttccgccaggcgcagttaattacctcgcgaacgctggaggtgtttaccatgtatctggccgcgtcgttaatctactgggtaatggcgaccgtcttatcggcactgcaaaactattttgaaaaccagcttaaccgccaggagagagagccaaaatga

SEQ ID NO: 27913 - protein, 222 aa, Salmonella typhimurium LT2
MQESIQLVIESLPYLLKGAVFTLQLSIGGMFFGLLLGFVLALMRMSPLWPVRWLARFYISIFRGTPLIAQLFMIYYGLPQFGIELDPIPAAMIGLSLNTAAYTSETLRAAISAIDKGQWEAAASIGMTPWQTLRRAILPQAARVALPPLSNSFISLVKDTSLAATIQVPELFRQAQLITSRTLEVFTMYLAASLIYWVMATVLSALQNYFENQLNRQEREPK

SEQ ID NO: 27914 - DNA, 729 bp, Ralstonia solanacearum GMI1000
  CDS (1)..(729): transl_table=11
atgaattaccactggaactggggcgtcttcttcaccgaagccgcgcagaatcagacctaccttgactggctgctttcggggttgaagaccacgatcgcgctgggcctgtcctcctggatcatcgcgctcgtccttggctccgtgctgggcgtgctgcgcaccgtgcccagcaaggcgctgtcgggccttgccacggcctacgtggagctgttccgcaacatcccgctgatcgtgcagctgttcatctggtatttcgtcatgccggaactggtgccgggcggcgactacatcaagcagatgaaccccgccacggcgatgttcctgtgcgcgatgctgtgcctcggtacttttaccgcggcgcgggtgtgcgaacaggtgcgctcgggcatcaactcgctgccgcgcggccagcgcaacgccggcctggcgatgggcttcacgctggcgcagacgtaccgccacgtcatgctgccgatggcgttccgcatcatcgtgccgccgctcacctccgagttcctgaacatcttcaagaactccgcggtggcgtcgaccatcggtctgctggagctcgcggcacaggggcgccaactggtggactacaccgcgcagccctacgagtcgttcatcgccgtgacactgatgtacatgctgatcaacctgaccgtcatgggaatcatgcgctgggttgaagcacgtacccggctgcccggtttcatcggcggcaagtaa

SEQ ID NO: 27915 - protein, 242 aa, Ralstonia solanacearum GMI1000
MNYHWNWGVFFTEAAQNQTYLDWLLSGLKTTIALGLSSWIIALVLGSVLGVLRTVPSKALSGLATAYVELFRNIPLIVQLFIWYFVMPELVPGGDYIKQMNPATAMFLCAMLCLGTFTAARVCEQVRSGINSLPRGQRNAGLAMGFTLAQTYRHVMLPMAFRIIVPPLTSEFLNIFKNSAVASTIGLLELAAQGRQLVDYTAQPYESFIAVTLMYMLINLTVMGIMRWVEARTRLPGFIGGK

SEQ ID NO: 27916 - DNA, 672 bp, Agrobacterium tumefaciens str. C58
  CDS (1)..(672): transl_table=11
gtgaaatacacattcgattttggatggcttctcgaatattacccgcagatcgccaagggcattgccatcacgctggaattgattgccattggcggcgttcttggcatcgcgctcggcatattctgcgcctgggtgcgcgcgctcgggcccaaatggctgcggccgccggttgcgacctatgtggagctcattcgcaatacgccatttctcatacaactgttttttatcttcttcggcctgccgtcgcttggcctgcaactgtcggaactgagcgcggccaacattgccatggtggtcaatctcggtgcttatagctgcgaaatcattcgcgccggcattcaggcgacgcccaaggggcagtttgaggcgggagcaagccttgccatgacccgtttcgaaaccttccggcatgtggtgctggtgccgtccctgcaacgcatctggccggcgctgtcgtcgcaggtggtgatcgtcatgctcggctcgtccgttgtgtcgcagatcgctgccgaagacctgacctttgccgccaatttcatccagtcgcgcaccttccgcgccttcgaagcctacatggtctccaccgtcatctatcttgtgctggccattctcttgaggcagttgctggtcatgggcggcaacctcatttttccgcgcaggagtgtccgatga

SEQ ID NO: 27917 - protein, 223 aa, Agrobacterium tumefaciens str. C58
MKYTFDFGWLLEYYPQIAKGIAITLELIAIGGVLGIALGIFCAWVRALGPKWLRPPVATYVELIRNTPFLIQLFFIFFGLPSLGLQLSELSAANIAMVVNLGAYSCEIIRAGIQATPKGQFEAGASLAMTRFETFRHVVLVPSLQRIWPALSSQVVIVMLGSSVVSQIAAEDLTFAANFIQSRTFRAFEAYMVSTVIYLVLAILLRQLLVMGGNLIFPRRSVR

SEQ ID NO: 27918 - DNA, 660 bp, Agrobacterium tumefaciens str. C58
  CDS (1)..(660): transl_table=11
atgatcgaattctccacctgggatattctcagaaacctgttgctcgccacgcgctggaccgttctgctgtcgctcgtttcctttgccggcggcggtctcgtggcgctgcttctgctgttcatgcgcatttcccgcaaaaaatcgatgcgggttttcgcgcgctattatgtcgagcttttccagggaacgccgcttttgatgcagcttttcatcgcctttttcggcctcggcctcgtcggcatcgatgtgccggcctggctggcggcgggcctgacgctgatcctgtgggcggctgcctttcttaccgaaatctggcgcggctgtgtcgaatccgtcgcgaaaggccaatgggaggcgtcggcaagccttgccatgggacgcctgcaacagatgcgctacgtcatcctgccgcaggctatgcgggtggccattccgccgaccgtcgggtttttcgtacaggttatcaagggaacggctgtaacgtcgatcatcggcttcgtggaactgtccaaggctggcacggtcgtcaccaacgccaccttccagcccttcactgtttatggcctcgtcgccctcatctatttcgcgctgtgctggcctctgtcgaagagcagccagatcctcgaaaggaagctcaatgtcgctcatcgaaatcactga

SEQ ID NO: 27919 - protein, 219 aa, Agrobacterium tumefaciens str. C58
MIEFSTWDILRNLLLATRWTVLLSLVSFAGGGLVALLLLFMRISRKKSMRVFARYYVELFQGTPLLMQLFIAFFGLGLVGIDVPAWLAAGLTLILWAAAFLTEIWRGCVESVAKGQWEASASLAMGRLQQMRYVILPQAMRVAIPPTVGFFVQVIKGTAVTSIIGFVELSKAGTVVTNATFQPFTVYGLVALIYFALCWPLSKSSQILERKLNVAHRNH

SEQ ID NO: 27920 - DNA, 831 bp, Agrobacterium tumefaciens str. C58
  CDS (1)..(831): transl_table=11
atgagccatatccaggaactcattccgccgcggcccgcccccgttgtcgccgacaagccgctcaatctttcccgcgtcgtcggcattgccgtcatcacgctttggctgctgctcgccgccgggctgatcttcgccatgatcgaaggctgggactgggataaattccaacgttatggccctcgttacatcgatggcctcatcaccaccatcacgctggtcggcagctcgatcattctcggcgcaatcctgtccgtgccgatcgcctttgcccgcatgtcggaaaaccgcatcatcggcgcgttcgcttatgcctatgtctatgtgttccgcagcacgccgttgctcgcacagctcttcctgatctattacggccttggcagcttccgcccggcgctggaagccgtcgatctgtggtggttcttccgcgaagcctggtattgcggcctcctgtcgctaacgctcaacaccgccgcctatcaggccgagatcctgcgcggcgccatccggagcgtgccgcgcggccagcatgagggggccgcctccctcggcatttcgaaattcattaccttccgcaaggtcatcctgccgcaggcgctgatcgtcgcattgcgcccctatggcaacgagatcatcctgatgatcaagggctcggcagtcgtttccatcgtcacggtcttcgacctgatgggacagacccgttacgccttttcccgcaccttcgattatcaggcctatctctgggccgcgatcttctacctgacgatcgtcgaaacgctgcggcatatctgggcgtggctggaagcccgcctgacgcgacacctcaagcgctga

SEQ ID NO: 27921 - protein, 276 aa, Agrobacterium tumefaciens str. C58
MSHIQELIPPRPAPVVADKPLNLSRVVGIAVITLWLLLAAGLIFAMIEGWDWDKFQRYGPRYIDGLITTITLVGSSIILGAILSVPIAFARMSENRIIGAFAYAYVYVFRSTPLLAQLFLIYYGLGSFRPALEAVDLWWFFREAWYCGLLSLTLNTAAYQAEILRGAIRSVPRGQHEGAASLGISKFITFRKVILPQALIVALRPYGNEIILMIKGSAVVSIVTVFDLMGQTRYAFSRTFDYQAYLWAAIFYLTIVETLRHIWAWLEARLTRHLKR

SEQ ID NO: 27922 - DNA, 951 bp, Corynebacterium glutamicum ATCC 13032
  CDS (1)..(951): transl_table=11
atgtcagatcttaatcaagggcctggagcttcaacggcccaaccgaaaccgattgaagccaagccactacgccaccctggccggtgggtcgcagccgctatcatcgtggcactgctcgcatggtttatcatcagcgcgctcaacaatgaggcctacggttgggatacctaccgctcgtatctttttgacacccgcattgccaccgcggcacttcacaccattgcgctgaccttgctgtccatgatcttgggtgtggttctcggcgcaatcttggccgtcatgcgtatgtccggcaaccctgtcatgcagggcgtagcgtggctgtacctgtggattttccgcggcaccccaatttatgtgcagttggtgttctggggcctgctgggttccttgtaccagtcgatcaacctcggtttcgcagagatcgatctgcaaagcttgctgtctaatatgttcctgctcgcggtgatcggtctgggtctcaacgaggctgcgtacatggcggaaatcgtgcgctcgggcatccaagcggtgcctgagggccagatggaggcgtcgaaagctttgggtatgaactggtcaatgaccatgcgtcgcaccatcttgccgcaggccatgcgcatcatcattccgccaaccggcaatgaactgatctccatgctcaagaccacctctctggttgttgcgattccttattctctcgagctgtacggccgcagcatggatattgcgtactccctcttcgagccagttccaatgcttctggttgctgcgagctggtacttggtcatcacctctattcttatggttggtcagtactacctggagaagcacttcgaaaagggcagcacccgcaccctgaccgcacgtcagctcgctgcgttggctgatgctgaaggcgcaatcccgggcaatgtcaccgttgttcctgaaacttccaaggagaactag

SEQ ID NO: 27923 - protein, 316 aa, Corynebacterium glutamicum ATCC 13032
MSDLNQGPGASTAQPKPIEAKPLRHPGRWVAAAIIVALLAWFIISALNNEAYGWDTYRSYLFDTRIATAALHTIALTLLSMILGVVLGAILAVMRMSGNPVMQGVAWLYLWIFRGTPIYVQLVFWGLLGSLYQSINLGFAEIDLQSLLSNMFLLAVIGLGLNEAAYMAEIVRSGIQAVPEGQMEASKALGMNWSMTMRRTILPQAMRIIIPPTGNELISMLKTTSLVVAIPYSLELYGRSMDIAYSLFEPVPMLLVAASWYLVITSILMVGQYYLEKHFEKGSTRTLTARQLAALADAEGAIPGNVTVVPETSKEN

SEQ ID NO: 27924 - DNA, 951 bp, Streptomyces coelicolor A3(2)
  CDS (1)..(951): transl_table=11
gtgactgttgacatcgacaagacggcgggcggcccggccggcaccccgccgaccccgcccgaggccatcaaggccatcccggtgaggcactacgggcggtacgtctccgcggtcgtcgcgatcgcgctgctggccgcggtcgtctacgccttctcccagggcaagatcaactggggcgcgatcccggactacttcttcgacgaccgtgtcctgaccggcatgggcaagacgctcctgatcaccgtcctcgcgatgctgatcggtgtcgtcggcggcatcctgctcgccgtgatgcggctgtcgaagaacccggtgacctcgtccatcgcgtggttctacatctggttcttccgcggcaccccggtcctggtgcagctggtggtctggttcaacctcggcctggtcttcgagtacatcaacctcggcccgttctaccgcgacgagtggtcggacttcatgacgccgttcctgacggcgctgctcggcctcggcctcaacgaggcggcgtacatggcggagatctgccgcgccggcctgctcgcggtcgacgagggccagaccgaggcggcgcacgcgctcggcatgagccacaccaagacgctgcgccggatcgtggtcccgcaggcgatgcgcgtgatcgtgccgccgacgggcaacgaggtcatcaacatgctgaagacgacctcgctggtgtcggtcgtccagtacgccgagttgttcagagtcgcccaggacatcggccagacctctggcgcaccggccgagatgctgttcctcgcggcggcctggtacctgctgctgacctccgtcttcagcgtcggccagtactacctggagcgctactacgcccgcggctccagccgcagtctgccgcccaccccgatgcagaagatcagggccaacctgttctccctgtcgaaccgctccagcacgacgggaggtgcggcatga

SEQ ID NO: 27925 - protein, 316 aa, Streptomyces coelicolor A3(2)
MTVDIDKTAGGPAGTPPTPPEAIKAIPVRHYGRYVSAVVAIALLAAVVYAFSQGKINWGAIPDYFFDDRVLTGMGKTLLITVLAMLIGVVGGILLAVMRLSKNPVTSSIAWFYIWFFRGTPVLVQLVVWFNLGLVFEYINLGPFYRDEWSDFMTPFLTALLGLGLNEAAYMAEICRAGLLAVDEGQTEAAHALGMSHTKTLRRIVVPQAMRVIVPPTGNEVINMLKTTSLVSVVQYAELFRVAQDIGQTSGAPAEMLFLAAAWYLLLTSVFSVGQYYLERYYARGSSRSLPPTPMQKIRANLFSLSNRSSTTGGAA

SEQ ID NO: 27926 - DNA, 900 bp, Streptomyces coelicolor A3(2)
  CDS (1)..(900): transl_table=11
atgagttccgttctctacgacgcgcaggggccgcgcgccaagcgacgcaacgtcgtgttcacggccgtcttcgtggtggtcgtcctggccctgctgtggtgggtctacgcgaccctcgacgagaagggccagctcgagtgggcgaagtggcagatgttcttcaccagcgacgagccctggtcgacgtacatctggcccggcctgcagaacaccctcaaggccgcggctctctccatggtcatcgcgctgccgctcggtgccgtgctcggcatcgcccggctgtcggaccacgcgtgggtccggatcccggtcgcgatcgtggtggagttcttccgctcgatccccgtgctggtcctgatgatcttcggtctggccctgttcgccgagtacaccgacgtcagttcggacgaccgtccgctgtacgcggtcgtcacgggcctggtgctgtacaacgcctccgtcctcgcggagatcgtccgggcaggcatcctcgcgctgcccaaggggcaggccgagggagcgatggcgatcgggttgcgcaaggggcagtcgatgcggctgatcctgctgccgcaggcggtcaccacgatgctcccggccatcgtcagccagctcgtcgtgatcctcaaggacaccgcgctcggtggtgcggtcctcaccttccccgagctgctcgcctcggccaacacgatgagcggctactacggcgccaacgtgatcgccagcttcaccgtggtcgcggtgatctacatcgcgctcaacttctccctcaccaccttcgcgagctggctggagcgccggctgcggcgggcgaagaagtcgaccggtgcggtgctcaaggcggacgacgccgggatccccggcggtgcggccaccggtgccggtgggggcggcaactga

SEQ ID NO: 27927 - protein, 299 aa, Streptomyces coelicolor A3(2)
MSSVLYDAQGPRAKRRNVVFTAVFVVVVLALLWWVYATLDEKGQLEWAKWQMFFTSDEPWSTYIWPGLQNTLKAAALSMVIALPLGAVLGIARLSDHAWVRIPVAIVVEFFRSIPVLVLMIFGLALFAEYTDVSSDDRPLYAVVTGLVLYNASVLAEIVRAGILALPKGQAEGAMAIGLRKGQSMRLILLPQAVTTMLPAIVSQLVVILKDTALGGAVLTFPELLASANTMSGYYGANVIASFTVVAVIYIALNFSLTTFASWLERRLRRAKKSTGAVLKADDAGIPGGAATGAGGGGN

SEQ ID NO: 27928 - DNA, 669 bp, Streptomyces coelicolor A3(2)
  CDS (1)..(669): transl_table=11
gtgttcgactttcttcaggattacgacctgttgggagccttctggacgacagtgcagctcgctgcactctcagccgtcggctccctgatctggggcaccatactggccgccatgcgcgtcggcccggtgccgttgatgcgcggcctcggcgccgcgtacgtgaacaccgtgcggaacatcccgctcaccgtcatcatcttgttcgcgtccctcggtctcaaccagaccctcggcgtcacactcggcggcggcgacagcttcgagacgatcaacttccggctcgccgtcctgggtctggtcctctacacctcggccttcgtgtgtgaagccctgcgttccggcatcaacaccgtgcccgtcggtcaggcggaggcggcccgggcgatcgggctgagcttcggtcaggtgctgcgcctggtggtgctgcctcaggcgttccgctccacggtcggcccgctggcgaacgtactgatcgcactcatcaagaacaccacggtcgccgcggccatcggcgttgccgaagccgccgcgctgatgaaggacatgatcgagaacgaggcgcagctgctgctgatctccgcgatcatcgccgtcggcttcgtgatcctgacgctgccgaccggtctgatcctcggctgggtgggcaagaaggtggcggtgaagcgatga

SEQ ID NO: 27929 - protein, 222 aa, Streptomyces coelicolor A3(2)
MFDFLQDYDLLGAFWTTVQLAALSAVGSLIWGTILAAMRVGPVPLMRGLGAAYVNTVRNIPLTVIILFASLGLNQTLGVTLGGGDSFETINFRLAVLGLVLYTSAFVCEALRSGINTVPVGQAEAARAIGLSFGQVLRLVVLPQAFRSTVGPLANVLIALIKNTTVAAAIGVAEAAALMKDMIENEAQLLLISAIIAVGFVILTLPTGLILGWVGKKVAVKR

SEQ ID NO: 27930 - DNA, 741 bp, Shigella flexneri 2a str. 301
  CDS (1)..(741): transl_table=11
atgtctatagactggaactggggtatttttttacaacaagccccgttcggcaataccacctatcttggttgggtctggagtggttttcaggtgacgatcgctttgtcgatctgcgcctggattatcgctttcctcgtcggttcatttttcggcattttacgtaccgttccaaaccgttttctctccggtctgggtacgttgtatgtcgaactgttccgcaacgtgccgttgattgtgcaattctttacctggtatctggtgatcccggagctgctgccggagaaaatcggcatgtggtttaaggccgagctggatcccaatattcagtttttcctttcatccatgctctgcctggggctgtttaccgccgcccgtgtttgcgaacaggtacgcgccgctattcagtcgctaccgcgtgggcagaagaatgccgcgctggcgatgggcctgacgctaccgcagacttatcgatacgtactgctgcctaatgcttatcgcgttatcgtcccgccgatgacttccgagatgatgaacctggtgaaaaactccgccatcgcctcgaccatcggtctggtggatatggcggcgcaggcgggtaaattgctcgactactcggctcacgcctgggagtcgtttaccgccatcacgcttgcgtatgtgttgattaacgcttttatcatgctggtgatgacgctggttgaacgtaaagttcgcctgcccggcaacatggggggcaaataa

SEQ ID NO: 27931 - protein, 246 aa, Shigella flexneri 2a str. 301
MSIDWNWGIFLQQAPFGNTTYLGWVWSGFQVTIALSICAWIIAFLVGSFFGILRTVPNRFLSGLGTLYVELFRNVPLIVQFFTWYLVIPELLPEKIGMWFKAELDPNIQFFLSSMLCLGLFTAARVCEQVRAAIQSLPRGQKNAALAMGLTLPQTYRYVLLPNAYRVIVPPMTSEMMNLVKNSAIASTIGLVDMAAQAGKLLDYSAHAWESFTAITLAYVLINAFIMLVMTLVERKVRLPGNMGGK

SEQ ID NO: 27932 - DNA, 669 bp, Pseudomonas putida KT2440
  CDS (1)..(669): transl_table=11
atgatcgctgaaagcctgcaactcgttgtcgactccgcgcccttcctgctgaagggcgcgggttatacggtgctgctcagtgtcggcggcatgttcttcggtctggtgctgggctttgccctggcgctgatgcggctgtcgaagattctgccgctgaactggctggcgcgggtctacgtgtcgttcttccgcggcacgccgctgctggtgcagctgttcgtcatctatttcggcatgccgcaaatcggcatcgagctggacccgatccccgcttcgctgatcggcctgtcgctgaacatggcggcctatatctgcgagatcctgcgcgcagccatttcctcgatcgaccggggccagtgggaagcagccgccagcatcggcatgacccgcgtgcaagccatgcgccgggcgatcctgccacaggccttgcgcaccgcgttgccaccgctgggcaacagcttcatctcgctggtaaaggacaccgccctggcggcgaccatccaggtgcccgagctgttccgccaagcccagctgattaccgcgcgcacgttcgaagtgttcaccatgtacgtggcggtcgcggtcatctactgggtgctgtgcagcatccttgcgcacttccagaaccgcatggaagcgcgggtcaaccagcatgaccaggagcattga

SEQ ID NO: 27933 - protein, 222 aa, Pseudomonas putida KT2440
MIAESLQLVVDSAPFLLKGAGYTVLLSVGGMFFGLVLGFALALMRLSKILPLNWLARVYVSFFRGTPLLVQLFVIYFGMPQIGIELDPIPASLIGLSLNMAAYICEILRAAISSIDRGQWEAAASIGMTRVQAMRRAILPQALRTALPPLGNSFISLVKDTALAATIQVPELFRQAQLITARTFEVFTMYVAVAVIYWVLCSILAHFQNRMEARVNQHDQEH

SEQ ID NO: 27934 - DNA, 690 bp, Pseudomonas putida KT2440
  CDS (1)..(690): transl_table=11
atgaattgggaagtcatcttcaaatggctgccacgcctggccgaaggcgcgaccctgacccttgagctggtggccatcgccgtggttgccgggttgatcctggccataccgctgggcatcgcccgctcctcgcgccactggtacgtgcgcgcggtgccgttcagctacattttcttcttccgtggcacgccgctgctggtgcaattgttcctggtctattacggcctggcgcagttcgatgcggtgcgctccagttcgctgtggccgtacctgcgcgatccgttctggtgcacggtgctgaccatgaccctgcacaccgctgcgtacatcgccgagattctgcgtggcgcgctgcaggcgatccctaaaggtgagattgaagcggcacgggcgctgggcatgtcgcgtggcaaaacgctgttctacatcatgctgccacgcgctgcgcgcatcggcctgccggcgtacagcaacgaagtgatcctgatgctcaaggccagtgccctggccagtaccgtgaccctgctggaactgaccggcatggcccgtaccatcatcgcccgcacctacctgccggtggaaatcttcttcgccgcaggcgtgttctacctggtgatctcgttcatgctggtgcaaggcttcaagctgctggagcgctggttgcgcgtggatgcctgccaaggccgctga

SEQ ID NO: 27935 - protein, 229 aa, Pseudomonas putida KT2440
MNWEVIFKWLPRLAEGATLTLELVAIAVVAGLILAIPLGIARSSRHWYVRAVPFSYIFFFRGTPLLVQLFLVYYGLAQFDAVRSSSLWPYLRDPFWCTVLTMTLHTAAYIAEILRGALQAIPKGEIEAARALGMSRGKTLFYIMLPRAARIGLPAYSNEVILMLKASALASTVTLLELTGMARTIIARTYLPVEIFFAAGVFYLVISFMLVQGFKLLERWLRVDACQGR

SEQ ID NO: 27936 - DNA, 693 bp, Pseudomonas putida KT2440
  CDS (1)..(693): transl_table=11
atgaatatcgacctgcacggattcggtccggccatgatggccggcaccctgatgaccgtaaaactggcgctttgcgccttgctgctggggctggtcctgggcctgctcggcgccctggccaagacctccccgttcaagccgctgcaatggcttggcggcttctactcgaccctggttcgcggcgtgcccgaactgctgtgggtactgcttatctatttcggcaccgtcgggctgatgaacagcctcggcgaagccctgaacatgcccggccttgagctcagcgcctttgccgcgggcgtgatcgccctgggcctgtgctttggcgcctacgccaccgaagtgttccgtggcgctatcctggcgatccccaagggccaccgcgaagccggcctggcgctgggcttgtcaaagggccgcatcctctcgcggatcatcctgccgcagatgtggcgcatcgccctgcccggccttggcaacctgttcatgatcctgatgaaggacaccgccctggtatcggtaatcggccttgaagaaatcatgcgtcattcgcaaattggcgtgaccgtgaccaaagagccgttcaccttctacatggtcgcggcctgcatctacctgggcctgaccgtgcttgccatgaccggtatgcatttcatggaaaaacgcgccgctcgcggctttgcgagggctgaataa

SEQ ID NO: 27937 - protein, 230 aa, Pseudomonas putida KT2440
MNIDLHGFGPAMMAGTLMTVKLALCALLLGLVLGLLGALAKTSPFKPLQWLGGFYSTLVRGVPELLWVLLIYFGTVGLMNSLGEALNMPGLELSAFAAGVIALGLCFGAYATEVFRGAILAIPKGHREAGLALGLSKGRILSRIILPQMWRIALPGLGNLFMILMKDTALVSVIGLEEIMRHSQIGVTVTKEPFTFYMVAACIYLGLTVLAMTGMHFMEKRAARGFARAE

SEQ ID NO: 27938 - DNA, 822 bp, Pseudomonas putida KT2440
  CDS (1)..(822): transl_table=11
atgagcaccttccctcactcccccaagcccgtggcaaagcctgcgggcgccggcctgttcggctttcgcacccggttactgctgacctggctggcgctgttcgggctgtttgtcgccttcttcctcagctttgacctgaagttcgccatcattctggagaagtttcccaacctggccggtttcaagctggggcccaatggttttctgcaaggcgccgcactgaccctgttcctgtgcctgtgctcgatggtggtatccgtgctgctcggctttgccgccgcgctggcacggttatccaacagcgcggtgctggtgggtgtggccagcttctacacctcgttcttccgtggcacgccgctgctgatccagattctgctgatctacctggggctgccgcaggtgggcctggtacccggcgccatcagcgccggcatcattgccttgtcgctgaactacggggcctacctgagcgagatcttccgcgccggcatcctcggcgtggcccgtgggcaacgtgaagcagcattggcgctgggcatgcgcacgccgcagatcttctgccacatcatcctgccccaggccatgcgggtgatcattccgcccaccgccaaccagttcatttcgatgctcaaggactcgtcgctgatttccgtgatgggggtttgggaggtgatgtttctggcgcagtcgtatgggcgttcgagctatcgctacctggaaatgctgaccaccgccgccgtgatctactgggtgctgtcgatactgctggagctgctgcaggcgcgcctggaacggcattttggcaaggcttatcagcgctga

SEQ ID NO: 27939 - protein, 273 aa, Pseudomonas putida KT2440
MSTFPHSPKPVAKPAGAGLFGFRTRLLLTWLALFGLFVAFFLSFDLKFAIILEKFPNLAGFKLGPNGFLQGAALTLFLCLCSMVVSVLLGFAAALARLSNSAVLVGVASFYTSFFRGTPLLIQILLIYLGLPQVGLVPGAISAGIIALSLNYGAYLSEIFRAGILGVARGQREAALALGMRTPQIFCHIILPQAMRVIIPPTANQFISMLKDSSLISVMGVWEVMFLAQSYGRSSYRYLEMLTTAAVIYWVLSILLELLQARLERHFGKAYQR

SEQ ID NO: 27940 - DNA, 672 bp, Pseudomonas putida KT2440
  CDS (1)..(672): transl_table=11
atggaaatggatttcagcgaaatcatccccgccctgcctgccctctgggagggcatggtcatgaccctcaaactgatggtcatgggagtcatcggcggtatcgtgctgggcaccatcctggcactgatgcgcctgtcgtcaagcaaactgctgtcgaacctggccggcgcctacgtcaactacttccgctcgattccgctgctgctggtgatcacctggttctacctggcggtaccgttcgtgctgcgctggatcaccggcgaagataccccggtgggtgccttcacctcctgcgtggtcgccttcatgatgttcgaggccgcgtatttctgcgaaatcgtccgcgccggtgtgcagtcgatctccaagggccagatgggcgccgcacaagcgctgggcatgaactacgcgcagaccatgcgcctgatcatcctgccccaggccttccgcaagatgaccccgctgctgctgcagcagagcatcatcctgttccaggacacctcgctggtatacaccgtgggcctggtcgacttcctcaactcggcacgctccaacggcgacatcatcgggcgctcccatgagttcctgatcttcgccggcgtcgtctacttcctcatcagcttctccgcttcgtggctggtcaagcgcctgcaaaaaaggatctccgtatga

SEQ ID NO: 27941 - protein, 223 aa, Pseudomonas putida KT2440
MEMDFSEIIPALPALWEGMVMTLKLMVMGVIGGIVLGTILALMRLSSSKLLSNLAGAYVNYFRSIPLLLVITWFYLAVPFVLRWITGEDTPVGAFTSCVVAFMMFEAAYFCEIVRAGVQSISKGQMGAAQALGMNYAQTMRLIILPQAFRKMTPLLLQQSIILFQDTSLVYTVGLVDFLNSARSNGDIIGRSHEFLIFAGVVYFLISFSASWLVKRLQKRISV

SEQ ID NO: 27942 - DNA, 747 bp, Pseudomonas putida KT2440
  CDS (1)..(747): transl_table=11
atgaattacaactgggactggggcgtgttcttcaagtccaccggcgtgggcagcgaaacctatctggactggtacatcaccggcctgggctggaccatcgccatcgccatcaccgcctggatcatcgcgctgctgctggggtcgctcctcggtgtcatgcgtaccgtaccgaaccgcctggtatcgggtatcgccaccgcctacgtggaactgttccgcaacgtgccactgctggtgcaactgttcatctggtacttcctggtaccggacctgctgccagaaggcttgcaggaatggttcaagcaggacctcaacccgaccacttcggcgctgatcagcgtggtcatctgcctgggcctgttcaccgccgcgcgcgtctgtgagcaagtgcgtaccggtatccaggcgctgcccaaaggccaggaagctgccgcccgcgccatgggcttcagcctcccgcagatctacaacaatgtgctgctgccgcaagcctaccggatcatcattccgccgctcacctccgagttcctcaacgtattcaagaactcctcggtggcgtcgctgatcggcctgatggagctgctcgcgcagaccaaacagaccgcagagttttccgccaacctgttcgaggcgttcaccttggccacgctgatctacttcaccctgaacatgggcctgatgctgctcatgcgcatggtcgagaagaaagtcgccgtgcctggcctgatttccgtggggggcaagtaa

SEQ ID NO: 27943 - protein, 248 aa, Pseudomonas putida KT2440
MNYNWDWGVFFKSTGVGSETYLDWYITGLGWTIAIAITAWIIALLLGSLLGVMRTVPNRLVSGIATAYVELFRNVPLLVQLFIWYFLVPDLLPEGLQEWFKQDLNPTTSALISVVICLGLFTAARVCEQVRTGIQALPKGQEAAARAMGFSLPQIYNNVLLPQAYRIIIPPLTSEFLNVFKNSSVASLIGLMELLAQTKQTAEFSANLFEAFTLATLIYFTLNMGLMLLMRMVEKKVAVPGLISVGGK

SEQ ID NO: 27944 - DNA, 657 bp, Pseudomonas putida KT2440
  CDS (1)..(657): transl_table=11
atggcagatttactaccacttatgctccagggcgcatgggttaccctgcagatcaccttcttcggatctctcctggccatcgttgcagcgaccctggcggcactcggcaaaatgtcgacatggagaccgctccgctggttttgcgtcgtctacattgagatctttcggggtacgtcgctgctcgttcaattgttctggctcttcttcgtccttccgcttcctccattcaatctcgagctgagcccctacaccgtcgcaatcgttggccttgggctacatattggcgcttatggtgcagagataatgcgcggcgcgattaattcggtagctaaaggtcaatatgaagcttgcacagcacttaactttcgcccattcacacgctttcgtcgcatcattttgccgcaagccctgctcgcagcgatggggcctggaactaatctgctgatcgagctgttgaaaaacacatcccttgtttcccttataacgcttgcagatttgagcttcagggcgcgccaactcgatcaggctacattcgagactctcaaggtcttcgccctagcgctgctcatgtacttcgtaatggcccaagcgattaacttggcaatgcggcgtttagagcgacatctggcccgtggtcgtgtccaagggagcctgtga

SEQ ID NO: 27945 - protein, 218 aa, Pseudomonas putida KT2440
MADLLPLMLQGAWVTLQITFFGSLLAIVAATLAALGKMSTWRPLRWFCVVYIEIFRGTSLLVQLFWLFFVLPLPPFNLELSPYTVAIVGLGLHIGAYGAEIMRGAINSVAKGQYEACTALNFRPFTRFRRIILPQALLAAMGPGTNLLIELLKNTSLVSLITLADLSFRARQLDQATFETLKVFALALLMYFVMAQAINLAMRRLERHLARGRVQGSL

SEQ ID NO: 27946 - DNA, 642 bp, Pseudomonas putida KT2440
  CDS (1)..(642): transl_table=11
atgaaagacatcctgatgatgctgttgaacggcataccctggaccattgccgttaccgtgctcgcattctgtgtcggcgtagtgctggggtttcccatctgtgccctgcgcatgtccagggtcaaggtgctgagcattctggctgccatgctggtgctgaccctgcgctcaatccccccgattgtctggctgtttttcatcttcttcggcatcggtggcggctatatcagcctgtcgccgtttaccgcagcggtggttggcctggggctgatcacggcggcgcatatgtccgaggtgtaccgcggtgcgttcgcggccattcccgccggccagttcgaagccgcctatgtgcttaacctgtcggcgccgcaacggtttttcgatgtggtgttgccgcaattggtgcgtatcgccattcccacctcagccacctacgccattggcctgctcaaggactcggccgtggcctcgacgattggcgttggtgaaatcagctttcaggcttaccaggtttcacagcaaacctttcagggcctgagcgtctacaccgcggcggcggtggtgtacctggtgctcagcgtgccagtggccttgttctctcgttggctgtcggccacgttgaaacagaggattgcccgatga

SEQ ID NO: 27947 - protein, 213 aa, Pseudomonas putida KT2440
MKDILMMLLNGIPWTIAVTVLAFCVGVVLGFPICALRMSRVKVLSILAAMLVLTLRSIPPIVWLFFIFFGIGGGYISLSPFTAAVVGLGLITAAHMSEVYRGAFAAIPAGQFEAAYVLNLSAPQRFFDVVLPQLVRIAIPTSATYAIGLLKDSAVASTIGVGEISFQAYQVSQQTFQGLSVYTAAAVVYLVLSVPVALFSRWLSATLKQRIAR

SEQ ID NO: 27948 - DNA, 963 bp, Pseudomonas putida KT2440
  CDS (1)..(963): transl_table=11
gtgatcaaacacaagaaagcccagtggccttggcatgggttgactgccctggtcctggtaggcctggcgctcagcctttacatggccacctcgatgatttcctacgagtggcgctggaaccgcgtaccgcagtacttcgcctacaaggccgaggaaacacaacgcgctgccggctacggcactgtgcaggaaatcgtcatttccggtgacaacgcccgcgtcacgctgaaggacgaaagtggtgccgagcaagtgctcgatgtggacaaggacagcctgcaactgagccgcggcgacgatgttgccgaaggcgaccagatcggggtaacccgccattgggccgcgggcccgctggcatggggcctgtggaccaccttgtggatctcggtggtgtccggggcgctgggcctggtgatcggcctgttcgccggattgtgccggttgtcgaacaacccgaccctgcgcgacctgtcgaccgtgtatgtcgagctggtgcgcggcacgccgctgctggtgcaaatcttcatcttctacttcttcatcggcaccgtgctcaacctgtcccgcgagtttgccggggtagcggcgctggcattgttcaccggtgcttacgtggccgagatcgtccgtgcaggcgtgcagtcgatcgccaaaggtcagaacgaggctgcccggtcgctgggcctgaacgctggccagtcgatgcgccatgtgatcttgccgcaggccttcaagcgcgtgcttccgcccctggccggccagttcatcagcctggtcaaggacacctcgctggtgtcggtgatcgccatcaccgaactgaccaagagtggccgtgaggctatcaccacctcgttctctactttcgagatctggttctgcgtggcaggcctgtacctgctgatcaacctgccgctgtcgcacatcgccagccggctcgagcggaggcttgcgcaaagtgattga

SEQ ID NO: 27949 - protein, 320 aa, Pseudomonas putida KT2440
MIKHKKAQWPWHGLTALVLVGLALSLYMATSMISYEWRWNRVPQYFAYKAEETQRAAGYGTVQEIVISGDNARVTLKDESGAEQVLDVDKDSLQLSRGDDVAEGDQIGVTRHWAAGPLAWGLWTTLWISVVSGALGLVIGLFAGLCRLSNNPTLRDLSTVYVELVRGTPLLVQIFIFYFFIGTVLNLSREFAGVAALALFTGAYVAEIVRAGVQSIAKGQNEAARSLGLNAGQSMRHVILPQAFKRVLPPLAGQFISLVKDTSLVSVIAITELTKSGREAITTSFSTFEIWFCVAGLYLLINLPLSHIASRLERRLAQSD

SEQ ID NO: 27950 - DNA, 795 bp, Bradyrhizobium japonicum USDA 110
  CDS (1)..(795): transl_table=11
atgttcgcggtgctctttgaacagacggcggatggccagcgctacatcgactggcttctgtcgggcctcggctggaccctggccctggcgttcttcggctggtggattgcctttgcgatcgggatcgtcgtcgggatcggccgcaccgtgcagaaccgggccatcgctgcgcttgcgcgcctgtatgtggagattttccgcaacatccccgtcctggcgcagatgtttctctggtacttcgtcctgccggagattcttcccgtcacgctcggaaatgccatcaagcagattccgccgccctggggatcattcgtccccgcacttctgtgcctcggcctctacaccgcggcccggatcgccgagcaggttcgggccgggatcgaggccctgccgagagggcagaccgaggcggcaagcgcactcggactcaccgcctatctgacctaccgccatatcatcgtgccgcaggcgctgcgtttgatcgtgccaagcctcaccagcgaggtgatgggcatctacaagaacacctcggtcgcactgacgatcgggctgatggagctcacggctcaggcgcgccagatcagcgaggcgacgttccagaccttcacggctttcggcgccgcgaccctgatctatctcgcgctggcgctgatcgcctatcaggggatggcgctgatcgacagggccgtgcgcattccgggcacagggcgtgcggaggatgcgatcgagccgagcctggccgacgacgtcgggcaggccggctcgttgccctcagggatggaggtcgtgaaatga

SEQ ID NO: 27951 - protein, 264 aa, Bradyrhizobium japonicum USDA 110
MFAVLFEQTADGQRYIDWLLSGLGWTLALAFFGWWIAFAIGIVVGIGRTVQNRAIAALARLYVEIFRNIPVLAQMFLWYFVLPEILPVTLGNAIKQIPPPWGSFVPALLCLGLYTAARIAEQVRAGIEALPRGQTEAASALGLTAYLTYRHIIVPQALRLIVPSLTSEVMGIYKNTSVALTIGLMELTAQARQISEATFQTFTAFGAATLIYLALALIAYQGMALIDRAVRIPGTGRAEDAIEPSLADDVGQAGSLPSGMEVVK

SEQ ID NO: 27952 - DNA, 732 bp, Bradyrhizobium japonicum USDA 110
  CDS (1)..(732): transl_table=11
gtgaactaccactggaactggggaattttcttcgagccgaacccgatggggaccggcacctatctcgacatgctgttgtcgggcctggtgctgaccctgaagacggcggtgctcgcctggatcatcgcgctggtgttcggctcgctcgtcggcgtcatgcgcacgctgccgtccaaggcggcctaccggttcggcttctgctgggtcgagttcttccgcaacatgccgctgctggtgcagctcttcctgtggttcttcgtgctgccggaactgctgccgaaatccgccggcctgtggctgaagcaactgccgaatgcgccgttctggacggccgcgatcggcatcggcttcttcatgtcggcgcgcgtcgcggtgcaattgcaggcgggcatcggttcgttgccgcgcgggcagaagatggcggcgaccgcgctcgggctcaccaccgtgcagggctatcgctacgtgctgctgccgatggcgttccgcatcatcctgccgccgctgacttccgagttcctcaacaccatcaagaacacggcggtggccatcaccatcggcctgatcgagctgaccggacaggcgcgctcgatgcaggaattctcgttccaggtgttcgaggccttcaccgccgcgaccatcctttatctcctcgtcaacgccgtcgtcgtgaccgcgatgcgcttcctcgagcgctatgtcgcgatccccggctacatcacggggaaatag

SEQ ID NO: 27953 - protein, 243 aa, Bradyrhizobium japonicum USDA 110
MNYHWNWGIFFEPNPMGTGTYLDMLLSGLVLTLKTAVLAWIIALVFGSLVGVMRTLPSKAAYRFGFCWVEFFRNMPLLVQLFLWFFVLPELLPKSAGLWLKQLPNAPFWTAAIGIGFFMSARVAVQLQAGIGSLPRGQKMAATALGLTTVQGYRYVLLPMAFRIILPPLTSEFLNTIKNTAVAITIGLIELTGQARSMQEFSFQVFEAFTAATILYLLVNAVVVTAMRFLERYVAIPGYITGK

SEQ ID NO: 27954 - DNA, 747 bp, Pseudomonas syringae pv. tomato str. DC3000
  CDS (1)..(747): transl_table=11
atgaattacaactgggactggggcgtgttcttcaagtccaccggcgtcggcagcgagacctatctggactggttcatatccggtctcggctggaccattgccattgctgtcgttgcctggatcatagcgctgatactgggctcggtactgggcgtcatgcgcaccgtgccaagccgtctggtatcaggtattgccacggcctacgtagaaatcttccgtaacgtgccactgctggtgcagctgttcatctggtactttctggtgcctgatctgctgcctgcagacctgcaggagtggtacaagcaggacctcaacccgaccacctcggcgtttctgagcgttgtcgtgtgtctgggtctgttcactgctgcacgggtctgcgaacaagtccgcaccggcatcgaggcgttgccaaagggccaggaatcagccgcacgcgccatgggcttcaagctgccacagatctactggaacgtgctgttgccgcaagcctaccggatcatcattccgccgctcacctccgaattcctgaacgtgttcaagaactcctcggtagcgtcgctgatcggcctgatggagctgctcgcacagaccaaacagaccgccgagttttccgccaacctgtttgaagctttcaccctggcgaccctcatctacttcacgctgaacatgagcctgatgctgctgatgcgcatgatcgagaagaaagttgccgtgcccggcctgatctctctgggaggcaaataa

SEQ ID NO: 27955 - protein, 248 aa, Pseudomonas syringae pv. tomato str. DC3000
MNYNWDWGVFFKSTGVGSETYLDWFISGLGWTIAIAVVAWIIALILGSVLGVMRTVPSRLVSGIATAYVEIFRNVPLLVQLFIWYFLVPDLLPADLQEWYKQDLNPTTSAFLSVVVCLGLFTAARVCEQVRTGIEALPKGQESAARAMGFKLPQIYWNVLLPQAYRIIIPPLTSEFLNVFKNSSVASLIGLMELLAQTKQTAEFSANLFEAFTLATLIYFTLNMSLMLLMRMIEKKVAVPGLISLGGK

SEQ ID NO: 27956 - DNA, 759 bp, Bordetella parapertussis 12822
  CDS (1)..(759): transl_table=11
atgggatatcaatggaactggggcgtgctgttcgccctttccccggatggcgggcagacctatctgcagacgctgctcgatggcctggcggtcacggtgcagaccgccgcgctggcctgggcgctggcgctgggcctgggcatcgccgtcggcgtggcgcgcaccctgccgtactcgctcgtcaagcggctggcggccgtctacgtggaggtgtttcgcaacatcccgctgattgtccagatgttcctctggtatttcgtgctgcccgagctgttgcccaaggcgttgggcgactggatcaagcagctgcctgaggggtcgttctatacggcggcgctgtccatcggggtgtatatgtcggcgcgcatcggcgagcagttgcgcgccggcatcgaggcgttgccgccgggccagcgccaggccggcctggcgctgggcctgaccctgccgcagctgtaccgccatgtgctgctgcccaatgccttgcgcatggtgctgccgaccatgacgtccgattgcctgaacaccatcaagaatacctcggtggcgctgaccatcggcctggccgacctgaccgcgcaggcgcatgccatgcaggagtactcgttccaggttttcgaggccttcctgaccgcgaccgtggcctacctggcgctgaacctgatcgtgatcgtggcgatgcgcgcgctggagcgctgggtgagcatccccgggcagtcgccgcgccgcgcgcaggcggccaaggggggaagggcatga

SEQ ID NO: 27957 - protein, 252 aa, Bordetella parapertussis 12822
MGYQWNWGVLFALSPDGGQTYLQTLLDGLAVTVQTAALAWALALGLGIAVGVARTLPYSLVKRLAAVYVEVFRNIPLIVQMFLWYFVLPELLPKALGDWIKQLPEGSFYTAALSIGVYMSARIGEQLRAGIEALPPGQRQAGLALGLTLPQLYRHVLLPNALRMVLPTMTSDCLNTIKNTSVALTIGLADLTAQAHAMQEYSFQVFEAFLTATVAYLALNLIVIVAMRALERWVSIPGQSPRRAQAAKGGRA

SEQ ID NO: 27958 - DNA, 762 bp, Bordetella parapertussis 12822
  CDS (1)..(762): transl_table=11
atgaactacaactggaattggcatatttttcttgagatgtcgccgaccggcggcatctatctgggcacgctgctgaccggcatggcgtggacgctcggcaccgcggcgctggcctggatcctggcgctgggcatcggcatcgtggtgggcgtggcccgcaccacgcagtcgaaatgggcgcgcatcatgggcgccacgtacgtcgagttcttccgcaacattccgctgctggtgcagatgttcctctggtacttcgtcgtgcccgaaatcctgccggtgcagcttggcgacgcgatcaagagcatcccgccgccatggggcatcttcatcccggcggtcctgtgcctgggcttctacacctcgtcgcgggtggccgaacaggtgcgcgccggcatcgagtcgcgtccggccgggcagcgcatggcggccaccgcgctgggcatgcggcccagccaggtgtaccggtacgtgctgctgccgacctcgtttcgcatcatcctcccgccgctgacctcggaactgctcaacctcatcaagaacacctcggtggcattcaccatcgacctgctcgaactggtcggcgcggcccgctcgatgcaggaattcagcttccaggtcttcgaagccttcgccggcgcgacgctttgctacttcctgctcaacctgatcgtgctgcgcgcaatgcgatacattgaaacgcggctggcggtgccgggcttcatcggccccgtctccgccaccaccaaactggctccgacatga

SEQ ID NO: 27959 - protein, 253 aa, Bordetella parapertussis 12822
MNYNWNWHIFLEMSPTGGIYLGTLLTGMAWTLGTAALAWILALGIGIVVGVARTTQSKWARIMGATYVEFFRNIPLLVQMFLWYFVVPEILPVQLGDAIKSIPPPWGIFIPAVLCLGFYTSSRVAEQVRAGIESRPAGQRMAATALGMRPSQVYRYVLLPTSFRIILPPLTSELLNLIKNTSVAFTIDLLELVGAARSMQEFSFQVFEAFAGATLCYFLLNLIVLRAMRYIETRLAVPGFIGPVSATTKLAPT

SEQ ID NO: 27960 - DNA, 762 bp, Bordetella bronchiseptica RB50
  CDS (1)..(762): transl_table=11
atgaactacaactggaattggcatatttttcttgagatgtcgccgaccggcggcatctacctgggcacgctgctgaccggcatggcgtggacgctcggcaccgcggcgctggcctggatcctggcgctgggcatcggcatcgtggtgggcgtggcccgcaccacgcagtcgaaatgggcgcgcatcatgggcgccacgtacgtcgagttcttccgcaacattccgctgctggtgcagatgttcctctggtacttcgtcgtgcccgaaatcctgccggtgcagcttggcgacgcgatcaagagcatcccgccgccatggggcatcttcatcccggcggtcctgtgcctgggcttctacacctcgtcgcgggtggccgaacaggtgcgcgccggcatcgagtcgcgtccggccgggcagcgcatggcggccaccgcgctgggcatgcggcccagccaggtgtaccggtacgtgctgctgccgacctcgtttcgcatcatcctcccgccgctgacctcggaactgctcaacctcatcaagaacacctcggtggcattcaccatcggcctgctcgaactggtcggcgcggcccgctcgatgcaggaattcagcttccaggtcttcgaagccttcgccggcgcgacgctttgctacttcctgctcaacctgatcgtgctgcgcgcaatgcgatacattgaaacgcggctggcggtgccgggcttcatcggccccgtctccgccaccaccaaactggctccgacatga

SEQ ID NO: 27961 - protein, 253 aa, Bordetella bronchiseptica RB50
MNYNWNWHIFLEMSPTGGIYLGTLLTGMAWTLGTAALAWILALGIGIVVGVARTTQSKWARIMGATYVEFFRNIPLLVQMFLWYFVVPEILPVQLGDAIKSIPPPWGIFIPAVLCLGFYTSSRVAEQVRAGIESRPAGQRMAATALGMRPSQVYRYVLLPTSFRIILPPLTSELLNLIKNTSVAFTIGLLELVGAARSMQEFSFQVFEAFAGATLCYFLLNLIVLRAMRYIETRLAVPGFIGPVSATTKLAPT

SEQ ID NO: 27962 - DNA, 741 bp, Chromobacterium violaceum ATCC 12472
  CDS (1)..(741): transl_table=11
atgaattatcactgggactggggagtctttttcaaacccaccggtgtcggcagcgagatctacctgagctggttcgccagcggtctcggctggacgctggcggtggcgctgtccggatggatcatcgccctgctgctgggcaccgtggtcggcgtggcgcgcacgctgcccaatcgcgggatcgccggcctggcgaccgtctacgtcgaactgttccgcaacgtgccgctcttggtgcagctgttcgtctggtacttcctggtgccggacctgctgccggagggcgcgcaaatctggttcaagcaggacctgtcgccgaccacctcgcagttcctgtcggtggtggtgtgcctgggcctgttcaccgccgcccgggtggcggagcaggtgcgcaccggcatcgaggcgctgccgcgcggccagcgcaacgcggcgatggcggtgggcttctcgctgggccagacttaccgacatgtgctgctgccgcaggcgatgcgcatcatcatcccgccgctgaccagcgaattcctcaacatcatcaagaactcttctgtggcgtcgctgatcggcctggccgagctgctggcgcagaccaagcagaccgccgagttctccgccaacctgttcgaggccttcaccctggccaccgtcatctatttcacgctcaatatgagcctgatgctggggatgagcgcgctggagaagaagctcagggtgcccggcatgatgggaggcaaatga

SEQ ID NO: 27963 - protein, 246 aa, Chromobacterium violaceum ATCC 12472
MNYHWDWGVFFKPTGVGSEIYLSWFASGLGWTLAVALSGWIIALLLGTVVGVARTLPNRGIAGLATVYVELFRNVPLLVQLFVWYFLVPDLLPEGAQIWFKQDLSPTTSQFLSVVVCLGLFTAARVAEQVRTGIEALPRGQRNAAMAVGFSLGQTYRHVLLPQAMRIIIPPLTSEFLNIIKNSSVASLIGLAELLAQTKQTAEFSANLFEAFTLATVIYFTLNMSLMLGMSALEKKLRVPGMMGGK

SEQ ID NO: 27964 - DNA, 741 bp, Photorhabdus luminescens subsp. laumondii TTO1
  CDS (1)..(741): transl_table=11
atgtcaatcgattggaattggggcatctttttgcaagctgcccctttcggcaatacgacttatctaggctggttgatagctggatttcaggtgacgattgccttgtctatctgcgcctggattatcgctttcattgtcggctcactgttcggcatcttacgcactgttcccaataaaatattatctgggataggtacctgttatgttgagctctttcgtaacgtaccactgatagttcaattttttatctggtatctggttgtacctgaactactaccagaaaaaatcggtctgtggtttaaaactgagctggaccctaatatccaattttttctctcatccactgcctgtttaggtcttttcactgctgctcggatgtgtgagcaggttcgtgccgccatacaatcactaccacgtggtcaaaaagcggcagggctggcaatggggctaaccttgccgcaaacctatcgctatgtcctattacccaatgcctatcgagtaatcattccacccatgacatcagaaatgatgaatctggtgaaaaactccgccattgcctccactattggtctggtagatatggcagcacaagcaggtaagttacttgattactcagcacatgcttatgaaacatttacggcgattacgctagcttatatcggaatcaatctggtgattatgcttgccatgcacttgcttgagaaaaaagtgcgtttaccgggtaatattggaggtcaataa

SEQ ID NO: 27965 - protein, 246 aa, Photorhabdus luminescens subsp. laumondii TTO1
MSIDWNWGIFLQAAPFGNTTYLGWLIAGFQVTIALSICAWIIAFIVGSLFGILRTVPNKILSGIGTCYVELFRNVPLIVQFFIWYLVVPELLPEKIGLWFKTELDPNIQFFLSSTACLGLFTAARMCEQVRAAIQSLPRGQKAAGLAMGLTLPQTYRYVLLPNAYRVIIPPMTSEMMNLVKNSAIASTIGLVDMAAQAGKLLDYSAHAYETFTAITLAYIGINLVIMLAMHLLEKKVRLPGNIGGQ

SEQ ID NO: 27966 - DNA, 792 bp, Yersinia pestis biovar Microtus str. 91001
  CDS (1)..(792): transl_table=11
ttgaatcatcagtcatcagggtggcttatccatcctttaagggagtttgttatggcaatagactggaactggggcatttttttacagccagcccctttcggcaataccacctatctcggttggatttggtccggctttcaggtcacggtcgcattatcattatgtgcttgggtgatcgccttcttcgtcggttcactatttggtattttaagaacggtgcccaaccgaatcctttcaggaataggggcttgttacgttgaattgtttcgtaacgtaccactgatcgtgcaattttttacctggtatctggtggttcccgaactattgccagtgaaccttggcacatggtttaaaagtgaactggcacccaatatacagttcttcctctcatctatgatttgccttggattattcactgcggcgcgggtttgtgaacaggttcgcgcaggaattcaatcactgcctcgtggtcaaaaagcagcgggcctggcaatggggctcaccctcacacagacttaccgctatgttttactgcccaatgcatatcgggtgattattcccccgatgacctcagaaatgctcaatctggtaaaaaactccgcaattgcctcaaccatcgggctagtcgaaatggcggcacaagcgggtaaattgctggattattcagcgcatgcctatgaatccttcaccgccatcaccctaggttatgtactgatcaatgccgtgatcatgctgttaatgcgcttagttgaaaagaaagtgcaattacccggcaatctggggagtaaataa

SEQ ID NO: 27967 - protein, 263 aa, Yersinia pestis biovar Microtus str. 91001
MNHQSSGWLIHPLREFVMAIDWNWGIFLQPAPFGNTTYLGWIWSGFQVTVALSLCAWVIAFFVGSLFGILRTVPNRILSGIGACYVELFRNVPLIVQFFTWYLVVPELLPVNLGTWFKSELAPNIQFFLSSMICLGLFTAARVCEQVRAGIQSLPRGQKAAGLAMGLTLTQTYRYVLLPNAYRVIIPPMTSEMLNLVKNSAIASTIGLVEMAAQAGKLLDYSAHAYESFTAITLGYVLINAVIMLLMRLVEKKVQLPGNLGSK

SEQ ID NO: 27968 - DNA, 732 bp, Herminiimonas arsenicoxydans
  CDS (1)..(732): transl_table=11
atgaatcttggcattttcctggagcaggttcctgacggtgacggcacctggggctatatgctgttgtcaggattgggctggacgctggcggtcgctttctttgcgtggatatttgcgtttgtgctgggctcgctgatcggtattgcgcgaacgacggaaaagcgctggctggtgggtctgggcggcgcctacgtcgaattgttccgcaacattccgctgctggtgcaatttttcgtctggtactttgtgattccgggtttggtccccgccgtcaagacctgggtcatcacgctggatccgacgatacatcaattcgtcacggccatcatctgcctcggattttttacctcgtcgcgcatcgccgaacaagtgcgctccggcatacaatcgctgccgcgcggccagcgcaatgcagggtatgcgctgggattgacgggcatgcaaacctatcgtttcgtcttgttgccgatggcgtaccggatcatcatcccgccgctgacatccgagctgatgaacctgatcaagaatactgctgtagcgtattcgatcggcctggttgaactgtttttccgcacgcgggaaatgggcgagatgaccttccgttacttcgaagcatttggtgctgcgaccctgatgtacgtggtcattgccatgctggccaatcgcgtgatggcattggtggagcgacgcactgccgtgcccggattgattgccggaggcaagcatgggtga

SEQ ID NO: 27969 - protein, 243 aa, Herminiimonas arsenicoxydans
MNLGIFLEQVPDGDGTWGYMLLSGLGWTLAVAFFAWIFAFVLGSLIGIARTTEKRWLVGLGGAYVELFRNIPLLVQFFVWYFVIPGLVPAVKTWVITLDPTIHQFVTAIICLGFFTSSRIAEQVRSGIQSLPRGQRNAGYALGLTGMQTYRFVLLPMAYRIIIPPLTSELMNLIKNTAVAYSIGLVELFFRTREMGEMTFRYFEAFGAATLMYVVIAMLANRVMALVERRTAVPGLIAGGKHG

SEQ ID NO: 27970 - DNA, 741 bp, Burkholderia vietnamiensis G4
  CDS (1)..(741): transl_table=11
atgtcttaccactggaactggggcgtcttcctgagccccgtctcgaccggcgagccgacgacttacttcggatggctgatgtccggcttctgggtgacgatcgaagtgtcgctggtcgcctgggtcatcgcgctgatcgtcggttcgctgttcggcgtgctgcgcaccgtgccgaacaaatggctcgccgcgctcggcaccgtctacgtgtcgatcttccgcaacatcccgctgatcgtgcagttcttcgtctggtacctggtcgtgccggagctgctgcccgcgtcgatcggcacctggatcaagcagctgccgcccggcacgcagttcttcaccgcgtcgatcgtctgtctcgggctgttcaccggcgcacgcgtgtgcgagcaggtgcgctcgggcatcaacgcgctgccgaagggccagcgtgcggccggcctcgcgatgggcttcacgcaatggcagacgtaccgctacgtgttgctgccggtcgcgtaccggatcatcgtgccgccgctcacgtcggagttcctgaacatcttcaagaactcggcggtcgcatcgacgatcggcctgctcgacctgtccgcgcaggcgcgccagctggtcgactacaccgcgcagacctacgagtcgttcatcgcggtgacgctcgcgtacgtggtcatcaacctcgtcgtgatggcgttcatgcgctggatcgaaggccgcacgcggctgcccggctacatcggaggcaagtga

SEQ ID NO: 27971 - protein, 246 aa, Burkholderia vietnamiensis G4
MSYHWNWGVFLSPVSTGEPTTYFGWLMSGFWVTIEVSLVAWVIALIVGSLFGVLRTVPNKWLAALGTVYVSIFRNIPLIVQFFVWYLVVPELLPASIGTWIKQLPPGTQFFTASIVCLGLFTGARVCEQVRSGINALPKGQRAAGLAMGFTQWQTYRYVLLPVAYRIIVPPLTSEFLNIFKNSAVASTIGLLDLSAQARQLVDYTAQTYESFIAVTLAYVVINLVVMAFMRWIEGRTRLPGYIGGK

SEQ ID NO: 27972 - DNA, 732 bp, Bradyrhizobium sp. ORS278
  CDS (1)..(732): transl_table=11
gtgaactacacctggaactggcacatcttcctggagccgaacccgaccggggccggcacctatttcgacatgctgctggcggggctgaaggtcacgatcgtgacctcgctgtcggcctggttgatcgcgctgatcttcggcacgatcgtcggcatcctgcgctcgctgccgtcgaagctcgcgggctggatcggcttcctctacgtcgaattcttccgcaacatgccgctgctggtgcagctgttcctgtggttcttcgtgctgccggagctgttgccgcgcgccgccggcctgtggctgaagcagatgccgaatgcgccgttctttacagccgcggtcggcatcggcctgttcatgtcggcgcgcgtcgcggtgcagctggcggccggtatcggatcgctgccgcgcggacagaagatggccgcgaccgcgctggggctgaccaccttgcaggtctatcgctatgtgctgctgccaatggccttccgcatcatcctgccgccgctgacgtcggagttcctcaacaccgtcaagaacagcgcggtggccatcaccatcggcttgatcgagctgaccggcgcggcgcgcgcgatgcaggaattctccttccaggtgttcgaggcgttcagcgcggcgaccctgatgtatctcgtcatcaacatcatcgtcgtgatcggcatgcgcctgctggagcgcgcggtggcgatccctggctacatcacgggcaaatga

SEQ ID NO: 27973 - protein, 243 aa, Bradyrhizobium sp. ORS278
MNYTWNWHIFLEPNPTGAGTYFDMLLAGLKVTIVTSLSAWLIALIFGTIVGILRSLPSKLAGWIGFLYVEFFRNMPLLVQLFLWFFVLPELLPRAAGLWLKQMPNAPFFTAAVGIGLFMSARVAVQLAAGIGSLPRGQKMAATALGLTTLQVYRYVLLPMAFRIILPPLTSEFLNTVKNSAVAITIGLIELTGAARAMQEFSFQVFEAFSAATLMYLVINIIVVIGMRLLERAVAIPGYITGK

SEQ ID NO: 27974 - DNA, 702 bp, Desulfovibrio vulgaris subsp. vulgaris str. Hildenborough
  CDS (1)..(702): transl_table=11
ttgcagtacacgttcgactggaatctcgttctctcgggtgagcgtctcgactggatagtgcagggggtcatcaccacctgccagctttcaggcctttcactcgtgctcgccatgctgctgggtacgcttatcgccgtcatgcgcctttccggcgtacggcctttcgtgtggttcagcgttgcctttacggagttcttccgtaacacgccgcttctggtgcagatattcttctggtacttcggttccgacgccgtattgcccgacgccgtgaaccagtggttgtacaagcagaacttcgaattcgcggcgggggtcatctcgctcaccgtctataccgccgcgttcatcgccgaagagatacgttccggtatcttctccattccccgcacgcagcttgaagcctcacgcgcatgcggcctgtcgttcatgcaggccatgtcctacgtcgtgctgccgcaggcctttcgcatcatcgtgccgccgctcatctcgcaggcgctcaacctgttcaagaactcttcgctgtgcatgaccatcggtgtcatggaactcacctacatggcccgccagatagagtcgtacacgttccacggcttcgaggcgttcaccgtgagcacgctcatctacctgtgcatatcgctcatggtctcgcttctcatcaacctgtacaacacgcacttcctgcggacgatcaaatactag

SEQ ID NO: 27975 - protein, 233 aa, Desulfovibrio vulgaris subsp. vulgaris str. Hildenborough
MQYTFDWNLVLSGERLDWIVQGVITTCQLSGLSLVLAMLLGTLIAVMRLSGVRPFVWFSVAFTEFFRNTPLLVQIFFWYFGSDAVLPDAVNQWLYKQNFEFAAGVISLTVYTAAFIAEEIRSGIFSIPRTQLEASRACGLSFMQAMSYVVLPQAFRIIVPPLISQALNLFKNSSLCMTIGVMELTYMARQIESYTFHGFEAFTVSTLIYLCISLMVSLLINLYNTHFLRTIKY

SEQ ID NO: 27976 - DNA, 741 bp, Erwinia carotovora subsp. atroseptica SCRI1043
  CDS (1)..(741): transl_table=11
atgtcaatagattggaactggggcatatttctacaagatgcccccttcggcaacacaacctacctcgggtggattctgtccggtctgcaagtcaccgtcacattatctatctgtgcctggattatcgccttcctcattggttctttatttggaatcttacgtaccgtcccgaaccgttttctttcgagcattggtacttgctacgtcgagctatttcgcaacgtcccactgattgtccagttctttacctggtatctggtcgttcctgagcttcttcccgtcaacatcggtatgtggtttaaagccgagttagaccccaatattcagttcttcctgtcatcgatgatttgtctggggctcttcaccgcggcacgcgtttgtgagcaggtgagagcaggcatccagtcgctaccacgtgggcaaaaagctgccgggctggcgatgggtctgacgctgccacaaacttatcgttatgtgttactgcccaatgcgtatcgcgtgatcgttccgccgctgacgtcagaaatgctgaatctggtaaaaaactcggctatcgcttccacgattggtctggttgatatggcggcacaagcggggaaactgctggactattccgcccatgcgtatgaatcctttaccgctatcacgctggcgtacgttggcatcaacgccgtcattatgctgatcatgcaggtcgttgagcgaaaaactcgtttgccgggcaatatggggagcaaataa

SEQ ID NO: 27977 - protein, 246 aa, Erwinia carotovora subsp. atroseptica SCRI1043
MSIDWNWGIFLQDAPFGNTTYLGWILSGLQVTVTLSICAWIIAFLIGSLFGILRTVPNRFLSSIGTCYVELFRNVPLIVQFFTWYLVVPELLPVNIGMWFKAELDPNIQFFLSSMICLGLFTAARVCEQVRAGIQSLPRGQKAAGLAMGLTLPQTYRYVLLPNAYRVIVPPLTSEMLNLVKNSAIASTIGLVDMAAQAGKLLDYSAHAYESFTAITLAYVGINAVIMLIMQVVERKTRLPGNMGSK

SEQ ID NO: 27978 - DNA, 744 bp, Azoarcus sp. EbN1
  CDS (1)..(744): transl_table=11
atggactatcactgggactggctgtttttctttcgcgagaccgacgacggtctcaagtactacgactgggtactgtccggactgggctggacgacgctcgtttcgctggcttcgctcgcggtcgcgctggcactcggctcggccctcggggtcatgcgcacgacaccgaagcgctggctcgtcgcgatcggcgacgcgtacgtcgatgtgttccgcaacattccgctgatcgtccagcttttcatgtggttcttcgtcgtccccgaactcgtgccggacaggctcgggatgtggatgaagcaggatctgccgtatgtcgtgatcgccgtcgtcggcctcggtttgtataccgcggcgcgcatcgccgagcaggtcaaggcgggcatcaactcgctgtcgcgcgggcagcgcgacgccgggctcgcgctcggcctgaccgaatggcagacctaccgccacgtgcgcctgccgatggcctaccgcatcgtgttgccggcgatgacttcggaggcgatgaacatcttcaagaattccgccgtgacctacgccgtcggcatcctggagctgtacttccagtacaagcagatcatcgagaagacctcgcaggtgttcgagatcacgatcgtcgtgacgttggcgtatttcgcgctcgcgttcctgatgaaccgcctcctcgcattcatcgagcggcgcacccgcgtgcccggcctgatcgtcggcggcaaggggggggacgtgccatga

SEQ ID NO: 27979 - protein, 247 aa, Azoarcus sp. EbN1
MDYHWDWLFFFRETDDGLKYYDWVLSGLGWTTLVSLASLAVALALGSALGVMRTTPKRWLVAIGDAYVDVFRNIPLIVQLFMWFFVVPELVPDRLGMWMKQDLPYVVIAVVGLGLYTAARIAEQVKAGINSLSRGQRDAGLALGLTEWQTYRHVRLPMAYRIVLPAMTSEAMNIFKNSAVTYAVGILELYFQYKQIIEKTSQVFEITIVVTLAYFALAFLMNRLLAFIERRTRVPGLIVGGKGGDVP

SEQ ID NO: 27980 - DNA, 717 bp, Silicibacter pomeroyi DSS-3
  CDS (1)..(717): transl_table=11
atgaactataactggaactggggggtcctcttcgaggaggaatatctcggctggctgatctcaggcgtcgggtggaccttttcggtcgccctggtggcctgggttctagcgctggccgtcggtatccttgtcggggtcgggcgcaccctgccttcgcggcctgtcgccctgctctgcaccacctatgtcgagatattccgcaatgtgccgctgctggtgcagctcttcctgtggtatttcgtcctgcccgagatcgttcccagcgacatgggccgatggatgaagcgcgacatgcccaaccccgaatatgtgacggcggtggtcggtctggggctctataccgccagccgggtggccgaacaggtccgcgccggtatcaacgcggtgggcggtggcttgaccagcgcggcctatgccaacgggctgtcgaccgcgcagacctatcgctatgtcctgctgccgatctcgttccgtctgatcgtgccgccgatgacctcggaattcctgaccatcttcaagaattcctcgctggcgctgaccatcggtctgttggaactgaccgcgcagagccagcagatcgccgagtacacgttccagggcttcgaggcctttaccgccgccaccgtgatctatgtggtcatcgcgctctgcgcgacggtgatcgcgcagatcctcgaacggcacaccaagatccccggctttgtaggaaaggcatga

SEQ ID NO: 27981 - protein, 238 aa, Silicibacter pomeroyi DSS-3
MNYNWNWGVLFEEEYLGWLISGVGWTFSVALVAWVLALAVGILVGVGRTLPSRPVALLCTTYVEIFRNVPLLVQLFLWYFVLPEIVPSDMGRWMKRDMPNPEYVTAVVGLGLYTASRVAEQVRAGINAVGGGLTSAAYANGLSTAQTYRYVLLPISFRLIVPPMTSEFLTIFKNSSLALTIGLLELTAQSQQIAEYTFQGFEAFTAATVIYVVIALCATVIAQILERHTKIPGFVGKA

SEQ ID NO: 27982 - DNA, 747 bp, Pseudomonas fluorescens Pf-5
  CDS (1)..(747): transl_table=11
atgaattacaactgggactggggcgtgttcttcaagtccaccggcgtgggcagcgagacctatctcgactggttcatctccggcctgggctggaccatcgccatcgccgtggtggcctggatcatcgcgctgctgctgggctcgatcctgggcgtcatgcgcaccgtgccgaaccgcctggtgtcgggcatcgccaccgtgtacgtggagatcttccgcaacgtgccgctgctggtgcagctgttcatctggtacttcctggtgccggacctgctgccggagaacctccaggagtggtacaagcaggacctcaacccgaccacctcggcctacctgagcgttgtcgtgtgcctgggcctgttcaccgccgcacgggtttgcgaacaggtacgtaccggtatccaggccctgccccgtggccaggaatccgccgcacgcgccatgggcttctcgctgccgcagatctactggaacgtgctgctgccccaggcctaccggatcatcattccgccgctcacctcggaattcctcaacgtattcaagaactcctccgtggcgtcgctgatcggcttgatggaattgcttgcccagaccaagcagaccgccgagttctcggccaacctgttcgaagccttcaccctggctaccctgatctacttcaccctgaacatgagcctgatgctgctgatgcgcctggtggagaagaaagtttcggtccccggcctgatctccgtgggaggtaaataa

SEQ ID NO: 27983 - protein, 248 aa, Pseudomonas fluorescens Pf-5
MNYNWDWGVFFKSTGVGSETYLDWFISGLGWTIAIAVVAWIIALLLGSILGVMRTVPNRLVSGIATVYVEIFRNVPLLVQLFIWYFLVPDLLPENLQEWYKQDLNPTTSAYLSVVVCLGLFTAARVCEQVRTGIQALPRGQESAARAMGFSLPQIYWNVLLPQAYRIIIPPLTSEFLNVFKNSSVASLIGLMELLAQTKQTAEFSANLFEAFTLATLIYFTLNMSLMLLMRLVEKKVSVPGLISVGGK

SEQ ID NO: 27984 - DNA, 747 bp, Psychrobacter arcticus 273-4
  CDS (1)..(747): transl_table=11
atgaattatagctggaactggggtgtgctttttgagcaaactggtatcggtagcgagctgtatatccattggatgattactggtcttggctggttgttattaattggcagtattgcttgggcaatcgccatggtgattggtactatttttggaatcatgcgtactttgcctaataagactgcccgtgctatcggcaccacttatgtgacgttttttcgtaatatccctttattggtacaactattcttctggttttatatcgccccaggttggctaacgccatccatacaagagtggtggtacaaagacttgtctcctaatacctctgccatgctgtcagccagtatcggtcttggtttatttaccgctgcccgtattgtggaacaggtgcgtaccggtatcgagtcgctacctaaaggacaaatcaatgccgcctacgcgctcggctttagtatcccgcaagcctataaagaagtgctgctgccgcaagcgtttcggattatcttaccgccacttagctcggagttgaccaactgctttaaaaacgcttcggttgcgtctttagtaggggtgatggagctgattagtcagaccaaaaccattagtgaatacacccaaaacagtcttgagatttatacctatgcgaccattatttatctggtattcaatttgtctttaattgccattatggggctgattgaacgtaaattgcgtgtgcctgggctgattgcagggagtcaaaaatga

SEQ ID NO: 27985 - protein, 248 aa, Psychrobacter arcticus 273-4
MNYSWNWGVLFEQTGIGSELYIHWMITGLGWLLLIGSIAWAIAMVIGTIFGIMRTLPNKTARAIGTTYVTFFRNIPLLVQLFFWFYIAPGWLTPSIQEWWYKDLSPNTSAMLSASIGLGLFTAARIVEQVRTGIESLPKGQINAAYALGFSIPQAYKEVLLPQAFRIILPPLSSELTNCFKNASVASLVGVMELISQTKTISEYTQNSLEIYTYATIIYLVFNLSLIAIMGLIERKLRVPGLIAGSQK

SEQ ID NO: 27986 - DNA, 747 bp, Pseudomonas syringae pv. phaseolicola 1448A
  CDS (1)..(747): transl_table=11
atgaattacaactgggactggggcgtgttcttcaagtccaccggcgtcggcagcgagacctatctggactggttcatatccggcctgggctggaccatcgccattgctgtcgttgcatggatcattgccctgatactgggttcggtactgggcgtcatgcgcaccgtaccaagccgtctggtatcgggtattgccacggtatacgtggaaattttccgtaatgtgccactgctggtgcagctgttcatctggtactttctggtgcccgacctgctgccggaaaacctgcaggagtggtacaagcaggacctcaacccgactacctccgcgttcctgagcgtggtggtctgtctgggtctgtttaccgctgcacgggtctgcgaacaggtgcgtaccggcattgaagcactgccaaagggccaggaatcggccgcgcgtgcaatgggcttcaagctgccgcagatctactggaacgtgctgttgccacaggcttaccggatcatcattccaccgctcacttccgaattcctgaacgtgttcaagaactcgtcggtagcatcgctgatcggcctgatggagctgctcgcgcagaccaaacagaccgccgagttttccgccaacctgtttgaagcctttacgctcgcaaccctcatctacttcacgctgaacatgagcctgatgctgctgatgcgcatgatcgagaagaaagtcgctgtacccggactcatctcgctggggggcaaataa

SEQ ID NO: 27987 - protein, 248 aa, Pseudomonas syringae pv. phaseolicola 1448A
MNYNWDWGVFFKSTGVGSETYLDWFISGLGWTIAIAVVAWIIALILGSVLGVMRTVPSRLVSGIATVYVEIFRNVPLLVQLFIWYFLVPDLLPENLQEWYKQDLNPTTSAFLSVVVCLGLFTAARVCEQVRTGIEALPKGQESAARAMGFKLPQIYWNVLLPQAYRIIIPPLTSEFLNVFKNSSVASLIGLMELLAQTKQTAEFSANLFEAFTLATLIYFTLNMSLMLLMRMIEKKVAVPGLISLGGK

SEQ ID NO: 27988 - DNA, 729 bp, Ralstonia eutropha JMP134
  CDS (1)..(729): transl_table=11
atgaactacaactggcattggggagtattcctcgagcaggccgcccagaacgagacctacctcgactggatgatttccggcctgaaggtcacgatcgcgctcgggctttcgtcctgggtcatcgcgcttgccatcggctcggtgcttggcgtgctgcgcacggtgccgaacaagtggctgtcgggtttcgccgcggcctatgtcgagcttttccgcaacatcccgctgctggtgcagctgttcatctggtatttcgtcggccccgagctgttgccgggcggcgagacgatcaagcagatgaacccgttcacccagcagttcctggcggccatgctgtgcctgggcaccttcactgcggcgcgcgtctgcgaacaggtgcggtcgggcatcaattcgctgccgcgcggccagaagaacgccggcctggccatgggtttcacgctgccgcagacctatcgcttcgtgctgctgccgatggcgtttcgcgtcatcgtgccgccgctgacctcggaattcctgaacatcttcaagaattccgcggtggcgtcgacgatcggcctgctggaactggccgcccaagggcgccagcttgtggattacaccgcgcgcccgtatgagtcgttcatcgccgtgacggtgatgtacgcgctcatcaatatcgtcgtcatgctggtcatgcgctgggtcgaagcccgcagccgcgtacccggctttatcggcagcaagtaa

SEQ ID NO: 27989 - protein, 242 aa, Ralstonia eutropha JMP134
MNYNWHWGVFLEQAAQNETYLDWMISGLKVTIALGLSSWVIALAIGSVLGVLRTVPNKWLSGFAAAYVELFRNIPLLVQLFIWYFVGPELLPGGETIKQMNPFTQQFLAAMLCLGTFTAARVCEQVRSGINSLPRGQKNAGLAMGFTLPQTYRFVLLPMAFRVIVPPLTSEFLNIFKNSAVASTIGLLELAAQGRQLVDYTARPYESFIAVTVMYALINIVVMLVMRWVEARSRVPGFIGSK

SEQ ID NO: 27990 - DNA, 747 bp, Pseudomonas fluorescens PfO-1
  CDS (1)..(747): transl_table=11
atgaattacaactgggactggggcgtgttcttcaagtccaccggcgtgggcagcgagacctatctcgactggttcatttccggtctgggctggaccatcgccatcgccatcgtggcctggatcatcgccctgttgctcggctcgctgctgggcatcatgcgcaccgtgccgaaccgcatcgtgtcgggcatcgcgacctgctacgtcgaactgttccgcaacgtgccgctgctggttcagctgttcatctggtacttcctggtgcccgatctgctgccgccggatctgcaggaatggtacaagcaggacctgaacccgaccacttcggcctacctgagtgttgtcgtgtgcctgggcctgttcaccgccgcccgggtctgcgaacaggttcgcaccggtatccaggcactgccacgcggccaggaatccgccgcccgcgccatgggtttcaagctgccgcagatctactggaacgtgctgctgccccaagcctaccggatcatcattccgccgctcacctcggaattcctgaacgtgttcaagaactcctccgtggcgtccctgatcggtctgatggagctgctggcgcaaaccaaacagaccgccgaattctcggccaacctgtttgaagccttcaccctggcgaccctgatctatttcaccctcaacatgagcctgatgctgctgatgcgcatggtcgagaagaaagtcgccgtgcccggcctgatctccgtggggggtaaataa

SEQ ID NO: 27991 - protein, 248 aa, Pseudomonas fluorescens PfO-1
MNYNWDWGVFFKSTGVGSETYLDWFISGLGWTIAIAIVAWIIALLLGSLLGIMRTVPNRIVSGIATCYVELFRNVPLLVQLFIWYFLVPDLLPPDLQEWYKQDLNPTTSAYLSVVVCLGLFTAARVCEQVRTGIQALPRGQESAARAMGFKLPQIYWNVLLPQAYRIIIPPLTSEFLNVFKNSSVASLIGLMELLAQTKQTAEFSANLFEAFTLATLIYFTLNMSLMLLMRMVEKKVAVPGLISVGGK

SEQ ID NO: 27992 - DNA, 741 bp, Burkholderia sp. 383
  CDS (1)..(741): transl_table=11
atgtcttaccactggaactggggcatcttcctgagccccgtatcgaccggcgagccgacgacttatttcggatggctgatgtccggcttctgggtgaccatcgaagtgtcgctcgttgcctgggtcatcgcgctgatcgtcggttcgctgttcggcgtgctgcgcaccgtgccgaacaaatggctgtccgcgatcggtaccctgtacgtgtcgattttccggaacattccgctgatcgtgcagttcttcgtctggtatctcgtgataccggagctgctgccggcgtcgatcggcacctggatcaagcaactgccgcccaccacgcagttctttaccgcgtcgatcatctgtctcggcctgttcacgggcgcgcgcgtgtgcgaacaggtgcgctcggggatcaacgcgctgccgaagggccagcgtgccgccggcctcgcgatgggtttcacgcaatggcagacgtaccgctacgtgctgctgcccgttgcgtaccggatcatcgtgccgccgctcacgtcggaattcctgaacatcttcaagaactccgccgtcgcgtcgacgatcggcctgctcgacctgtccgcgcaagcgcgccagctcgtcgactacaccgcgcagacgtatgagtcgttcattgcggtgacgctcgcctacgtgatcatcaacctcgtcgtgatgtcgttcatgcgctggatcgaaggccgtacgcggctgcccggctatatcggaggcaagtga

SEQ ID NO: 27993 - protein, 246 aa, Burkholderia sp. 383
MSYHWNWGIFLSPVSTGEPTTYFGWLMSGFWVTIEVSLVAWVIALIVGSLFGVLRTVPNKWLSAIGTLYVSIFRNIPLIVQFFVWYLVIPELLPASIGTWIKQLPPTTQFFTASIICLGLFTGARVCEQVRSGINALPKGQRAAGLAMGFTQWQTYRYVLLPVAYRIIVPPLTSEFLNIFKNSAVASTIGLLDLSAQARQLVDYTAQTYESFIAVTLAYVIINLVVMSFMRWIEGRTRLPGYIGGK

SEQ ID NO: 27994 - DNA, 732 bp, Rhodospirillum rubrum ATCC 11170
  CDS (1)..(732): transl_table=11
gtgaattatacctggaactggtcgatcttctggcaactctcgcccgaaggcaacggcacctatctcgataccctgatgtcgggcctttactggacgatggcgaccgcgctggccgcctgggccctggccctggtgcttggcggcatgatcggcatcatgcggacgctgccttcaaagggcctgcagcgccttggcgcggcctatgtcgaagtgtttcgcaatatcccgctgctggtgcagcttttcctttggtacttcgtgctgccggaactcttgccgccgtcctggggattgtggctcaagcagattcccgacgcccccttctatacctcggtcgtcggcatcggctgcttcacctcggcccgcgtcgccgagcaaatccgcgccgggatcaccaccctgccgcgcggacaagccatggcctcgacggcccttggcctgaccctgccccaaacctaccgctatattctgctgccgatggccctgcgcatcgtcctgccaccgctgacctcggaattcctcaacaccgtcaagaacacctcggtcgccctgaccatcagcctgatggaactgacggcgcgaacgcgggcgatgcaggaattctcgttccaggtcttcgaagccttcgccgccgccaccctgatctacgttctgatcaacgtggtggtggtcgccgtcatgcgtgtgatcgagcatcgtgtcgcggtgcccggtttcaacgtcggcaagtaa

SEQ ID NO: 27995 - protein, 243 aa, Rhodospirillum rubrum ATCC 11170
MNYTWNWSIFWQLSPEGNGTYLDTLMSGLYWTMATALAAWALALVLGGMIGIMRTLPSKGLQRLGAAYVEVFRNIPLLVQLFLWYFVLPELLPPSWGLWLKQIPDAPFYTSVVGIGCFTSARVAEQIRAGITTLPRGQAMASTALGLTLPQTYRYILLPMALRIVLPPLTSEFLNTVKNTSVALTISLMELTARTRAMQEFSFQVFEAFAAATLIYVLINVVVVAVMRVIEHRVAVPGFNVGK

SEQ ID NO: 27996 - DNA, 741 bp, Burkholderia thailandensis E264
  CDS (1)..(741): transl_table=11
atgtcttaccactggaactggggcatcttcctgagccccgtttcgacgggcgaacccaccacctatctcggctggctgatgtcgggattctgggtgacggtcaaggtgtcgctcgccgcgtgggtgatcgcgctcgtcgtcggctcgctgttcggggtgctgcgcaccgtgccgaacaaatggctttcggcgatcgggacggtctacgtatcgatcttccgcaacattccgctcatcgtgcagttcttcgtctggtacctcgtcgtgcccgaactgctgcccgtgtcgatcggcacctggatcaagcagttgccgcccggcacgcaattcttcaccgcgtcgatcgtctgtctcggcctcttcacgggcgcgcgcgtctgcgagcaggtgcgctccggcatcaacgcgttgccgaagggccagcgcgcggccggcctcgcgatgggcttcacgcaatggcagacgtaccgctacgtgctcctgcccgtcgcgtaccggatcatcgtgccgccgctcacgtccgaattcctgaacatcttcaagaactcggccgtcgcgtcgacgatcggtctgctcgacctgtccgcgcaggcgcggcagctcgtcgactacaccgcgcagacctacgagtcgttcatcgcggtcacgctcgcgtacgtggtcatcaacctgatcgtgatggcgttcatgcgctgggtcgagagcaagtcccggctgcccggctacatcggaggcaagtga

SEQ ID NO: 27997 - protein, 246 aa, Burkholderia thailandensis E264
MSYHWNWGIFLSPVSTGEPTTYLGWLMSGFWVTVKVSLAAWVIALVVGSLFGVLRTVPNKWLSAIGTVYVSIFRNIPLIVQFFVWYLVVPELLPVSIGTWIKQLPPGTQFFTASIVCLGLFTGARVCEQVRSGINALPKGQRAAGLAMGFTQWQTYRYVLLPVAYRIIVPPLTSEFLNIFKNSAVASTIGLLDLSAQARQLVDYTAQTYESFIAVTLAYVVINLIVMAFMRWVESKSRLPGYIGGK

SEQ ID NO: 27998 - DNA, 729 bp, Ralstonia metallidurans CH34
  CDS (1)..(729): transl_table=11
atggattacgcttttcattggggagtcttcctcgagcaggcggcggcgaacgagacctacctggactggatgatttccggtctcaaggtgacgatcgcgcttggcctgtcctcgtggatcatcgctctcgccatcggatcggtgctgggcgtgctgcgcaccgtgccgaacaagtggctgtcggggatcgccgccacctacgtcgagatcttccggaacattccgctgctggtgcagcttttcatctggtacttcgtcggccccgaactgctgcccggcggcgaggcgatcaagcagatgaatccgttcacccagcagttcctggccgccatgctctgtctgggcaccttcacggccgcccgggtttgcgaacaggtgcgctcgggtatcaattcgctgccgcgcggccagaagaacgccggcctggcgatgggtttcacgctgccgcagacgtatcgctacgtgctgctgccgatggcattccgcgttatcgtgccgccgctgacttccgagtttctgaatatcttcaagaactcggccgtggcgtcgacgatcggtctgctggaactggccgcgcaggggcgccagctggtggactacaccgcgcgcccgtatgagtcgttcatcgccgtcacggtgctgtacgcgctcatcaacttcaccgtgatgctgatcatgcgctgggtggaacgtcgcacccgcgtgcccggcttcatcggtggcaagtaa

SEQ ID NO: 27999 - protein, 242 aa, Ralstonia metallidurans CH34
MDYAFHWGVFLEQAAANETYLDWMISGLKVTIALGLSSWIIALAIGSVLGVLRTVPNKWLSGIAATYVEIFRNIPLLVQLFIWYFVGPELLPGGEAIKQMNPFTQQFLAAMLCLGTFTAARVCEQVRSGINSLPRGQKNAGLAMGFTLPQTYRYVLLPMAFRVIVPPLTSEFLNIFKNSAVASTIGLLELAAQGRQLVDYTARPYESFIAVTVLYALINFTVMLIMRWVERRTRVPGFIGGK

SEQ ID NO: 28000 - DNA, 732 bp, Mesorhizobium sp. BNC1
  CDS (1)..(732): transl_table=11
atgaactataactggaactggggaattctcttccagcaatcgctggatgggtcgggtagttacttggaaatgctgttgcggggtctgcaagtaacgctagtcaccgcagtaggtgcatggcttcttgcgctggcactgggtcttgtcgtcggggtgatgcggacgatgccgtccgggcctgcccaaaggattgcgagcgcatatgtggaattgtttcgcaacattcctttccttgtacagcttttcctttggtatttcgtgttgcctgaactgctaccgcaaagcatgggcaactggttgaaagcgttgccaaattcggcgttctggacgacggtcttggggctcggcttttatatgtcggcacgagtcgcggaacagctccgtgcgggcatcagctcactgccccgtggtcagaagctggcgggtgccgcaatcgggcttacgacaccgcaaacctatcgatatgttctgctgccaatggcatttcggatcatcctgcctccactgacgtctgagttcctgaacacgatcaagaatacgtcggtggcactcacgatcggactggtagaactcactgcccgcgcccgagccatgcaggaattcacctttcagatattcgaggcgttcaccgtcgcgactgtcctttatctcactgtcaacatcctggtaacgatcgggatgcgctaccttgaacaccgggttgctgtacctggctatactgcggggcgttaa

SEQ ID NO: 28001 - protein, 243 aa, Mesorhizobium sp. BNC1
MNYNWNWGILFQQSLDGSGSYLEMLLRGLQVTLVTAVGAWLLALALGLVVGVMRTMPSGPAQRIASAYVELFRNIPFLVQLFLWYFVLPELLPQSMGNWLKALPNSAFWTTVLGLGFYMSARVAEQLRAGISSLPRGQKLAGAAIGLTTPQTYRYVLLPMAFRIILPPLTSEFLNTIKNTSVALTIGLVELTARARAMQEFTFQIFEAFTVATVLYLTVNILVTIGMRYLEHRVAVPGYTAGR

SEQ ID NO: 28002 - DNA, 717 bp, Pseudomonas aeruginosa UCBPP-PA14
  CDS (1)..(717): transl_table=11
atgttcggcgaacttctcgccccgcagtacctgcgctggttgctcgacggcttcctgctgaccctcggccttgccctgctcagttgcctgctcgccaccctgatcggcgcccccctggccatcgcccggctgtcgcgccgacgcctgctgtcctggccggcgcgcgcctacctggcgctgttccgcaataccccgctgctggtgcagctgttcttctggtacttcggcgttcccgcgctgctgccggaagcgctggtgagctggctgaacacgccgcacgagacgcccttgctcgactggccgtccttcgagttcctcgccggtgcctgggggctgaccctctatacctcggctttcgtcgccgaggagttccgcgccggcatcgcctcggtacgccccgagcagcgcgccgccggcctcgccctggggctgacccagcgccaggtatggcgcgtggtggtgctgccgcaggccctgcgcacggccctgccgccgctgctcgggcagtacatgaatgcgctgaagaactcctcgctggcgatggccatcggcctggccgagctgtcctacgcttcgcgccaggtggaaaccgagaccttcaagaccttccaggccttcggcatcgccaccctcctctacatcggcgccatcgccctgatcgaagccttcggccaggcgttgcagcagacccgccgctaccgccagggaggtgcctga

SEQ ID NO: 28003 - protein, 238 aa, Pseudomonas aeruginosa UCBPP-PA14
MFGELLAPQYLRWLLDGFLLTLGLALLSCLLATLIGAPLAIARLSRRRLLSWPARAYLALFRNTPLLVQLFFWYFGVPALLPEALVSWLNTPHETPLLDWPSFEFLAGAWGLTLYTSAFVAEEFRAGIASVRPEQRAAGLALGLTQRQVWRVVVLPQALRTALPPLLGQYMNALKNSSLAMAIGLAELSYASRQVETETFKTFQAFGIATLLYIGAIALIEAFGQALQQTRRYRQGGA

SEQ ID NO: 28004 - DNA, 747 bp, Pseudomonas aeruginosa UCBPP-PA14
  CDS (1)..(747): transl_table=11
atgaattacaactgggactggggcgtgttcttcaagtccaccgggatcggcagcgaaacctacctcgactggtacatcgccggtctgggctggaccatcgccatcgccctggtcggctggatcatcgccctggcgctgggctcgctgctcggcgtcatgcgcaccgtgccgaaccgcctggtatcggggatcgccaccgcctacgtggaaatcttccgcaacgtgccgctgctggtgcagctgttcatctggtacttcctggtacccgacctgctgcccgagggcctgcagacctggttcaagcaggacctcaacccgaccacctcggcctacctcagcgtggtcgtctgcctcggcctgttcaccgccgcgcgggtctgcgagcaggtgcgcaccggcatccaggcgctgccctacgggcagacctcggcggcccgtgcgatgggcttccgcctgccgcagatctaccgccacgtgctgctgccgcaggccttccggatcatcatcccgccgctgacctcggagttcctcaacatcttcaagaactcctcggtggcgtcgctgatcggcctgatggagctgctggcgcagaccaagcagaccgccgagttctccgccaacctgttcgaggccttcaccctggccacgctgatctacttcacgctgaacatgagcctgatgctgatcatgcgcctggtggagagaaaggtcgccgtaccgggcctgatctccgtaggaggtaaatga

SEQ ID NO: 28005 - protein, 248 aa, Pseudomonas aeruginosa UCBPP-PA14
MNYNWDWGVFFKSTGIGSETYLDWYIAGLGWTIAIALVGWIIALALGSLLGVMRTVPNRLVSGIATAYVEIFRNVPLLVQLFIWYFLVPDLLPEGLQTWFKQDLNPTTSAYLSVVVCLGLFTAARVCEQVRTGIQALPYGQTSAARAMGFRLPQIYRHVLLPQAFRIIIPPLTSEFLNIFKNSSVASLIGLMELLAQTKQTAEFSANLFEAFTLATLIYFTLNMSLMLIMRLVERKVAVPGLISVGGK

SEQ ID NO: 28006 - DNA, 738 bp, Azoarcus sp. BH72
  CDS (1)..(738): transl_table=11
atgaactaccactgggattgggcctttttctttcaggagaccgatgacggtctcaaatacatcgactgggtgatctccggcatgggctggaccaccgcggtctcactgtccgcgctggcgatcgcgctgctggtgggctcggtgctgggcgtgatgcgcaccacacccagcaagctgctggtggcgatcggcgacacctatgtcgacatcttccgcaacgtgccgctgatcgtgcagctcttcatgtggttcttcgtggtgcccgagctggtgccggaatccatcgggctgtggatgaagcaggacctgccctacttcgtcaccgcggtgatcgggctgggcctctacaccgcggcgcggatcgccgagcaggtgaagtccggcatcaacgcgctggcacgcggccagcgcttcgccgggctggcgctgggctttaccgagtggcagacctaccgctacgtgcgcctgccgatggcctaccgcatcgtgctgccggcgctgacctcggaggcgatgaacatcttcaagaactcggcggtgacctacgcggtgggcatcctcgagctttacttccagtacaagcagatcatcgagaagacctcgcaagtgctggaaatcaccatcgtggtcacgctcacctacttcgtgctggcgttcgcgatgaaccgcctgctgggcttcatcgagaagcgcacgcgggtgcctggcctcatcaccggcggcagcggaggacactga

SEQ ID NO: 28007 - protein, 245 aa, Azoarcus sp. BH72
MNYHWDWAFFFQETDDGLKYIDWVISGMGWTTAVSLSALAIALLVGSVLGVMRTTPSKLLVAIGDTYVDIFRNVPLIVQLFMWFFVVPELVPESIGLWMKQDLPYFVTAVIGLGLYTAARIAEQVKSGINALARGQRFAGLALGFTEWQTYRYVRLPMAYRIVLPALTSEAMNIFKNSAVTYAVGILELYFQYKQIIEKTSQVLEITIVVTLTYFVLAFAMNRLLGFIEKRTRVPGLITGGSGGH

SEQ ID NO: 28008 - DNA, 753 bp, Acidovorax sp. JS42
  CDS (1)..(753): transl_table=11
atgaattgggattggcaggtgttctgccaggacaccattacccaagaggtcggtcaaagctgcttcggcaagaacggcgacatcacctacctcgactggatgctgtcagcctggggctggacggtatccgtttccttgctgtcgctggccgttgcgctggtggtcggttcgctggtcggcacgctgcgcacgctggaaggccgtccatggacggtgcgcctgggcaacgcctgggtcgagctgtttcgcaacattccgctgctggtgcacatctttgtgtggtaccacgtggtgccgtcgatcttcccggccatgaaatcgctgccgggcttcgtgctggtggtgtttgcgctgggcttcttcacctcggcgcgtatcgccgagcaggtgcgctcgggcatccaggcgttgccgcgcggccagcgctatgcgggcatggcgctgggcttcaccacgttccagtactaccgctacgtgctgctgccgatggcgtttcgcatcatcatcccgccgctcaccagcgagaccatgaacgtgttcaagaactcgtcggtggcgtttgccgtttcggtggccgagctgaccatgttcgccatgcaggcgcaggaagagacttcacgcggcatcgaggtgtacctggccgtcacggcgctgtacatcatctcggcctttgccatcaaccgcatcatggcgttcatcgaaaagcgcacgcgggtgccgggcctgattgccgcaggcgggggaggacactga

SEQ ID NO: 28009 - protein, 250 aa, Acidovorax sp. JS42
MNWDWQVFCQDTITQEVGQSCFGKNGDITYLDWMLSAWGWTVSVSLLSLAVALVVGSLVGTLRTLEGRPWTVRLGNAWVELFRNIPLLVHIFVWYHVVPSIFPAMKSLPGFVLVVFALGFFTSARIAEQVRSGIQALPRGQRYAGMALGFTTFQYYRYVLLPMAFRIIIPPLTSETMNVFKNSSVAFAVSVAELTMFAMQAQEETSRGIEVYLAVTALYIISAFAINRIMAFIEKRTRVPGLIAAGGGGH

SEQ ID NO: 28010 - DNA, 723 bp, Magnetospirillum magnetotacticum MS-1
  CDS (1)..(723): transl_table=11
atgacctatcactggaactggggcgtcctgttcgagccctcgcccgagggcaccggcacctatgccgacatgctgctctcggggctcgcctggaccgtgctcaccgccctcggttcctgggccatcgccttcgggctcggctcggtgatcggggtgatgcggaccctgccctcgcgggccgccaacgcggtgggcgcggcctatgtcgagctgttccgcaacgtgccgctgctagtgcagatgttcctctggtacttcgtgctgccggaactcctgcccgcgcggatcggcgccgccgtcaagcagatgccggacgcgccgttctacacggcggttttgtgcctcggcttcttcaccgccgcgcgggtggccgagcaggtgcgggccggcatccgctccctgccgcggggccaggcgctggcgggcacggcgctcggcctcacggtggcgcagacctaccgcttcgtgctgttgcctcatgcctaccggatcatcctgcccccgctgacctcggaattcctgaacaacctcaagaacacctccgtcgccctcaccatcggtctgctggaactgacggcgcgggcgcgcgcgatgcaggaattctcgttccaggtgttcgaggccttcaccgcagccaccctgctctacctcgccgtcaacctcgtggtggtggcgggcgcgaccctgctggagcggcgcctggccgtgccgggaggccgctga

SEQ ID NO: 28011 - protein, 240 aa, Magnetospirillum magnetotacticum MS-1
MTYHWNWGVLFEPSPEGTGTYADMLLSGLAWTVLTALGSWAIAFGLGSVIGVMRTLPSRAANAVGAAYVELFRNVPLLVQMFLWYFVLPELLPARIGAAVKQMPDAPFYTAVLCLGFFTAARVAEQVRAGIRSLPRGQALAGTALGLTVAQTYRFVLLPHAYRIILPPLTSEFLNNLKNTSVALTIGLLELTARARAMQEFSFQVFEAFTAATLLYLAVNLVVVAGATLLERRLAVPGGR

SEQ ID NO: 28012 - DNA, 717 bp, Roseovarius nubinhibens ISM
  CDS (1)..(717): transl_table=11
atggattataattggaactggggtgtgctctttgaagagcaatacctcagctggctcatctccggtgtcggctggaccttttcggtcgcgctgagcgcctgggttctggcgctgctggtcggggttctcatcggtgtgggccggaccctgccgaaccgccccatcgcctttctctgcaccacctatgtcgagatcttccgcaacgtgccgctgctcgtgcagctgttcctgtggtatttcgtcgtgcccgaaatcgtgccgcaagacatgggccgctggatgaagcgcgacatgccgaaccccgagttcgtgaccgccgtcatcgggcttggcctctataccgcgagccgggtggccgaacaggtgcgcgccgggatcaacgcggtgggcaagggtctcgtcgccgcctcctatgccaacgggttttccaccgcgcagacctatcgctatgtgctgctgccaatttccttccggctcatcgtgccgccgatgacctcggagtttctcacgatcttcaagaactcgtcgctggcgctgaccatcgggctgctcgaactcacggcgcagagccaacagatcgccgaatacaccttccaaggctttgaggcctataccgccgcgacgatcatctatgtggtcatcgccctgatggcgacggtgattgcgcagatgctcgaaaaatacacccagattccgggcttcgtgggaaaggcatga

SEQ ID NO: 28013 - protein, 238 aa, Roseovarius nubinhibens ISM
MDYNWNWGVLFEEQYLSWLISGVGWTFSVALSAWVLALLVGVLIGVGRTLPNRPIAFLCTTYVEIFRNVPLLVQLFLWYFVVPEIVPQDMGRWMKRDMPNPEFVTAVIGLGLYTASRVAEQVRAGINAVGKGLVAASYANGFSTAQTYRYVLLPISFRLIVPPMTSEFLTIFKNSSLALTIGLLELTAQSQQIAEYTFQGFEAYTAATIIYVVIALMATVIAQMLEKYTQIPGFVGKA

SEQ ID NO: 28014 - DNA, 966 bp, Pseudomonas putida GB-1
  CDS (1)..(966): transl_table=11
atgtacagagaccatatcgtcaaaccgcgcgcgaccgacaacccggcattcatgggtatggccgccgccgtgatcttcgccctcgccctgctctacggcgtgggcgacggtagcctggcccggctgatgggcccgatcgtgctcgacctgcaggcaccgctgatgcgcaacatcgccgtggccggcaccctggccgtgaccctggtattgaacgtgttcatccttggccgctttccgttgcgggcccaggtgattacggtctggtgcgaactgttgctgttgttcctgctgtttttcgacaccttcgacctgtcctacagcttcatcgccaccaaggtcggtttcatgatcacgcaaggggtgttcaccaccgtctacgtgtccaccctctcgatcgccatcgccttcgtcctggcgctgctgggcgcaaccgcacggctgtcgtccaacggcttcgccatcgccattgccagcttctacacctcgttctttcgcggcgtgccgctgctgatccagatctacctgatctaccttggtatcccccagctcggctatgtagtcggtgccgtgccggcggggatcctggcgttgtcgctgtgctacggcgcctacatgacggaaatcttccgcgccggtatcagcagcatcccgcgcgggcaatgggaagcttcgcgggcgatcggcctgacccccttccaggccatgacccgggtaatcctgccgcagtcgatgcggttgatcatcccgcccaccggcaaccagttcatctccatgctcaaggacagctcgctggtgtcggtgatcggtgtgtgggagctgatgttcctcgcccgcacccagggccgtgcggagtttcgccacctggaaatgttgatcaccgccgccgtcttgtactgggtgctgtcgatcctgctcgaagccgtgcagtcgcgcctggaaaaacgtttcgaccgcgcccatcgctga

SEQ ID NO: 28015 - protein, 321 aa, Pseudomonas putida GB-1
MYRDHIVKPRATDNPAFMGMAAAVIFALALLYGVGDGSLARLMGPIVLDLQAPLMRNIAVAGTLAVTLVLNVFILGRFPLRAQVITVWCELLLLFLLFFDTFDLSYSFIATKVGFMITQGVFTTVYVSTLSIAIAFVLALLGATARLSSNGFAIAIASFYTSFFRGVPLLIQIYLIYLGIPQLGYVVGAVPAGILALSLCYGAYMTEIFRAGISSIPRGQWEASRAIGLTPFQAMTRVILPQSMRLIIPPTGNQFISMLKDSSLVSVIGVWELMFLARTQGRAEFRHLEMLITAAVLYWVLSILLEAVQSRLEKRFDRAHR

SEQ ID NO: 28016 - DNA, 660 bp, Pseudomonas putida GB-1
  CDS (1)..(660): transl_table=11
atggccagttcggcgtttgacctgttgctgcaggcgctgccgcagctggccggcggcgccgcgcagaccctggccatctcggcactgggcatcctcttcgcaacgctgggtggcgtgctgtacggcgtgctggcaaccctgggcaaccgtgccctgaacatcgccttgcaggtgtaccttgagttgtttcgcgccatcccggtgctggtctggttgtacctggtgttcttcggcctgccgatcttctttgccctgagcatccccagcttctggtgcgcggtgctggtactggccctgtggggcgcgagcgaggtgggcgaggtggtacgcggtgcgctgcgttcgctgccgcgcggccagcgcgaagccgggctgtcgatcggcctggcggggtggcagctgtatggctacgtgctgctgccgcaggcgctcaagcgcatgaccccgcccaccatcaacatctacacgcggatcatcaagaccagctcgctggcggtgctgatcggcgtggtcgaggtgatcaaggccggtcagcagatcatcgaacgcacctacgaatcggtgctgatctatggcgccttgttcctgttcttcttcatcgtttgttatccgctgtccgccgcttcgcgcgtgctggaacgccgctgggcacactcatga

SEQ ID NO: 28017 - protein, 219 aa, Pseudomonas putida GB-1
MASSAFDLLLQALPQLAGGAAQTLAISALGILFATLGGVLYGVLATLGNRALNIALQVYLELFRAIPVLVWLYLVFFGLPIFFALSIPSFWCAVLVLALWGASEVGEVVRGALRSLPRGQREAGLSIGLAGWQLYGYVLLPQALKRMTPPTINIYTRIIKTSSLAVLIGVVEVIKAGQQIIERTYESVLIYGALFLFFFIVCYPLSAASRVLERRWAHS

SEQ ID NO: 28018 - DNA, 963 bp, Pseudomonas putida GB-1
  CDS (1)..(963): transl_table=11
gtgatcaaacacaagaaagcccagtggccctggcacgggctgaccgccctggtcctggtgggcctggcgctcagcctgtacatggccacttcgatgatttcctacgagtggcgctggaaccgcgtaccgcagtactttgcctacaaggccgaggaaacacagcgcgctgccaattacggcaccgtgcaggaaatcgtcatctccggcgataacgctcgcgtcacgctgaaggacgagagcggtgccgagcaagtgctcgatgtggccaaggacagcctgcagctgagccgtggcgacgatgtcgccgaaggcgacccgattggtgtaacccggcattgggcagcgggcccgctggcctggggcctttggaccaccttgtggatctcggtggtgtccggggcactgggcctggtgatcggcctgttcgctggcttgtgccggttgtccaacaaccccaccctgcgcgacctgtcgaccgtttatgtcgaactggtgcgcggcacgccgctgctggtgcagatcttcatcttctacttcttcatcggcactgtgctcaacctgtcccgggaatttgccggggtggcggcgctggcgctgttcactggcgcctacgtggccgaaattgtccgtgccggcgtgcagtcgatcgccaagggccagaatgaagcagctcgttccctgggcctgaacgctggccagtcgatgcgccacgtcatcttgccgcaggcgttcaaacgtgtgctgccaccgctggccggccagttcatcagcctggtcaaggacacttcgctggtgtcggtaatcgccatcaccgagctgaccaagagtggccgtgaggctatcaccacctcgttctctaccttcgaaatctggttctgcgtggcaggcctgtacctgctgatcaacctgccgctgtcgcacattgccagtcggctcgagcggaggcttgcgcaaagtgattga

SEQ ID NO: 28019 - protein, 320 aa, Pseudomonas putida GB-1
MIKHKKAQWPWHGLTALVLVGLALSLYMATSMISYEWRWNRVPQYFAYKAEETQRAANYGTVQEIVISGDNARVTLKDESGAEQVLDVAKDSLQLSRGDDVAEGDPIGVTRHWAAGPLAWGLWTTLWISVVSGALGLVIGLFAGLCRLSNNPTLRDLSTVYVELVRGTPLLVQIFIFYFFIGTVLNLSREFAGVAALALFTGAYVAEIVRAGVQSIAKGQNEAARSLGLNAGQSMRHVILPQAFKRVLPPLAGQFISLVKDTSLVSVIAITELTKSGREAITTSFSTFEIWFCVAGLYLLINLPLSHIASRLERRLAQSD

SEQ ID NO: 28020 - DNA, 690 bp, Pseudomonas putida GB-1
  CDS (1)..(690): transl_table=11
atgaattgggaagtcatcttcaaatggctgccacgcctggccgaaggcgcaacccttaccctggagctggtggccattgccgtggttgccgggttgatcctggccatcccgctgggcatcgcccgctcctcacgccattggtacgtgcgtgcggtgccgttcagctacatcttcttcttccgtggtacgccactgttggtgcagctgttcctggtctactacggcctggcgcagttcgatgccgtgcgctccagctcgctgtggccgtacctgcgcgatccgttctggtgcacggtgctgaccatgaccctgcacaccgccgcgtacatcgccgagatcctgcgtggcgcgctgcagtcgatccccaagggcgagatcgaagcggcacgcgcgctgggcatgtcacggggcaaggcactgttctacatcatgctgccacgtgctgcgcgcatcggcctgccggcgtacagcaacgaagtgatcctgatgctcaaggccagcgccctggccagtaccgtgaccctgctggaactgaccggcatggcccgtaccatcattgcgcggacctacctgccggtggaaatcttcttcgcggccggggtgttctacctggtgatctcgttcttgctggtgcagggcttcaagctgctggagcgctggttgcgcgtggatgcctgccaaggccgctga

SEQ ID NO: 28021 - protein, 229 aa, Pseudomonas putida GB-1
MNWEVIFKWLPRLAEGATLTLELVAIAVVAGLILAIPLGIARSSRHWYVRAVPFSYIFFFRGTPLLVQLFLVYYGLAQFDAVRSSSLWPYLRDPFWCTVLTMTLHTAAYIAEILRGALQSIPKGEIEAARALGMSRGKALFYIMLPRAARIGLPAYSNEVILMLKASALASTVTLLELTGMARTIIARTYLPVEIFFAAGVFYLVISFLLVQGFKLLERWLRVDACQGR

SEQ ID NO: 28022 - DNA, 669 bp, Pseudomonas putida GB-1
  CDS (1)..(669): transl_table=11
atgatcgctgaaagcctgcaactcgttgtcgactccacgcccttcctgctgaagggcgcgggttatacagtgctgctcagtgtcggcggcatgttcttcggcctgctgctgggctttgccctggcgctgatgcggctgtcgaagattttgccgctgaactggctggcgcgggtctacgtgtcgttcttccgcggcacgccgctgctggtgcagctgttcgtgatctatttcggcatgccacagattggcatcgagctcgacccgatacctgcctcgctgatcggcctgtcgctgaacatggcggcctacatctgcgaaatcctgcgtgcggcgatttcctcgatcgaccggggccagtgggaagctgccgccagcatcggcatgacccgcgtccaggccatgcgccgggcgatcctgccacaggccttgcgcaccgccctgccaccgttgggtaacagcttcatttcgctggtcaaggacaccgccctggcggcgaccatccaggtgcccgagctgttccgccaggcgcagctgattaccgcacgtaccttcgaagtgttcaccatgtacgtggcagtcgccgttatctactgggtgctgtgcagcatccttgcgcacttccagaaccgcatggaagcgcgggtcaaccagcatgaccaggagcaatga

SEQ ID NO: 28023 - protein, 222 aa, Pseudomonas putida GB-1
MIAESLQLVVDSTPFLLKGAGYTVLLSVGGMFFGLLLGFALALMRLSKILPLNWLARVYVSFFRGTPLLVQLFVIYFGMPQIGIELDPIPASLIGLSLNMAAYICEILRAAISSIDRGQWEAAASIGMTRVQAMRRAILPQALRTALPPLGNSFISLVKDTALAATIQVPELFRQAQLITARTFEVFTMYVAVAVIYWVLCSILAHFQNRMEARVNQHDQEQ

SEQ ID NO: 28024 - DNA, 672 bp, Pseudomonas putida GB-1
  CDS (1)..(672): transl_table=11
atggatatggatttcagcgaaatcatccctgccctgcctgccctgtgggacggcatggtcatgaccctgcagctgatggtcatgggtgttgtcggcggtatcgcactgggcaccatcctggcactgatgcgcctgtcctcgagcaaactgctgtcacgtctggcaggtgcgtacgtcaactacttccgctcgatcccgctgctgctggtgatcacctggttctacctggccgtgccgttcgtgctgcgctggattaccggcgaagacacgccggtcggcgcgttcacctcctgcgtggtcgctttcatgatgttcgaggccgcgtacttctgcgaaatcgtccgtgccggcgtgcagtcgatctccaagggccagatgggcgccgcgcaagcgctgggcatgaactacgcgcagaccatgcgcctgatcatcctgccccaggcgttccgcaagatgaccccactgctgctgcagcagagcatcatcctgttccaggacacctcgctggtctacaccgtgggcctggtggacttcctcaactcggcacgttccaacggcgacatcatcgggcgctcacatgagttcctgatcttcgccggcgtcgtctacttcatcatcagcttctccgcttcgtggctggtcaagcgcctgcaaaaaaggatcaccgtatga

SEQ ID NO: 28025 - protein, 223 aa, Pseudomonas putida GB-1
MDMDFSEIIPALPALWDGMVMTLQLMVMGVVGGIALGTILALMRLSSSKLLSRLAGAYVNYFRSIPLLLVITWFYLAVPFVLRWITGEDTPVGAFTSCVVAFMMFEAAYFCEIVRAGVQSISKGQMGAAQALGMNYAQTMRLIILPQAFRKMTPLLLQQSIILFQDTSLVYTVGLVDFLNSARSNGDIIGRSHEFLIFAGVVYFIISFSASWLVKRLQKRITV

SEQ ID NO: 28026 - DNA, 648 bp, Pseudomonas chlororaphis
  CDS (1)..(648): transl_table=11
atggatttcagcttttgggacatcgtgcgcaacctgctgaccggcctgcaatggaccctgctgctgtcgctggtggcctttatcggcggcggtttgtacggcttgctgatcatgaccctgcgcatttccaagaaggctttccccagccatttcgcccgcctgtacatcgagctgttccagggcacgccgctgttgatgcagctgttcctggtgttcttcggcatcgccctgctgggtgtggatatctcgccctggctggcggcggccatcgccctgacgctgttcaccagcgcctacctggcggagatctggcgcggctgcgtcgactcgatccccaacggccagtgggaagcctcctccagcctggcgctcaacccttatgaacagctgcgccatgtgatcctgccacaagctctgcggatcgccgtggcgcccaccgtgggcttttcggtgcaggtggtcaaaggcaccgcggtgacctcgatcatcggcctcaccgagctgaccaagaccggcggcatgctcgccaacgccaccttcgagcccttcatggtctacggcctggtggcgctcggttacttcttgctgtgctaccccctgtccctcagtgcgcgctacctggaaaggagactgcatgcctctgcttag

SEQ ID NO: 28027 - protein, 215 aa, Pseudomonas chlororaphis
MDFSFWDIVRNLLTGLQWTLLLSLVAFIGGGLYGLLIMTLRISKKAFPSHFARLYIELFQGTPLLMQLFLVFFGIALLGVDISPWLAAAIALTLFTSAYLAEIWRGCVDSIPNGQWEASSSLALNPYEQLRHVILPQALRIAVAPTVGFSVQVVKGTAVTSIIGLTELTKTGGMLANATFEPFMVYGLVALGYFLLCYPLSLSARYLERRLHASA

SEQ ID NO: 28028 - DNA, 669 bp, Pseudomonas chlororaphis
  CDS (1)..(669): transl_table=11
atggcttatcagttcgactttctaccggtgctggaaaacaccggcctgctgctgcgcggcgccctgttcacccttgagctgaccgccatcggcgcgctgctcggggtcggcctgggcatcgtcggcgcggtggtgcgggcctggaagatccagcccttctcggccctcttcggcgtctacgtcgagctgatccgcaacaccccgttcctggtgcagctgttcttcatcttctttggcctgccgtccctggggctgcagatctccgagtggcaggcggcagtgctggcaatggtgatcaacctgggcgcctactccacggaaatcatccgcgccggcatccaggccatcccccgcggccagctggaagccgcggcggccctggccatgacccgcctggaagccttccgccacgtggtgttgctgccggcgctgggcaaggtgtggccggccctgagcagccagatcatcatcgtcatgctcggttcggcggtgtgttcgcagatcgccaccgaggagctgagcttcgccgccaacttcattcagtcgcgcaacttccgcgcctttgaaacctacgccctgaccacgctgatctacctgtgcatggccctgctgatccggcagctgctgaactgggtcgggcgccgctatatcgcgaggagcagccaatga

SEQ ID NO: 28029 - protein, 222 aa, Pseudomonas chlororaphis
MAYQFDFLPVLENTGLLLRGALFTLELTAIGALLGVGLGIVGAVVRAWKIQPFSALFGVYVELIRNTPFLVQLFFIFFGLPSLGLQISEWQAAVLAMVINLGAYSTEIIRAGIQAIPRGQLEAAAALAMTRLEAFRHVVLLPALGKVWPALSSQIIIVMLGSAVCSQIATEELSFAANFIQSRNFRAFETYALTTLIYLCMALLIRQLLNWVGRRYIARSSQ

SEQ ID NO: 28030 - DNA, 669 bp, Escherichia coli O157
  CDS (1)..(669): transl_table=11
atgtttgagtatttacccgaactgatgaaagggctgcacaccagcctgacgctaaccgttgcctcgctgattgtggcactgattctggcgttgatttttaccatcatcctgacgctgaaaacgccggtgctggtgtggctggtgcggggttatatcacgctgtttaccggtacaccgctgctggtgcagatcttcctgatttattacgggccgggtcagttcccgacgttgcaggagtatccggcactgtggcatttgttgtcagaaccgtggttatgtgcgctgattgcgttgtcgctgaacagtgcggcgtataccacgcagctgttttacggtgcaattcgtgcgatcccggaaggtcagtggcagtcctgtagcgccctgggaatgagcaaaaaagatacgctggcgatcctgctgccgtatgcctttaaacgctcgctctcttcttattccaacgaagtggtgctggtgttcaaaagtacctctctggcttacaccattacgctgatggaagtgatgggatacagccagttgttgtacggacgcacctacgatgtcatggtgttcggcgcggcagggattatttatctggtcgttaacggcctgctgacgctgatgatgcgtctgatcgagcgcaaagcgctggcgtttgagcgaaggaattaa

SEQ ID NO: 28031 - protein, 222 aa, Escherichia coli O157
MFEYLPELMKGLHTSLTLTVASLIVALILALIFTIILTLKTPVLVWLVRGYITLFTGTPLLVQIFLIYYGPGQFPTLQEYPALWHLLSEPWLCALIALSLNSAAYTTQLFYGAIRAIPEGQWQSCSALGMSKKDTLAILLPYAFKRSLSSYSNEVVLVFKSTSLAYTITLMEVMGYSQLLYGRTYDVMVFGAAGIIYLVVNGLLTLMMRLIERKALAFERRN

SEQ ID NO: 28032 - DNA, 675 bp, Escherichia coli O157
  CDS (1)..(675): transl_table=11
  misc_feature (180)..(180): w is a or t
atgtacgagtttgactggagttccattgtcccttccctgccatatctgctcgacgggctggtgatcacgctgaaaatcaccgtcacggcagtcgtgattggtattttgtggggcaccatgctggcggtgatgcgcttgtccagctttgcgcccgtagcgtggtttgccaaagcctacgtwaacgtattccgctcgattcctttagttatggttttgctgtggttttacctgatcgtgccgggttttctgcaaaacgtgctgggattatcaccaaaaaatgatatccgtttaatttcggcgatggtggcgttttcgatgtttgaagcggcctactattcagagattatccgtgccggtattcaaagtatttctcgtggtcagtcgagcgccgcgctggcgttgggaatgactcactggcagtcgatgaaactgattattctgccgcaggcgttccgcgcgatggtgccgctgctgctcactcagggcatcgtactgttccaggatacctcgctggtgtatgtgttatctctggccgatttcttccgtaccgcctcaaccattggtgagcgtgatggcacgcaggttgagatgatcctgtttgccggatttgtttatttcgttattagccttagcgcgtcgttgttggtcagctacttgaaaagaaggacagcataa

SEQ ID NO: 28033 - protein, 224 aa, Escherichia coli O157
MYEFDWSSIVPSLPYLLDGLVITLKITVTAVVIGILWGTMLAVMRLSSFAPVAWFAKAYVNVFRSIPLVMVLLWFYLIVPGFLQNVLGLSPKNDIRLISAMVAFSMFEAAYYSEIIRAGIQSISRGQSSAALALGMTHWQSMKLIILPQAFRAMVPLLLTQGIVLFQDTSLVYVLSLADFFRTASTIGERDGTQVEMILFAGFVYFVISLSASLLVSYLKRRTA

SEQ ID NO: 28034 - DNA, 660 bp, Bacillus subtilis
  CDS (1)..(660): transl_table=11
atgaatttggatttttcagcaacgatcccccaaattccttttatattagaaggcttggcaattacattaaaaattgttgttgtatctgctattatcggacttatactcggtattgtgctaagcttatgcaagatcagcacattccgcccgtttatctggatcgctgatttttatacatcagtgttccgaggcacgcctttagtgctgcagcttatgattgtctattttggccttcctcagctgctcggatttcaaattgaccagttttgggctgcggttgtcgcattgtctttgaattccgccgcttatgtatcggaaattatcagagccggaatcaatgccattgataaagggcaaaaagaagctgctgttgcactcggtgtcccgtatggaaaaatgatgaaggatctgctgctgccgcaggccttcaaaaatatatcacctgcaattgtgaatgaattaattacgttaacaaaagaatcggcgatcgtcaccgtcatcgggcttggtgatgtcatgagacgcgcatatcaagctggcgccgccacttacaattaccttgagccgctcattatcgcgggattgatttattatgtgcttgtcctgattttaacgtttatcggcaaggctgtagaaaggaagctgaaatccaatgattaa

SEQ ID NO: 28035 - protein, 219 aa, Bacillus subtilis
MNLDFSATIPQIPFILEGLAITLKIVVVSAIIGLILGIVLSLCKISTFRPFIWIADFYTSVFRGTPLVLQLMIVYFGLPQLLGFQIDQFWAAVVALSLNSAAYVSEIIRAGINAIDKGQKEAAVALGVPYGKMMKDLLLPQAFKNISPAIVNELITLTKESAIVTVIGLGDVMRRAYQAGAATYNYLEPLIIAGLIYYVLVLILTFIGKAVERKLKSND

SEQ ID NO: 28036 - DNA, 20 bp, Artificial sequence
  primer
atggattacaactgggactg

SEQ ID NO: 28037 - DNA, 21 bp, Artificial sequence
  primer
tcacttgcctcccccgatcag

SEQ ID NO: 28038 - protein, 215 aa, Artificial sequence
  consensus sequence
  Variant (2)..(4): Xaa in position 2 to 4 is any amino acid
  Variant (6)..(19): Xaa in position 6 to 19 is any amino acid
  Variant (21)..(26): Xaa in position 21 to 26 is any amino acid
  Variant (28)..(40): Xaa in position 28 to 40 is any amino acid
  Variant (41)..(41): Xaa in position 41 is any or no amino acid
  Variant (43)..(45): Xaa in position 43 to 45 is any amino acid
  Variant (48)..(49): Xaa in position 48 to 49 is any amino acid
  Variant (52)..(53): Xaa in position 52 to 53 is any amino acid
  Variant (55)..(77): Xaa in position 55 to 77 is any amino acid
  Variant (78)..(96): Xaa in position 78 to 96 is any or no amino acid
  Variant (98)..(102): Xaa in position 98 to 102 is any amino acid
  Variant (104)..(106): Xaa in position 104 to 106 is any amino acid
  Variant (108)..(109): Xaa in position 108 to 109 is any amino acid
  Variant (111)..(112): Xaa in position 111 to 112 is any amino acid
  Variant (114)..(118): Xaa in position 114 to 118 is any amino acid
  Variant (121)..(122): Xaa in position 121 to 122 is any amino acid
  Variant (124)..(125): Xaa in position 124 to 125 is any amino acid
  Variant (127)..(127): Xaa in position 127 is any amino acid
  Variant (129)..(138): Xaa in position 129 to 138 is any amino acid
  Variant (139)..(139): Xaa in position 139 is any or no amino acid
  Variant (142)..(142): Xaa in position 142 is any amino acid
  Variant (144)..(144): Xaa in position 144 is any amino acid
  Variant (146)..(148): Xaa in position 146 to 148 is any amino acid
  Variant (150)..(159): Xaa in position 150 to 159 is any amino acid
  Variant (161)..(196): Xaa in position 161 to 196 is any amino acid
  Variant (197)..(199): Xaa in position 197 to 199 is any or no amino acid
  Variant (201)..(213): Xaa in position 201 to 213 is any amino acid
  Variant (214)..(214): Xaa in position 214 is any or no amino acid
GXXXTXXXXXXXXXXXXXXGXXXXXXRXXXXXXXXXXXXXXYXXXFRXXPLXXQXXXXXXXXXXXXXXXXXXXXXXXXXXXXXXXXXXXXXXXXXXLXXXXXAXXXEXXRXXIXXXXXGQXXAXXAXGXXXXXXXXXXXLPXAXRXXXPXXXXXXXXXXKXXXXXXXXXXXXXXXXXXXXXXXXXXXXXXXXXXXXXXXYXXXXXXXXXXXXXXE

SEQ ID NO: 28039 - protein, 22 aa, Artificial sequence
  protein pattern
  Variant (2)..(3): Xaa in position 2 to 3 is any amino acid
  Variant (4)..(4): Xaa in position 4 is Lys or Arg
  Variant (5)..(5): Xaa in position 5 is Ala, Gly, Ser or Thr
  Variant (6)..(6): Xaa in position 6 is Ala, Cys or Gly
  Variant (7)..(7): Xaa in position 7 is Phe, Ile, Leu, Met or Val
  Variant (8)..(8): Xaa in position 8 is any amino acid
  Variant (9)..(9): Xaa in position 9 is Ala, Gly, Ser or Thr
  Variant (10)..(12): Xaa in position 10 to 12 is any amino acid
  Variant (15)..(16): Xaa in position 15 to 16 is any amino acid
  Variant (18)..(18): Xaa in position 18 is Ala, Cys, Gly or Ser
  Variant (19)..(19): Xaa in position 19 is any amino acid
  Variant (20)..(20): Xaa in position 20 is Ala, Ser or Val
  Variant (21)..(21): Xaa in position 21 is Ile, Leu, Met or Val
  Variant (22)..(22): Xaa in position 22 is Ala, Gly or Asn
EXXXXXXXXXXXGQXXAXXXXX

SEQ ID NO: 28040 - DNA, 1623 bp, Azotobacter vinelandii
  CDS (1)..(1623): transl_table=11
atgtcgatcttcgaacagggcctgtcacgctctgaagtcaaccatattcccctttccccgctgagcttcatcgagcgaagcgccgctgtccatccgaaccgccccgccgtgatccacggctcgatccgccgcacctgggccgagacctacacacgttgccgccgcctggcgtccgccctggccggtcgcggcatcggcaagggcgataccgtggcggtcatgctgcccaacattccgcagatgctcgaggcgcacttcggcgtgccgatgatcggcgccgtgctcaacaccctcaacgtgcgcctggatgccgaggccatcgccttcatgctgcagcacggcgaagccaaggtactgatcgccgaccgcgaataccaggaggtgatccatgcggcgatcggcatgctcgaccatccgccgctgttgatcgacgtcgacgacccggagtacggcgagggcctgccgatcagcgacctggaatacgaagcattgctcgccgagggcgatccggcattcgcctggcagtggccggacgacgagtggcaggcgatcagcctcaactacacctccggcaccaccggcaatcccaagggcgtggtctaccaccaccgcggcgcctacctgaacgccctgggcaaccagatggtctgggcgatgggcaaccatcccgtgtacctctggaccctgccgatgttccactgcaacggctggtgctacccctggaccgtcaccgccctggccggcgcgcacgtgttcctgcgccgggtcgacccgcagaagatcctcaccctgatccacgaacaccgcgtcacccacctgtgcggcgcgcccatcgtgctcaacgccctggtcaacatgcccgactcggccaaggccgccatcgaccacccggtgcacgccatggtcgccggtgccgcgccgccggccaaggtgatcggcgcggtggaggaaatgggcatcaaggtcacccacgtctacggactcaccgaagtctacggcccggtcaccgtatgcgcctggcacgaggaatgggacgaactgccgctcgacgagcgggcccggatcaaggcccgccagggcgtgcgctatccgaccctggagggggtgatggtggccgatccgcagaccctggaaccggtgccgcgcgacggcgacaccatcggcgaaatcttcatgcgcggcaacacagtgatgaagggctacctgaagaacccgagcgccaccgccgaggccttcgagggtggctggttccacaccggcgacctggcggtctggcatccggacggctacgtggagatcaaggaccgcctgaaggacatcgtgatctccggcggcgagaacatctccaccatcgaggtggaaggcgtgctctatcgccatcacggggttctcgaagcggccgtggtggcccgccccgacgagaaatggggagaaaccccctgcgccttcgtcaccctcaaggccggccacgaacggaccagcgaggcggagatcatcgccttctgccgcgagcacctggccggcttcaagatccccaggcgcgtggtcttcagcgaattgccgaagacctccaccggcaagatccagaaatacgtcctgcgcgacagggccagggcgctctaa

SEQ ID NO: 28041 - protein, 540 aa, Azotobacter vinelandii
MSIFEQGLSRSEVNHIPLSPLSFIERSAAVHPNRPAVIHGSIRRTWAETYTRCRRLASALAGRGIGKGDTVAVMLPNIPQMLEAHFGVPMIGAVLNTLNVRLDAEAIAFMLQHGEAKVLIADREYQEVIHAAIGMLDHPPLLIDVDDPEYGEGLPISDLEYEALLAEGDPAFAWQWPDDEWQAISLNYTSGTTGNPKGVVYHHRGAYLNALGNQMVWAMGNHPVYLWTLPMFHCNGWCYPWTVTALAGAHVFLRRVDPQKILTLIHEHRVTHLCGAPIVLNALVNMPDSAKAAIDHPVHAMVAGAAPPAKVIGAVEEMGIKVTHVYGLTEVYGPVTVCAWHEEWDELPLDERARIKARQGVRYPTLEGVMVADPQTLEPVPRDGDTIGEIFMRGNTVMKGYLKNPSATAEAFEGGWFHTGDLAVWHPDGYVEIKDRLKDIVISGGENISTIEVEGVLYRHHGVLEAAVVARPDEKWGETPCAFVTLKAGHERTSEAEIIAFCREHLAGFKIPRRVVFSELPKTSTGKIQKYVLRDRARAL

SEQ ID NO: 28042 - DNA, 1929 bp, Oryza sativa
  CDS (104)..(1828)
ggtctgtcacacacacacactccagtacccccacgctttcggcacattctcctcgcgcgagaggggggaggagaggggaggggggaggagcgagagcggagcgatgggctcgccggggcatggggatgcggcggagagggacatcgacgatctcccacggaacgacgccaactacacggcgctgacgccgctctggttcctggagcgcgccgccgtggtccacccggacagggccgccgtcgtgcacggcccggtgaggtacacctgggcggagacctaccgccgctgccgccgcctcgcctccgccctcgcgcagcgatccgtcggccccggctgcacggtcgctgtgattgctccaaatgtcccggcactgtatgaagctcatttcggcgtccccatgtctggagcggtggtgaactgcgtaaacatcaggttaaacgccgagacaattgccttcctccttgaccactcagtggcagaggtcgtcatggtggaccaggaattcttcaccctagctgaagagtccctgaagatactggccgagaagaagaaatggtcgttcaggcccccgatcctgatcgtcatcggcgacccgacctgcgatccgaagcctctgcagtacgctctggggagaggagcgatcgagtacgaggagttcctgaagaccggtgacccggagttcgcctggaagccgcccaaggatgaatggcagagcatcgcgttgggttacacctccgggactacttcgagccccaagggcgtcgtgctgcaccaccgtggcgcctatgtcatggcgctcggtgtcgccatggtttgggggatgcctgagggagctgtgtacctgtggactctgcccatgttccattgtaatggttggtgttacacttgggcaatggctgcgatgtgtggaaccaacatatgtcttcgccaggtgagttcaaaggcgatatactctggcatagtgaaccatggagtgacacacatgtgcgccacgccggtcgtcttcaacaacctcatcaacgctccggcgagcgagaccttcctgccgctcccgcgcgtggtcaacatcatggtggccggagccgccccgacgccgtcgctgctcgcggcgctgtcgatccgcggcttccgcgtgacccacacgtacgggctgtcggagacgtacggcccgtcgacggtgtgcgcgtggaagccggagtgggacaggctgccgctggaggagcggtcgcggctgcactgccggcagggcgtgaggtacggggcgctggagggcctcgacgtggtggacccgaagacgatggcgccggtggccgccgacggaaagtcgtacggggagatcgtgatgcggggcaacgccgtgatgaagggctacctgaagaaccccaaggcgaacgcggaggcgttcgccggcgggtggtaccactccggcgaccttggggtgaagcaccccgacgggtacatcgaggtgaaggaccggatgaaggacatcatcatctccggcggggagaacatcagcagcctggaggtggagaaggtgctgtacgcgcacccggcggtgctggaggcgtcggtggtggcgagggcggacgagcagtggggggagtcgccgtgcgcgttcgtgacgctcaaggaaggcgccgacagctccgacgaggcggcggtggccggcgacatcatgcggttctgcagggagaggatgccggggtactgggtgcccaagtcggtggtgttcgggccgctgcccaagacggcgacggggaagatcaagaagcacgagctgaggaccaaggccaaggagctcggccccgtcaagaagagcaggatgtgagctcctcttttgcctctgcactcggctggttgctgtcgtcgttgtgttcttcggataaaaggatttgggttgcaatgctgttgtatgtaaactgttccgtc

SEQ ID NO: 28043 - protein, 574 aa, Oryza sativa
MGSPGHGDAAERDIDDLPRNDANYTALTPLWFLERAAVVHPDRAAVVHGPVRYTWAETYRRCRRLASALAQRSVGPGCTVAVIAPNVPALYEAHFGVPMSGAVVNCVNIRLNAETIAFLLDHSVAEVVMVDQEFFTLAEESLKILAEKKKWSFRPPILIVIGDPTCDPKPLQYALGRGAIEYEEFLKTGDPEFAWKPPKDEWQSIALGYTSGTTSSPKGVVLHHRGAYVMALGVAMVWGMPEGAVYLWTLPMFHCNGWCYTWAMAAMCGTNICLRQVSSKAIYSGIVNHGVTHMCATPVVFNNLINAPASETFLPLPRVVNIMVAGAAPTPSLLAALSIRGFRVTHTYGLSETYGPSTVCAWKPEWDRLPLEERSRLHCRQGVRYGALEGLDVVDPKTMAPVAADGKSYGEIVMRGNAVMKGYLKNPKANAEAFAGGWYHSGDLGVKHPDGYIEVKDRMKDIIISGGENISSLEVEKVLYAHPAVLEASVVARADEQWGESPCAFVTLKEGADSSDEAAVAGDIMRFCRERMPGYWVPKSVVFGPLPKTATGKIKKHELRTKAKELGPVKKSRM

SEQ ID NO: 28044 - DNA, 2119 bp, Zea mays
  CDS (145)..(1848)
ccggccgggggacgactctgcgcgcttcgatcccatccccccacagtcccacaccacctgcatatctccgtgcggccgtgccaagtcaaagtcgcacctcaggtctgccgaggttggcattggtggtggtgtggtgacccggcgatggcagcggagcgggatatcgacgacctgccgcggaacgacgccaactacacggcgctcacgccgctctggttcctcgagcgcgccgcgctgacccacccggccagggcctccgtcgtgcacgggcccgtgcgctacacctgggccgacacctacagccgctgccgccgcctcgcctccgccctcgcgcgccgatccgtcggccacggaagcacggtagctgtaatagccccaaacatcccagcgatctatgaagctcattttggagtgcccatggctggggcagtggtcaactgtgtcaacattcgactaaatgctgccactgtagcatttctcttggagcactcctcagcagaagttgtcatggttgaccaagaatttttcaccctggcagaggattctttgaggattatcgcagataaaaagaaaggcactttcaaacagccacttctaatagttattggtgacgcaacttgcgatccaacagccctccaagacgctttgagaaaaggagccatcgattatgaggcattcttggaaagtggagatcctgaatttgcttggagaccaccacaggatgaatggaagagtatcgcgctaggttatacttctgggacaacttccaacccaaagggtgtggtattgcatcacaggggggcttacctaatgtcactgagtggtgctttgatatggggaatgaacgaaggcgctgtttacttgtggactttgccaatgttccattgcaacggttggtgctatacatggacacttgctgctctctgcgggacaagcatatgtcttcgtcaggtttcagcgaaggccatcttctcagctatagccaacgagggcgtgactcacttctgtggggcaccggtcgtcctgaacaccatcatcaacgcccctccagccgacacgattctccccctacctcgtgtcgtcaacgtcatgaccgctggcgctgctccgccaccctctgtcctggcggcaatgtcgaagcttgggttccgtatcactcacacctacggcctgtcggagacctatggaccatccacggtgtgcgcctggaagccggaatgggacaggctgccagccgacgagcgcgcccggctccacgcgcgtcagggcgtccgttacgtcggcctggagggcctggacgtggtggacccgaagacgatggtgccggtcccggccgacggcaccacgatgggggagatcgtgatgcgcgggaacggcgtcatgaaggggtacctgaagaacccggaggcgaacgcggaggcgttcgagaacgggtggttccactcgggcgacctgagcgtgcggcacggcgacgggtacgtcgaggtgagggaccgcgccaaggacatcatcatctccggcggggagaacatcagcagcctggaggtggagaaggcggtgtacctgcacccggcggtgctggaggcgtcggtcgtggcccgcgccgacgagcggtggggggagtcgccgtgcgcgttcgtgacgctcaaggacgccgtggaccgctccgacgaggcggcgctggcgcgggacatcatgcggttctgccgcgagaagctgcccggttactgggtgcccaagtccgtggtgttcgggccgctgcccaagacagcgaccggcaagatcaagaagcatgagctcagggccaaggccaaggaactgggcccggtcgggaagagcaggatgtgatcgagcctcgagctcgtcttgctttgctacactgtactattcgtaggatggatggaagttgtatactacagactacagtgcaaactgcgtttcttctgtataacaccactactgtacgaacaatacagtcgtgtctgagcttttcttttgccagtgaggactgaactttgtatgaagtatgaactcgcgaagggcgctgcaacactgctcccccttgtatattccaaatttccaagggtacagtaatggcaagacagttaagaagttgccc

SEQ ID NO: 28045 - protein, 567 aa, Zea mays
MAAERDIDDLPRNDANYTALTPLWFLERAALTHPARASVVHGPVRYTWADTYSRCRRLASALARRSVGHGSTVAVIAPNIPAIYEAHFGVPMAGAVVNCVNIRLNAATVAFLLEHSSAEVVMVDQEFFTLAEDSLRIIADKKKGTFKQPLLIVIGDATCDPTALQDALRKGAIDYEAFLESGDPEFAWRPPQDEWKSIALGYTSGTTSNPKGVVLHHRGAYLMSLSGALIWGMNEGAVYLWTLPMFHCNGWCYTWTLAALCGTSICLRQVSAKAIFSAIANEGVTHFCGAPVVLNTIINAPPADTILPLPRVVNVMTAGAAPPPSVLAAMSKLGFRITHTYGLSETYGPSTVCAWKPEWDRLPADERARLHARQGVRYVGLEGLDVVDPKTMVPVPADGTTMGEIVMRGNGVMKGYLKNPEANAEAFENGWFHSGDLSVRHGDGYVEVRDRAKDIIISGGENISSLEVEKAVYLHPAVLEASVVARADERWGESPCAFVTLKDAVDRSDEAALARDIMRFCREKLPGYWVPKSVVFGPLPKTATGKIKKHELRAKAKELGPVGKSRM

SEQ ID NO: 28046 - DNA, 2039 bp, Zea mays
  CDS (82)..(1842)
agttccagactgcctcctccactccagtgtggccgttcgttcccctctgttccgcgccggcgcgccgcccaactctgagcgatggaaggcaccgtgctgtgcgcggccaaccacgcgccgctcacgcccatcagcttcctcgagcgcaccgcgctcgtctaccccgaccgccccgccgtcgtcgccgccggacacgccgccgcgccgccgccgcgcacctggcggcagacccgggaccgctgcctccgcctcgccgcggcgctcgcggggctcggcgtcgcgcgccgtgacgtggttgcggtgttcgcgcagaacatcccggccttctgcgagctccacttcggcattcccatggcgggcgccgtgatctgcgcgctcaactcgcggctcgacgccggcatggcgtccgtgctgctgcagcactcggaggccaaggtcgtgttcgtggacgccgcgctactgggcgtcgcccgggaggcgctccgcctcatctcccagcaggccggcggagcgagcagggtgcccgccgtggtactaatcaacgaggcgctcgacgagccgccgtcagcggcgacaggaaacgacaagatcccaggcgtcgatcggtgctacgagtacgaggccctcctcctcagcagcagcagaggcggcgatccagagttcttgatccggtggccggacgacgagaacgagccgatcgcgctgaactacacgtcggggacgacgtcgcggcccaagggcgtggtgtacacccaccgcggcgcgtacctgaactcgctgtcgtcggtgctcctcaacgacatgacggcgctgccggtgtacctgtggacggtgcccatgttccactgcaacgggtggtgcctggtgtggggcgtggcggcgcagggcggcaccaacgtgtgcctgcgcaaggtgaactcgggcgccatcttcgcggccgtggcggcgcacggggtgacgcacatgggcggcgcgccgacggtgctgagcatggtggtgaacgccacggcggaggagagggcgccgctgggcgcggggaggaagaggccggtgactgtgatgacgggcggcgcgccgccggcgccgcaggtgctgttccggatggaggagctcgggttcctggtgatccactcgtacgggctgacggagacgtacgggccagcgacggtgtgcacgtggcggcccgagtgggacgcgctgccggcggcggagcgcgcggccatcaaggcccggcaggggctccaccacctggggctggaggtggacgtgaaggacccggccacgatggccagcgtgcccgcggacgggcgcaccatgggcgaggtgatgttccgcgggaacacggtgatgggcgggtactacaaggacgcggccgcgacggcggaggccatggccggcgggtggctgcggtcgggcgacctggcggtgcggcacgccggcgacggctacgtgcggatcctggaccggtccaaggacatcatcatctccggcggggagaacatcagcaccatcgaggtggaggcggcgctgttcgcgcacccggccgtggcggaggccgcagtggtggggcggcccgacgagtactggggcgagacgccgtgcgcattcgtgacgctcagggagggcgcggccggcagcgtgcgcgccgaggaggtggtggcgttctgccaggcgcgcctgccgcggtacatggcgccccggacggtggtgttcgtggccgagctgcccaagacagccacggggaaggtgcagaagttcgcgctccgggagcaggccagggccatgggcagcatctccagctccgagcagcaggatggggcagggacgaggagcaagctctgatctgaactcgcatgcccacatggatgtctcctccattccactgacgagtagttgagcagcaacgaacctaagtgtgctgagctgtgctgtgctgtgcttggacatgtagagaaagagaatcaccacactcagtgatacagattcgtcatttcagtaatataatttacagtatcaaccttcaaaaaaaaaaaaaaaaa

SEQ ID NO: 28047 - protein, 586 aa, Zea mays
MEGTVLCAANHAPLTPISFLERTALVYPDRPAVVAAGHAAAPPPRTWRQTRDRCLRLAAALAGLGVARRDVVAVFAQNIPAFCELHFGIPMAGAVICALNSRLDAGMASVLLQHSEAKVVFVDAALLGVAREALRLISQQAGGASRVPAVVLINEALDEPPSAATGNDKIPGVDRCYEYEALLLSSSRGGDPEFLIRWPDDENEPIALNYTSGTTSRPKGVVYTHRGAYLNSLSSVLLNDMTALPVYLWTVPMFHCNGWCLVWGVAAQGGTNVCLRKVNSGAIFAAVAAHGVTHMGGAPTVLSMVVNATAEERAPLGAGRKRPVTVMTGGAPPAPQVLFRMEELGFLVIHSYGLTETYGPATVCTWRPEWDALPAAERAAIKARQGLHHLGLEVDVKDPATMASVPADGRTMGEVMFRGNTVMGGYYKDAAATAEAMAGGWLRSGDLAVRHAGDGYVRILDRSKDIIISGGENISTIEVEAALFAHPAVAEAAVVGRPDEYWGETPCAFVTLREGAAGSVRAEEVVAFCQARLPRYMAPRTVVFVAELPKTATGKVQKFALREQARAMGSISSSEQQDGAGTRSKL

SEQ ID NO: 28048 - DNA, 1629 bp, Xanthobacter autotrophicus Py2
  CDS (1)..(1629): transl_table=11
atggccggcggcatctatgacctgcatctcgaccgcaatcccgcgaacttccagccgctgacgccgctcggcttcctggagcgggcagccggcgtgttcccggaccacacggccatcatccacggtgcgctgcgtcgcaactatcgcgatttctatgcgcgcagccggcggctcgcctcggccctcgccaagctgggcgtcggcaagggcgacacggtcgcggtgatgctgcccaacgcgccggccatgctggaggcccactacggcgtgcccatgacgggcgcggtcctcaattccctcaatacccgcctcgacgccgccatcctcgccttcaccctcgaccatggcgaggccaaggtgctcatcaccgaccgggaattctcccccgtcatgaaggctgctctggccatggcgacgcgcaagcccgtggtcatcgactatgacgacccggaattcaccggcaagggcgagcgcatcggcaccatcgaatacgaggatttcctggccaccggcgacgccgacttcgcctggaaaacgcccgacgacgagtgggacgctattgcgctcaactacacctccggcaccaccggcgaccccaagggcgtggtctatcaccatcgcggcgcgcatttgctggcggtgggcaacgtggtcacctgcagcctcggcaagcatccggtctatctgtggacgctgcccatgttccactgcaacggctggtgcttcccctggtccatcacgctggccgccggcacccatgtgtgcctgcgccaggtacgcgccaagcccatcttcgacgccatcgccgactacaaggtgacgcacatgtgcggcgcccccatcgtcatgtccacgctgctcaacacgccggacgccgacaagcggcccctgccccacaaggtggagttcatcaccgccgccgccccgccgccggaagcggtgctcgccgccatgcaggaggcgggcttcaacgtggtgcatgtgtacggcctcaccgaggtctacggcccctccgtggtcaacgagtggcacgccgagtgggacgccctgcccgcgcaggagcgcgccatcaagaaagcacgccagggcgtgcgctacggcgcgctcgaagccctcgatgtgctggatcccgacaccatggtgccggtgcccgccgatggcgagacgctgggcgaggtgatgttccgcggcaacgtggtgatgaagggctacctcaagaaccccaccgccaccgacgctgcgttcgccggcggctggttccattccggcgacctcggggtgaagcatcccgacggctatatccagctgaaggaccgctccaaggacatcatcatctcgggcggcgagaacatctcctccatcgaggtggaggacgccctctacaagcacccggcggtgagtgcggcggcggtggtggccaagcccgacgagaagtggggcgagaccccggtcgccttcgtcgagctgcgcgagggcgcgagcgcgacggcggaggacctgatcgcccattgccggacccatctggcggcttataagtgcccgcgccacatcgtcttcgaggagatcccgaagacgtcgaccggcaagatccagaagttccggctgcgcgagatggccaaggaggtctga

SEQ ID NO: 28049 - protein, 542 aa, Xanthobacter autotrophicus Py2
MAGGIYDLHLDRNPANFQPLTPLGFLERAAGVFPDHTAIIHGALRRNYRDFYARSRRLASALAKLGVGKGDTVAVMLPNAPAMLEAHYGVPMTGAVLNSLNTRLDAAILAFTLDHGEAKVLITDREFSPVMKAALAMATRKPVVIDYDDPEFTGKGERIGTIEYEDFLATGDADFAWKTPDDEWDAIALNYTSGTTGDPKGVVYHHRGAHLLAVGNVVTCSLGKHPVYLWTLPMFHCNGWCFPWSITLAAGTHVCLRQVRAKPIFDAIADYKVTHMCGAPIVMSTLLNTPDADKRPLPHKVEFITAAAPPPEAVLAAMQEAGFNVVHVYGLTEVYGPSVVNEWHAEWDALPAQERAIKKARQGVRYGALEALDVLDPDTMVPVPADGETLGEVMFRGNVVMKGYLKNPTATDAAFAGGWFHSGDLGVKHPDGYIQLKDRSKDIIISGGENISSIEVEDALYKHPAVSAAAVVAKPDEKWGETPVAFVELREGASATAEDLIAHCRTHLAAYKCPRHIVFEEIPKTSTGKIQKFRLREMAKEV

SEQ ID NO: 28050 - DNA, 1794 bp, Oryza sativa (japonica cultivar-group)
  CDS (1)..(1794)
atggagggcacggtgctctgctccgccaaccacgcgccgctcacgcccatcagcttcctcgagcgcaccgcgctcgtgtaccccgaccgtctcgctattgtcgcctcggatggcagcgccggcgtggccgtgtcgcgcacctggcgggacactcgggcccgctgcctccgcctcgccgccgccctcaccggcctcctcggcgtccagcgccacgacgtggttgcggtgttcgcgcagaacattcctgctgtttgcgagctccacttcggcgtccccatggccggcgccgtcatctgcacgctcaactcgcgcctcgacgccgccatggcggccgtcctgctgcgccactccgaggccaaggtcgtcttcgtcgaccgcgctctgctcggcgtcgcccagaaagccctcgtgctcgtcgccgaagccggagccaggcgtcccgtcttggttctcatcagcgagctcctcgacgaaaacgaacgatcacctcctgatgccaagatcaaggtcacccgagtcgattacgagtacgagcacctcctgagcgccgccgccgccggatcgtcgccggacttcgcgatccggtggccggccgacgagaacgagccgatcgccctgaactacacctccgggacgacgtcgaggcccaagggcgtgatctacagccaccgcggcgcgtacctgagcagcctcgccgccgtgatcgtgaacgccatggcggagacgccggtgtacctgtggaccgtgccgatgttccactgcaacgggtggtgccaggtgtggggcgtggcggcgcagggcggcacgaacgtgtgcgtccgcagggtgaccgcggcggccatcttcgacagcgtggcgcggcacggcgtgacgcacatgggcggcgcgccgacggtgctgagcatgatcgtgaacgcgacggcggacgagcggcggcggcagccgggcgggaggaggaggagggtgacggtgatgaccggcggcgcgccgccgccgccgcaggtgctgttccggatggaggagcaggggttcctggtgatccactcgtacgggctgacggagacgtacgggccggcgacggtgtgcacgtggaagccggagtgggacgcgctgacggcggaggagcgcgcccggatcaagtcgcggcaggggctccaccacgtcgggctggaggcggcggacgtgaaggacccggcgacgatgcggagcgtgccggcggacgggcggacggtcggggaggtgatgctccgggggaacacggtgatgagcgggtactacaaggacggcggcgcgacggcggaggcgctcgccggcgggtggctccggtcgggcgacctggcggtgcgggaggaggacgggtacatcaagatcctggaccggtccaaggacatcatcatctccggcggggagaacatcagcacggtcgaggtggaggcggcgctgttcgggcacccggcggtggaggaggcggcggtggtggggcggccggacgagtactggggcgagacgccgtgcgcgttcgtgaagctgagaggaggaggaggaggaggaggaggcggcgcggcggtggaggaggagctgatggcgttctgccgcgcgcggctgccgcgatacatggcgccgcggacggtggtggtggtggaggaggagcttccgaagacggcgacggggaaggtgcagaaggtggcgctgcgggagcgggccaaggccatgggcagcctccccgccgccgcctcttcctcctccaggcgcgcacccacagggacagctgggtctgggagaagcaagctctga

SEQ ID NO: 28051 - protein, 597 aa, Oryza sativa (japonica cultivar-group)
MEGTVLCSANHAPLTPISFLERTALVYPDRLAIVASDGSAGVAVSRTWRDTRARCLRLAAALTGLLGVQRHDVVAVFAQNIPAVCELHFGVPMAGAVICTLNSRLDAAMAAVLLRHSEAKVVFVDRALLGVAQKALVLVAEAGARRPVLVLISELLDENERSPPDAKIKVTRVDYEYEHLLSAAAAGSSPDFAIRWPADENEPIALNYTSGTTSRPKGVIYSHRGAYLSSLAAVIVNAMAETPVYLWTVPMFHCNGWCQVWGVAAQGGTNVCVRRVTAAAIFDSVARHGVTHMGGAPTVLSMIVNATADERRRQPGGRRRRVTVMTGGAPPPPQVLFRMEEQGFLVIHSYGLTETYGPATVCTWKPEWDALTAEERARIKSRQGLHHVGLEAADVKDPATMRSVPADGRTVGEVMLRGNTVMSGYYKDGGATAEALAGGWLRSGDLAVREEDGYIKILDRSKDIIISGGENISTVEVEAALFGHPAVEEAAVVGRPDEYWGETPCAFVKLRGGGGGGGGGAAVEEELMAFCRARLPRYMAPRTVVVVEEELPKTATGKVQKVALRERAKAMGSLPAAASSSSRRAPTGTAGSGRSKL

SEQ ID NO: 28052 - DNA, 2085 bp, Oryza sativa (japonica cultivar-group)
  CDS (1)..(2085)
atggcgagcgcgtcggtgccggccgccggctacggcgcggacggcgtgtaccgctcgctgcgcccgcccgcgcccgtcgcgtccgacccgggcctctccctcaccgacctcctcctccgccgcgccgacgcctgcccctccgcggtcgcgctcgccgacgcggccgccggcggccgcgccctcaccttcgcggagctgaggtcggccgtcctctccaccgccgtcgcgctctcctcccgcgcgggcgtgcgacccggcgacgccgtgctcctcctcgcgcccaactgcgtgctctacccggtctgcttcttcgccgtcaccgccctcggcgccgtcggcaccaccgtcaacccggactacaccccgcgggagatcgccaagcaggtctccgacgcgcgcgccaagctcgtcatcaccatctccgccctggtgcccaagattgcggggctccgcctccccgtcatcctcctcgacgacgacgcgaacgccgcggccgcctccttgcctccggacgccaccgtcacgctctacaccaacctcgtcgccggcgtgaaggaggcggattaccgccgcccaccaatcaagcagagcgacacggcggctctcctctactcgtcgggcacgacgggggatagcaagggcgtcatcctgacgcaccgcaacttcatcgccgcggcgaggatggtgacctccgaccaagacgagcgccgggaggggcccaacgtgttcctctgcttcctccccatgttccacatcttcggcctgtccgtcatcacgtacgcgcagctgcatcgcgggaacgccatcatcgccatgtcgcggttcgacatcaactccctgatggaggccgtgcagaggcaccgcgtcacgcacctgttctgcgtgccgccggtcattatcgcgctcgccaagcacgggaaggccggtaagtacgatctcagctctctcaagttcatcggctccggcgccgcgccgctcggcaaggatgtgatggaggtcgtggccaagaaattcccggacagtgagattgttcagggttatggtatgactgagacttgtggaatcatatcgctcgagtacccagaaaaaggacaggctcgtgaatttgggtcaactggcacgcttgtctcaggagttgaggcaaagattgtcgacataaagacattaaaacatctaccgcccaatcaagtaggagaaatttgtgttcgagggccaaatgtaatgcaagggtatttcaacaatgtgcaagctactgaatttacaatcaagcaagggtggttgcacactggtgatcttggatacttcgacggaggaggccagctttttgttgttgatagacttaaagaactgattaagtacaaaggtttccagattgcacctgccgagcttgaagggttacttctatctcatccagagattctagatgctgttgttatcccgtttcctgatgctaaagctggggaggttcccattgcctatgttgttcggtcacctgacagttcattgacagaagttgatgtccaaaaatttattgaaaaacaggtgctaatatatttcactaatgaactgcattatcaggtggcgtactacaaaagattgaagagagttacctttgtgggcagcgtgcccaaatcagcttcaggaaagattctgagaaggcagcttatcgcccaaagggagtacgagactcgcgcatcaatcatttcattccatgccaaacacatgatgcatgtgattgacaattgtttggaggcaaaaggtaggggtagcgatgtgtgctacgctggcagccttgctgcacgtgtcatcgtggaggacgtacgtgtaggcaggcgtcttgatcgacgagctcctcggctcttctacgggtccggtgcttgtgacttgggagagatccgagagggtaaaccggccggcgagaaacgggaggaggcagcttgcgagcagcaggggtgcatgcctcttgcgggacacgagcgaaaatgccgtgcgcgtggcgcggaccgaatagttgatgggccgaataccggcacgagagggccgtggtttagcgggcccctcatggaccgtagtttggccttttag

SEQ ID NO: 28053 - protein, 694 aa, Oryza sativa (japonica cultivar-group)
MASASVPAAGYGADGVYRSLRPPAPVASDPGLSLTDLLLRRADACPSAVALADAAAGGRALTFAELRSAVLSTAVALSSRAGVRPGDAVLLLAPNCVLYPVCFFAVTALGAVGTTVNPDYTPREIAKQVSDARAKLVITISALVPKIAGLRLPVILLDDDANAAAASLPPDATVTLYTNLVAGVKEADYRRPPIKQSDTAALLYSSGTTGDSKGVILTHRNFIAAARMVTSDQDERREGPNVFLCFLPMFHIFGLSVITYAQLHRGNAIIAMSRFDINSLMEAVQRHRVTHLFCVPPVIIALAKHGKAGKYDLSSLKFIGSGAAPLGKDVMEVVAKKFPDSEIVQGYGMTETCGIISLEYPEKGQAREFGSTGTLVSGVEAKIVDIKTLKHLPPNQVGEICVRGPNVMQGYFNNVQATEFTIKQGWLHTGDLGYFDGGGQLFVVDRLKELIKYKGFQIAPAELEGLLLSHPEILDAVVIPFPDAKAGEVPIAYVVRSPDSSLTEVDVQKFIEKQVLIYFTNELHYQVAYYKRLKRVTFVGSVPKSASGKILRRQLIAQREYETRASIISFHAKHMMHVIDNCLEAKGRGSDVCYAGSLAARVIVEDVRVGRRLDRRAPRLFYGSGACDLGEIREGKPAGEKREEAACEQQGCMPLAGHERKCRARGADRIVDGPNTGTRGPWFSGPLMDRSLAF

SEQ ID NO: 28054 - DNA, 1704 bp, Oryza sativa (japonica cultivar-group)
  CDS (1)..(1704)
atggcggcggagagggacatcgacgacctgccgcgggggggcgccaactacacggcgctcacgccgctctggttcctggagcgcgccgcgctggcgcacccggcgcgggcatccgtcgtgcacggccccgtgcgctacacctgggccgacacctaccgccgatgccgccgcctcgcctccgccctcgagcgccggtccgtcggccacgggagcacggtagctgtaatagctccaaatatcccagcagtatatgaggcccattttggagttccaatggctggagcagtggtgaactgcgtcaacattcgattaaatgctcctactgttgcatttctcttggagcactcatcagcggaagttgtgatggttgaccaggaatttttctccctagcagaggattctctgaggattattgcggagcaaaagaaaggagctttcaaacagccacttctaattgttattggtgatcaaacttgtgatcccgtgtccctcaaaagtgctttgagtaaaggagccattgagtatgaggagtttctggaaactggcgatcctgaatttgcctggaaaccaccacaggatgaatggaagagtattgccttaggttatacttccgggacaacttccaacccaaagggcgtggtactgcatcacaggggtgcttacctaatgtcactgagtggtgctctggtatggggaatgaatgaaggcgctgtttatttgtggactttgccgatgttccactgtaatggctggtgctatacatggacacttgctgctctttgtggaacaagcatttgtcttcgtcaggttacagcaaaggccatcttctcggcgatagccaaccaaggcgtgacccacttctgtggtgcaccggttgtcctcaacaccatcgtcaacgctccgccggctgacgccatcctccccctgccgcgtgtcgtcaacgtcatgaccgccggcgccgcgccgccgccgtcggtgctcgcgtccatgtcgaagctcggtttccgcatcacccacacctacgggctgtccgagacgtacggcccgtccacggtgtgcgcgtggaagccggagtgggacgagctgccggacgacgagcgcgcccgcctccacgcccgccagggcatccgctacgtgggcctcgagggcctcgacgtcgtcgacccgaagacgatggcgcccgtccccgccgacggctcgacgctcggggagatcgtcatgcgcgggaacggcgtcatgaaggggtacctcaagaaccccagggcgaacgcggaggcgttcgagaacgggtggttccactccggcgacctcggcgtgaagcacaccgacgggtacatcgaggtgaaggacagggctaaggacatcatcatctccggcggggagaacatcagcagcctggaggtggagaaggcggtgtaccagcacccggcggtgctggaggcgtcggtggtggcgcgggccgacgagcagtggggggagtcgccatgcgcgttcgtgacgcccaaggacggcgccgacagctccgacgaggcggcactcgccggcgacatcatgcggttctgccgggagaggctgccggggtactgggtgcccaagtccgtcgtgttcgggccgctgcccaagacggcgacggggaagatcaagaagcacgagctgagggccaaggccaaggaattgggcccggtccggaagagcaggatgtga

SEQ ID NO: 28055 - protein, 567 aa, Oryza sativa (japonica cultivar-group)
MAAERDIDDLPRGGANYTALTPLWFLERAALAHPARASVVHGPVRYTWADTYRRCRRLASALERRSVGHGSTVAVIAPNIPAVYEAHFGVPMAGAVVNCVNIRLNAPTVAFLLEHSSAEVVMVDQEFFSLAEDSLRIIAEQKKGAFKQPLLIVIGDQTCDPVSLKSALSKGAIEYEEFLETGDPEFAWKPPQDEWKSIALGYTSGTTSNPKGVVLHHRGAYLMSLSGALVWGMNEGAVYLWTLPMFHCNGWCYTWTLAALCGTSICLRQVTAKAIFSAIANQGVTHFCGAPVVLNTIVNAPPADAILPLPRVVNVMTAGAAPPPSVLASMSKLGFRITHTYGLSETYGPSTVCAWKPEWDELPDDERARLHARQGIRYVGLEGLDVVDPKTMAPVPADGSTLGEIVMRGNGVMKGYLKNPRANAEAFENGWFHSGDLGVKHTDGYIEVKDRAKDIIISGGENISSLEVEKAVYQHPAVLEASVVARADEQWGESPCAFVTPKDGADSSDEAALAGDIMRFCRERLPGYWVPKSVVFGPLPKTATGKIKKHELRAKAKELGPVRKSRM

SEQ ID NO: 28056 - DNA, 1650 bp, Arabidopsis thaliana
  CDS (1)..(1650)
atggaactcttacttccacacccatcaaactcaactccactcaccgtcctcggcttcttagaccgagccgcttccgtctatggtgactgtccgtccatcctccacactgcaaacaccgttcatacttggtccgaaacacataaccgctgtctccgtatcgcatcggctctaacttcctcctctatcggaattaaacaaggccaagtcgtctctgtcgtgggtcccaacgtcccgtccgtctatgagcttcagtttgctgtcccaatgtccggagccatcttaaacaacatcaaccctcgcttagacgcacacgcactctctgtcctcctgcgtcacagcgaatccagactcgttttcgtcgaccaccgttctatatccttagtccttgaagcagtttcattattcacacaacacgagaaacctcacctcgtcctcctggacgatgaccaagagaacgattcttcatccgcatcagattttcttgacacgtacgaagaaattatggagagaggaaattcaagattcaagtggatccgtcctcaaaccgaatggcaaccaatggttcttaactatacttccggaacgacgtcgtctcccaagggagtggtacttagccacagagcgattttcatgctcactgttagctccttgcttgattggtcagtaccaaaccggccagtttacttgtggactctaccgatgtttcacgccaatggttggggttacacttggggcaccgcagcggttggagccaccaacatctgcacgcgtagagtcgacgcaccgactatttacaacttgatcgataagcacaatgtgacccacatgtgtgctgcacctatggttctcaacatgctaattaactatccattaagtacgccgctcaagaacccggttcaggttatgacctctggagctcccccaccagcaaccattatctcccgagcggagtcacttggtttcaacgtcagccactcatacggtttaacagagactagcggtccggttgtgtcatgtgcttggaagcctaagtgggaccatcttgatccattggagagagctaggctgaagtcaaggcaaggagtaagaacactcggattcacggaagtcgatgtaagggatcgaaaaacaggaaagagtgtgaaacacgacggagtttcggttggagagattgttttcagaggcagctcagtcatgttgggatactacaaagaccctcaaggaactgcggcttgtatgagagaggacgggtggttctactctggagacatcggggttatacacaaagatggttacttggagatcaaagatcggtcaaaagatgtgatcatatgcggaggagaaaatataagcagcgcagagattgagacggttctgtatacaaatccggtggtgaaggaagctgcggtggtggctaaaccggataagatgtggggagagacaccatgtgcttttgtgagcttgaagtgtgataacaatggtgatggttcggttcccgtgaccgagagagagataagggagttttgtaagacgaagttacctaagtacatggttccgaggaaagtgatctttcaggaggaacttcccaagacttccacaggaaaaattcagaagtttttgctaagacaaatggctaagaccctgtcttga

SEQ ID NO: 28057 - protein, 549 aa, Arabidopsis thaliana
MELLLPHPSNSTPLTVLGFLDRAASVYGDCPSILHTANTVHTWSETHNRCLRIASALTSSSIGIKQGQVVSVVGPNVPSVYELQFAVPMSGAILNNINPRLDAHALSVLLRHSESRLVFVDHRSISLVLEAVSLFTQHEKPHLVLLDDDQENDSSSASDFLDTYEEIMERGNSRFKWIRPQTEWQPMVLNYTSGTTSSPKGVVLSHRAIFMLTVSSLLDWSVPNRPVYLWTLPMFHANGWGYTWGTAAVGATNICTRRVDAPTIYNLIDKHNVTHMCAAPMVLNMLINYPLSTPLKNPVQVMTSGAPPPATIISRAESLGFNVSHSYGLTETSGPVVSCAWKPKWDHLDPLERARLKSRQGVRTLGFTEVDVRDRKTGKSVKHDGVSVGEIVFRGSSVMLGYYKDPQGTAACMREDGWFYSGDIGVIHKDGYLEIKDRSKDVIICGGENISSAEIETVLYTNPVVKEAAVVAKPDKMWGETPCAFVSLKCDNNGDGSVPVTEREIREFCKTKLPKYMVPRKVIFQEELPKTSTGKIQKFLLRQMAKTLS

SEQ ID NO: 28058 - DNA, 1614 bp, Archaeoglobus fulgidus DSM 4304
  CDS (1)..(1614): transl_table=11
atgagtgaggcatataactaccagcttttgttgaagcacattctcgagagcggtgtgacgtacgctccaaagcaggaaatcgtctacagagatttgaagaggttcacctacagagacatctacgagagagttcacaggctggcaagcgctcttgaggagcttggcgtaaagaagggaacgaaggtggcggttctggactgggacacgaaccgctatctggaatgcttcttcgctatccccatgatgggggcggttttgcatacggtcaacgtcaggttaagccccgaggacatactttacacgatgcagcatgccgaggatgaggtggttctggtttacaaggacttcgtaccgcttatagaatcaattgcggacaagctcgacaccgtgaagaaatatgttgttatgacagacgacacaatgcccgaaacgaagcttactgacgtagagtatgaggagatgctgaagaaggccagccccaactacgacttcccggactttgatgagaacacgatggcaacgctgagctacaccaccggcactacgggaaggccgaagggggtctggttcacgcacagaaagctttttctccacactctcgcaggttgtatagcaatgaccggctacaggtcggttttgaggctgaaggaagatgaggtcgtttacatgcccctcacgccgatgttccacgtccacgcgtggggagtgccctacatgatgtggctgctcggccacaagcacgtctatccgggcaggtacgagcctcagatgattgtcaagctggtcatgactgaaggggtaacttactcccactgcgtgccgacaattctacagatgattgttgacaatctgccagagggcttcaagttccccggctggaagatgattattggaggagctaagctgccgaaaggacttgctctgagggcgagggagaagggcataataaccatggcgggctacggaatgtccgagacctgcccaatattgactggagggttcctcaagcctcacttgctcaacgtcgatgaggaaaccaaggttgagctgtcaatcaagaccggcataccattcccgctggtttatgtcagggtggtgcatgacgatttcactgacgtgaagccggacgagcaggacatgggagaggttgtggtcagagcaccgtggctgactgacagctatctcaaagatccggagaagacaaaggagctctgggagggaggatggttgcacactggagatatagcggtcatggatgaggagggttatatcaccattgtcgacaggctcaaggatgttgtgaagagcggaggagagtggatttccacgctgacactcgaaaacctgctgagcctgcatcccaaagtgagggaggttgcagttatcggcatcccggatgagaagtggggtgagagaccgctcgccatcatcgtcccaatgcccggagagaagccgactcctgaagagctgagagctcacctcatgaagtttgtcgaagagggcaagattaccaagtgggctgtgcctgacagattcgaaatagtcgatgagataccgaagacgagcgtcggcaagatagacaagaaggtcctgaagcagatgtactcccgctaa

SEQ ID NO: 28059 - protein, 537 aa, Archaeoglobus fulgidus DSM 4304
MSEAYNYQLLLKHILESGVTYAPKQEIVYRDLKRFTYRDIYERVHRLASALEELGVKKGTKVAVLDWDTNRYLECFFAIPMMGAVLHTVNVRLSPEDILYTMQHAEDEVVLVYKDFVPLIESIADKLDTVKKYVVMTDDTMPETKLTDVEYEEMLKKASPNYDFPDFDENTMATLSYTTGTTGRPKGVWFTHRKLFLHTLAGCIAMTGYRSVLRLKEDEVVYMPLTPMFHVHAWGVPYMMWLLGHKHVYPGRYEPQMIVKLVMTEGVTYSHCVPTILQMIVDNLPEGFKFPGWKMIIGGAKLPKGLALRAREKGIITMAGYGMSETCPILTGGFLKPHLLNVDEETKVELSIKTGIPFPLVYVRVVHDDFTDVKPDEQDMGEVVVRAPWLTDSYLKDPEKTKELWEGGWLHTGDIAVMDEEGYITIVDRLKDVVKSGGEWISTLTLENLLSLHPKVREVAVIGIPDEKWGERPLAIIVPMPGEKPTPEELRAHLMKFVEEGKITKWAVPDRFEIVDEIPKTSVGKIDKKVLKQMYSR

SEQ ID NO: 28060 - DNA, 1626 bp, Mesorhizobium loti MAFF303099
  CDS (1)..(1626): transl_table=11
atgagacagcactacgaagccgccctgcgcgatgacgccaactgtgtggccctgtctccactgtcgttcctgaaaagggccgagttggtctacggcgcgcgctctgcggtgacgtatggcgacgtaaggcgcacatgggcacagacgggcgctcgctgccgttcggtcgcggcggggctggcggctttgggcgtggggccgggggacacggtttcggtgctgtcgccaaacattcccgagctcttcgaactgcactatgccgtgcccttgctgggggctgtgttgaacaccatcaacacccgcctggagccggaaaccgtcgcctatatcctggcgcattcggactcgacgctggtgattgccgatacggccttcgcacccttgctgcgagaagcctttcgattgaacggcaacacgctcccggttgtcgatgtcgtcgatgcgcaggcgcaggcttctgccgagttcggcgaacgcagctatgaggatctggcggctcatcctcccatggggtgggaactgcccaaggatgagtggcaggcgctggcgctgaactatacttccggcacttcggggcggccgaagggcgtgatttatcaccatcgcggcgcctatctgatggcgatggggacgattgccgcatgggccttgccgcagcacccgacttacctgtcggtcgtgcccatgttccactgcaacggctggacccatccctggtcgatggcgatcgtcggagccaacatggttttcacccgcgatgcgtcgccgggcaaactgctggaggccatggcggcgcaccgcgtcacccatatgggagctgcgccaatcgtgctgcaaatgctctgcgacggccgcggtgcttccgcgcaacccttcaatccccagatcagggtcatgaccgctggtgcgccgcccccgcccgcggttcttgaaaaggccgcgcaaatgggtctcgatgtgatgcaagtgtacggtctgaccgaaacctacggtcatatttcccaatgtctttggcaggacgaatgggaagccctgtctgtttctgcaagagctgaaaaacaggcgatgcagggcgtcgcctttccgatggtcgaggacatccgcgttgtcgaccgcgacaccggcacggatgtaccgcgcgatgggctgacacaaggtgagatcgccattcgcggcaatacggtgatgaagggatattacaaggacgcgacctccaccgcggcggccttcgagtctggctggttctggtccggtgatgccgcggtggtccatcctgacgggtatattcagatccgggaccggctgaaggatgtgatcatctcaggcggggaaaacatctcgtccgtcgaggtcgagtccgttctataccgacaccctgcgatcagcgttgcggccgtggtggcccgcccgcatccgaaatggggcgagagcccatgcgcctttgtcgaactgcgcgagggcgcgagcgcgaccgaagcggaaatcattgccttctgtcgcgccaatatcgcgcatttcaaagcgccgaaaacggtggtgttcggccctttgccaaaaaccgcgacaggcaagattcagaagttcattctgcgggcggcagcccgtgacctggggcctcaggcatga

SEQ ID NO: 28061 - protein, 541 aa, Mesorhizobium loti MAFF303099
MRQHYEAALRDDANCVALSPLSFLKRAELVYGARSAVTYGDVRRTWAQTGARCRSVAAGLAALGVGPGDTVSVLSPNIPELFELHYAVPLLGAVLNTINTRLEPETVAYILAHSDSTLVIADTAFAPLLREAFRLNGNTLPVVDVVDAQAQASAEFGERSYEDLAAHPPMGWELPKDEWQALALNYTSGTSGRPKGVIYHHRGAYLMAMGTIAAWALPQHPTYLSVVPMFHCNGWTHPWSMAIVGANMVFTRDASPGKLLEAMAAHRVTHMGAAPIVLQMLCDGRGASAQPFNPQIRVMTAGAPPPPAVLEKAAQMGLDVMQVYGLTETYGHISQCLWQDEWEALSVSARAEKQAMQGVAFPMVEDIRVVDRDTGTDVPRDGLTQGEIAIRGNTVMKGYYKDATSTAAAFESGWFWSGDAAVVHPDGYIQIRDRLKDVIISGGENISSVEVESVLYRHPAISVAAVVARPHPKWGESPCAFVELREGASATEAEIIAFCRANIAHFKAPKTVVFGPLPKTATGKIQKFILRAAARDLGPQA

SEQ ID NO: 28062 - DNA, 1641 bp, Mesorhizobium loti MAFF303099
  CDS (1)..(1641): transl_table=11
atggccaattcttacgaacaggatctcgacaggaacgcggccaaccaccagccgctgacgccgctcacctatctggagcgcgcggcaaagacctatcccgaccacatcgccatcatccacggccgccagcgcatcagctaccgcgatttctggcgccgctcgctgaaggtcgcatcggcactgcaaaagcgcggcatcggcaagggcgacacggtcaccgtgatgctgtccaacacgccgccgatgctggaggcgcatttcggtgtgccgatgaccaaggcggtgctgcattcgctcaacacccgcctcgacgccgcggtcatcgccttccagctcgaccatgccgagaccaaggtgctcatcgtcgaccgcgaattctccggcgtcgtccggcaggcgctcgatctggccaaggtcacgccgctggtcatcgactatgacgatcccgactacgccgccgacgccccctatccgaagggggaacggattggcgcgctcgactatgaggactttgtcgccggtggcgacgaggatttcgcctggtcgatgcccgacgatgaatgggacgccatctcgctcaactacacctcgggcacgacgggcaatccgaagggcgtggtctaccaccatcgcggtgccgccctgatggcctacaccaacaccatccatgccggcatggccaagcacgccgtctatctctggacgcttccgatgttccactgcaatggctggtgctttccgtggacgctggccgtccaggccggcacccatgtctgcctgcgctgggtgcggccgaagccgatctatgacgccatcgccgatcatggcgtcacacatctctgcggcgcgccggtcgtcatgtcggtgctgatcaacgcccgggatgaggacaagcgcacgttcgcgcagacggtgaccttcaacaccgcggccgcgccgccgccggaagccgtgctgtcggggatggccgatgccggctttgccgtcacccatctctatggcctgaccgagacctatggcccggccgtggtcaacgaatggcatggcgaatgggacgatctcgcaaagggcgagcgcagcgccaagaaggcaaggcagggcgtgcgctatgccgcgctcgaaggcctgaccgtcatggaccccgagacgatgcaggcgacgccggccgacggcgagaccatcggcgaggtcatgttccgcggcaacatcgtcatgaagggctacctcaagaaccgcaaggccagcgacgaagcgttcgccggcggctggttccattccggtgatctcggcgtcatgcatcccgatggctacatccagctcaaggaccgttccaaggacatcatcatttcgggcggcgagaacatttcctcgatcgaggtcgaggatgcgctctacaagcacccgtccgtcgcctcctgcggcgttgtggcgcgccatgacgacaaatggggggaggtgccggttgcctatgtcgagctgaagcccggcaagacggcgagcgaggccgagatcatcgagcactgccgtgcgctgcttgcccgcttcaaagtgccgaaagcggtgatttttgccgagatcccgaagacctcgaccggcaagatccagaaattccgactccgcgaaatggccaaactcgcctga

SEQ ID NO: 28063 - protein, 546 aa, Mesorhizobium loti MAFF303099
MANSYEQDLDRNAANHQPLTPLTYLERAAKTYPDHIAIIHGRQRISYRDFWRRSLKVASALQKRGIGKGDTVTVMLSNTPPMLEAHFGVPMTKAVLHSLNTRLDAAVIAFQLDHAETKVLIVDREFSGVVRQALDLAKVTPLVIDYDDPDYAADAPYPKGERIGALDYEDFVAGGDEDFAWSMPDDEWDAISLNYTSGTTGNPKGVVYHHRGAALMAYTNTIHAGMAKHAVYLWTLPMFHCNGWCFPWTLAVQAGTHVCLRWVRPKPIYDAIADHGVTHLCGAPVVMSVLINARDEDKRTFAQTVTFNTAAAPPPEAVLSGMADAGFAVTHLYGLTETYGPAVVNEWHGEWDDLAKGERSAKKARQGVRYAALEGLTVMDPETMQATPADGETIGEVMFRGNIVMKGYLKNRKASDEAFAGGWFHSGDLGVMHPDGYIQLKDRSKDIIISGGENISSIEVEDALYKHPSVASCGVVARHDDKWGEVPVAYVELKPGKTASEAEIIEHCRALLARFKVPKAVIFAEIPKTSTGKIQKFRLREMAKLA

SEQ ID NO: 28064 - DNA, 1590 bp, Thermoplasma volcanium GSS1
  CDS (1)..(1590): transl_table=11
atgaatggcgattaccagctgacaatagacaagatgttagagagcggagtctcttcgaatccaaatcagataataaattatagcggcaaaaaaacttttacttataaagagttcagagagagggtttacaggctcgcaaaagcattaatttccataggggttaagaagggagacacggtagcagtcatagactgggatacatacgtatacttggaggcctactttgctgttccaatgataggggcggtactgcatacggttaacgttaggtatcctcaagatcttatatactacacaatggatcacgccgaggataagtatgttatagtaagggacgaatttgtccctattctctcaaagaataaggaggctttctacttcataaagggctggattatatattccgaatacgggaatgtcccagacgaactttctccaaagtacatctatgatgagttgatgtcgaaaaactacgatatcgaacttccagaaatatcggaaaacgatctagcaacgaccttctacacatccggaactactggaattccaaaaggtgtacagtttacacacaggcagatagttttgcacgcaatatcatccggcttggcactatctgacaggcctattagcctgactgcagatgacgtcataatgccgttggtgccaatgtttcatgttcatgcttggggagttccttatatgacaataatgagcggccggcaatatgtccttcctggtcgttatgacttcgatcatataatagatcttatcgcacaagaaaatatcacggtgatagccatggtaccttcgatcctctacatgatcgttacgaatccaaatgtagggaagatagctgggagaaagataagagcgataataggaggcggagctcttcctgaaggcctccagaaagctgcagaaaagcttggtataatggcaatatctggttatggcctctctgagactgcccctatacttacgctagctacatacaactctgatgtcaagaagctcccacttgaagagcaaaagaagtatcacctcaagactggaataccaataccgcttgtacagctccgtgttatcgatgacaaatggaacgatgtgccaagagatgagaaaaccataggcgagatcgtggtaagggcgccctggttgacgtctgtgtatgtaaagaacaaagagggtactgaagctttgtggaagggcggctggatgcacacaggtgatttggctgttatggataagtttggatacattaagatagttgacagagaaaaggatgcggtaaagtctggcggggagtttataccatcacttatactagaagatgcaataagtgcgtgtcctggtgttgttgaaaacgctgtcgttggaaagccccatgagaagtggggagagaggccggtagccttctatacaggtactgctaagccagaggagataagaaaatgcttggaagatattgtgaggcagggaagaattgcaaaattttggattccagacgacttcataaacgtaaaagaatttgtaaagaccagtactggcaaaatagacaaaaaagtactcagggaaatgttgaaaaaataa

SEQ ID NO: 28065 - protein, 529 aa, Thermoplasma volcanium GSS1
MNGDYQLTIDKMLESGVSSNPNQIINYSGKKTFTYKEFRERVYRLAKALISIGVKKGDTVAVIDWDTYVYLEAYFAVPMIGAVLHTVNVRYPQDLIYYTMDHAEDKYVIVRDEFVPILSKNKEAFYFIKGWIIYSEYGNVPDELSPKYIYDELMSKNYDIELPEISENDLATTFYTSGTTGIPKGVQFTHRQIVLHAISSGLALSDRPISLTADDVIMPLVPMFHVHAWGVPYMTIMSGRQYVLPGRYDFDHIIDLIAQENITVIAMVPSILYMIVTNPNVGKIAGRKIRAIIGGGALPEGLQKAAEKLGIMAISGYGLSETAPILTLATYNSDVKKLPLEEQKKYHLKTGIPIPLVQLRVIDDKWNDVPRDEKTIGEIVVRAPWLTSVYVKNKEGTEALWKGGWMHTGDLAVMDKFGYIKIVDREKDAVKSGGEFIPSLILEDAISACPGVVENAVVGKPHEKWGERPVAFYTGTAKPEEIRKCLEDIVRQGRIAKFWIPDDFINVKEFVKTSTGKIDKKVLREMLKK

SEQ ID NO: 28066 - DNA, 1668 bp, Aeropyrum pernix K1
  CDS (1)..(1668): transl_table=11
ttggcattgcccgagaagaccccatggaggccgggctatagtctcactatccacaagatctaccagtacgccctctacatgtggagcgacttggagatagtatcccgcaccactaaggggctggagagatacaccttctcagacgccgcgagaaggattgaaagcctagccaacgccctcagggcgctcggcgtgtccgggctcgacagggtagcaactatggactggaacacccactggcactatgagacctacttcgcggcccccatgatgggggctgttctccaccctctcaacgtgaggctagcccccaacgagatagcctacataatgaaccacgctgaggataaggttctgatcgtgcacagcgacttcctgaagctcgcggaggccatactcccccacgcacccagcgtggagcacgtggtaatagtggacgccgagtcccacccggacaggatagcaggcaggaggctacacaactatgaggacctcataaaggagcacggcgggaggttcgagtggcccgagctcgacgagaacaggccggctgcgatgggctacaccagcgggaccacggggctgccgaagggcgtgtaccacagccataggatgatagtggtccacgctctcagcggggccctagccctagccactaggggtaggaggagggttacaggggatgacacccttctccacatagtccccatgttccacgtgctagcgtggggactcccctacatggcgacgctcaccgggatgaagcaggtgttcccgggcaggctagaccccaaggtcctcctagaccttatagtgggcgagaaggttacagtcactgcgggcgtacccaccatactctacatgctgctctcccacccggagagcggtaagtacgacctctcaggactcctcttcgtcaacggggggcaggcgctccccaaagggctggcggacgctgctaggaagaggggcatagaagttatcgtgggctacggcatgacggagacagcgccaatattgactctagcaaacgtgccccaaaagtacatggacaggagcgaggagctatccctcacaaccggctggccagtccccctggtggagctgatggtggccgacccggagaccctggagcccgtgccgaaggacgggaagaccatgggagagatagtggtgaggacgccttgggtcaccccagagtactacaaggaccctgagaagacggagaaggcttggaggggaggctggttccacaccggagacatagccgtctggaccccggagggctacatacagatcgtggacagggacaaggacattataaagagcgggggagagtggataagcagcttgaggctcgagagcctcataagccagcatccgggtgtggcgcaggtggcggtgataggtgctaggcatccgaagtggggcgagaggcccgtcgccatcatagtcccgaagcccggatggcaggacaagctgactacagaggaggttagggagtggctcgccaagaacttcgtagagaagggcgaaataccgaagtggtggcttccagacaagattgtgcttgtggacgaccttccgaagaccagcgtgggtaagataaacaagaggagcctgagggagaagttcgcaaacatactagagcaggagccgcagcagtaa

SEQ ID NO: 28067 - protein, 555 aa, Aeropyrum pernix K1
MALPEKTPWRPGYSLTIHKIYQYALYMWSDLEIVSRTTKGLERYTFSDAARRIESLANALRALGVSGLDRVATMDWNTHWHYETYFAAPMMGAVLHPLNVRLAPNEIAYIMNHAEDKVLIVHSDFLKLAEAILPHAPSVEHVVIVDAESHPDRIAGRRLHNYEDLIKEHGGRFEWPELDENRPAAMGYTSGTTGLPKGVYHSHRMIVVHALSGALALATRGRRRVTGDDTLLHIVPMFHVLAWGLPYMATLTGMKQVFPGRLDPKVLLDLIVGEKVTVTAGVPTILYMLLSHPESGKYDLSGLLFVNGGQALPKGLADAARKRGIEVIVGYGMTETAPILTLANVPQKYMDRSEELSLTTGWPVPLVELMVADPETLEPVPKDGKTMGEIVVRTPWVTPEYYKDPEKTEKAWRGGWFHTGDIAVWTPEGYIQIVDRDKDIIKSGGEWISSLRLESLISQHPGVAQVAVIGARHPKWGERPVAIIVPKPGWQDKLTTEEVREWLAKNFVEKGEIPKWWLPDKIVLVDDLPKTSVGKINKRSLREKFANILEQEPQQ

SEQ ID NO: 28068 - DNA, 1698 bp, Arabidopsis thaliana
  CDS (1)..(1698)
atggcggttaagcacggcgtcgacggcgacggcagcgaaatcgaatcgagaactctggcggtagatcgaaaaagcggtttctgcgaatcaacatcgatattctacagcaaacgtgagccaatggctctcccgccaaaccaatttctcgacgtcacgtctttcattgcatcacagcctcatcgcggcaaaaccgtattcgtcgacgccgtaaccggtcgtcgactaagcttccctgagctctggctcggtgtcgaaagagtcgcgggttgtctttacgcattaggtgtacgcaaaggaaatgtcgtcattatactctctccaaactcaatcctcttcccgatcgtctccctctccgtaatgtcactcggcgcaatcataaccaccgctaatccgatcaacacgtccgacgaaatctccaaacagataggcgattcgcgtcctgttctcgccttcaccacatgcaaactcgtctccaaactcgccgccgcgtcgaattttaatctcccggtggttctcatggacgactaccacgttccttcgcaaagttacggtgaccgcgtgaaactagtcgggaggttagagacgatgattgaaacagaaccgagtgagtcacgagttaagcaacgagtcaaccaggacgacacggcggctctgttatactcatcaggtacgacggggacgagtaaaggagtaatgctgagtcaccgtaacctaatcgcattggtacaagcataccgggcccggttcggtttagagcagcgaaccatttgcacaatcccaatgtgtcacatcttcggattcggtggtttcgcgacggggctaatcgcgttaggatggacaatcgttgttcttcctaaattcgacatggctaagcttctctcggcggtggagactcatcgttcttcgtacctttctcttgtaccgccgattgtagtagctatggttaacggagcaaatgagattaattccaagtatgatctgagctcgttgcacactgtggtggctggaggagctccgttgagtagagaggtgacggagaagttcgttgagaattatcccaaggttaagatcctacaagggtatggtttgactgagtcaacggctatagctgcttctatgtttaataaagaggagactaagaggtatggagcttctggcttactggctccgaatgtggaaggtaagattgtggatccggatacgggtcgggttttgggtgtgaatcaaacgggtgagctgtggattcgaagtcctactgtgatgaaaggttatttcaagaataaagaagctactgcttctaccattgattcagaaggatggttgaaaactggagatttgtgttacattgacggtgatgggtttgtctttgttgttgatagattaaaggagctcatcaaatgcaatggttatcaggttgctccagctgaactagaggcattgttgcttgctcatccagagattgctgatgcagcagtaatacccatccctgacatgaaagctgggcaatatccaatggcatatatcgtaagaaaagttggaagtaacttatccgagagcgaaatcatgggatttgtcgcaaaacaggtatcaccgtacaagaagattcgcaaagtcacatttttggcttcaatccccaaaaatccttcgggcaagattttaagaagagaacttacaaagctcacaacttcaaaactctag

SEQ ID NO: 28069 - protein, 565 aa, Arabidopsis thaliana
MAVKHGVDGDGSEIESRTLAVDRKSGFCESTSIFYSKREPMALPPNQFLDVTSFIASQPHRGKTVFVDAVTGRRLSFPELWLGVERVAGCLYALGVRKGNVVIILSPNSILFPIVSLSVMSLGAIITTANPINTSDEISKQIGDSRPVLAFTTCKLVSKLAAASNFNLPVVLMDDYHVPSQSYGDRVKLVGRLETMIETEPSESRVKQRVNQDDTAALLYSSGTTGTSKGVMLSHRNLIALVQAYRARFGLEQRTICTIPMCHIFGFGGFATGLIALGWTIVVLPKFDMAKLLSAVETHRSSYLSLVPPIVVAMVNGANEINSKYDLSSLHTVVAGGAPLSREVTEKFVENYPKVKILQGYGLTESTAIAASMFNKEETKRYGASGLLAPNVEGKIVDPDTGRVLGVNQTGELWIRSPTVMKGYFKNKEATASTIDSEGWLKTGDLCYIDGDGFVFVVDRLKELIKCNGYQVAPAELEALLLAHPEIADAAVIPIPDMKAGQYPMAYIVRKVGSNLSESEIMGFVAKQVSPYKKIRKVTFLASIPKNPSGKILRRELTKLTTSKL

SEQ ID NO: 28070 - DNA, 1644 bp, Arabidopsis thaliana
  CDS (1)..(1644)
atggaactcttacttccacacccatcaaactcaactccactcaccgtcctcggcttcttagaccgagccgcttccgtctatggtgactgtccgtccatcctccacactgcaaacaccgttcatacttggtccgaaacacataaccgctgtctccgtatcgcatcggctctaacttcctcctctatcggaattaaacaaggccaagtcgtctctgtcgtgggtcccaacgtcccgtccgtctatgagcttcagtttgctgtcccaatgtccggagccatcttaaacaacatcaaccctcgcttagacgcacacgcactctctgtcctcctgcgtcacagcgaatccagactcgttttcgtcgaccaccgttctatatccttagtccttgaagcagtttcattattcacacaacacgagaaacctcacctcgtcctcctggacgatgaccaagagaacgattcttcatccgcatcagattttcttgacacgtacgaagaaattatggagagaggaaattcaagattcaagtggatccgtcctcaaaccgaatggcaaccaatggttcttaactatacttccggaacgacgtcgtctcccaagggagtggtacttagccacagagcgattttcatgctcactgttagctccttgcttgattggtcagtaccaaaccggccagtttacttgtggactctaccgatgtttcacgccaatggttggggttacacttggggcaccgcagcggttggagccaccaacatctgcacgcgtagagtcgacgcaccgactatttacaacttgatcgataagcacaatgtgacccacatgtgtgctgcacctatggttctcaacatgctaattaactatccattaagtacgccgctcaagaacccggttatgacctctggagctcccccaccagcaaccattatctcccgagcggagtcacttggtttcaacgtcagccactcatacggtttaacagagactagcggtccggttgtgtcatgtgcttggaagcctaagtgggaccatcttgatccattggagagagctaggctgaagtcaaggcaaggagtaagaacactcggattcacggaagtcgatgtaagggatcgaaaaacaggaaagagtgtgaaacacgacggagtttcggttggagagattgttttcagaggcagctcagtcatgttgggatactacaaagaccctcaaggaactgcggcttgtatgagagaggacgggtggttctactctggagacatcggggttatacacaaagatggttacttggagatcaaagatcggtcaaaagatgtgatcatatgcggaggagaaaatataagcagcgcagagattgagacggttctgtatacaaatccggtggtgaaggaagctgcggtggtggctaaaccggataagatgtggggagagacaccatgtgcttttgtgagcttgaagtgtgataacaatggtgatggttcggttcccgtgaccgagagagagataagggagttttgtaagacgaagttacctaagtacatggttccgaggaaagtgatctttcaggaggaacttcccaagacttccacaggaaaaattcagaagtttttgctaagacaaatggctaagaccctgtcttga

SEQ ID NO: 28071 - protein, 547 aa, Arabidopsis thaliana
MELLLPHPSNSTPLTVLGFLDRAASVYGDCPSILHTANTVHTWSETHNRCLRIASALTSSSIGIKQGQVVSVVGPNVPSVYELQFAVPMSGAILNNINPRLDAHALSVLLRHSESRLVFVDHRSISLVLEAVSLFTQHEKPHLVLLDDDQENDSSSASDFLDTYEEIMERGNSRFKWIRPQTEWQPMVLNYTSGTTSSPKGVVLSHRAIFMLTVSSLLDWSVPNRPVYLWTLPMFHANGWGYTWGTAAVGATNICTRRVDAPTIYNLIDKHNVTHMCAAPMVLNMLINYPLSTPLKNPVMTSGAPPPATIISRAESLGFNVSHSYGLTETSGPVVSCAWKPKWDHLDPLERARLKSRQGVRTLGFTEVDVRDRKTGKSVKHDGVSVGEIVFRGSSVMLGYYKDPQGTAACMREDGWFYSGDIGVIHKDGYLEIKDRSKDVIICGGENISSAEIETVLYTNPVVKEAAVVAKPDKMWGETPCAFVSLKCDNNGDGSVPVTEREIREFCKTKLPKYMVPRKVIFQEELPKTSTGKIQKFLLRQMAKTLS

SEQ ID NO: 28072 - DNA, 1653 bp, Arabidopsis thaliana
  CDS (1)..(1653)
atggaactcttacttccacacccttcgaactcaacacctctcaccgtcctcggcttcttagaccgagccgcctctgtctacggcgactgtccgtccatcctccacaccactaacaccgtccacacttggtccgaaacccacaaccgctgtcttcgaatcgcctcggctctcacttcttcctctctcggcataaaccgaggccaagttgtctccgtcgtaggtcccaacgtcccgtccgtctacgagcttcagtttgctgtcccaatgtccggagccatcttaaacaacatcaaccctcgtttggacgcacatgcactctctgtcctcctgcgtcacagtgaatctaagctcgttttcgtcgatcccaattcaatctccgtagtcctcgaagcagtctcgttcatgaggcaaaacgagaaacctcaccttgtcctcctagacgacgaccaagaggacggttctttgtctccttcggccgcatcagattttcttgacacataccaaggagttatggagagaggagattcaagattcaagtggatccgtcctcaaaccgagtggcagcctatgattctcaactatacttctggaacaacgtcatctcccaaaggagtagtgttgagccacagagcaattttcatgctaaccgtaagctcattgcttgactggcattttccgaacaggccggtttacttgtggactctaccaatgttccacgccaatggttgggggtatacatggggcactgcggcggttggagccaccaacgtctgcacccgtagagtcgacgcgccgactatctatgacttgatcgataagcatcacgtaactcacatgtgtgccgcaccaatggttctcaacatgctaaccaactacccgtctcgtaaaccgctaaagaacccggttcaggttatgaccgccggagctccacctccagcagccatcatctcaagagcagaaaccctaggtttcaacgtcggtcatgggtacggtttaacggaaaccggaggcccggttgtgtcatgtgcttggaaggctgagtgggatcatcttgatccattggaaagagcaagactgaaatcaagacaaggagtaagaaccatcggattcgcggaagttgatgttagggacccgagaaccgggaagagtgtggaacacgacggtgtttccgttggagagatcgttttaaaaggcggttcggttatgcttggttactacaaagaccctgaaggaaccgcagcgtgtatgagagaggacggatggttctacagcggagacgtaggagttatacatgaagacggttacttggaagttaaagaccggtcaaaggatgtgatcatatgcggaggagagaacataagtagtgccgaggttgagacggttctgtatacaaatccagtagttaaagaagccgcggtggtggctaaaccggataagatgtggggagagacaccgtgtgcttttgtgagcttgaagtatgatagtaatggtaatgggttggtgactgagagggaaataagggagttttgtaagacgaggttacctaagtatatggttccaaggaaagtaatttttcaggaggagcttccaaagacttctactggaaagatacagaagtttcttctaagacaaatggctaagtctctgccttaa

SEQ ID NO: 28073 - protein, 550 aa, Arabidopsis thaliana
MELLLPHPSNSTPLTVLGFLDRAASVYGDCPSILHTTNTVHTWSETHNRCLRIASALTSSSLGINRGQVVSVVGPNVPSVYELQFAVPMSGAILNNINPRLDAHALSVLLRHSESKLVFVDPNSISVVLEAVSFMRQNEKPHLVLLDDDQEDGSLSPSAASDFLDTYQGVMERGDSRFKWIRPQTEWQPMILNYTSGTTSSPKGVVLSHRAIFMLTVSSLLDWHFPNRPVYLWTLPMFHANGWGYTWGTAAVGATNVCTRRVDAPTIYDLIDKHHVTHMCAAPMVLNMLTNYPSRKPLKNPVQVMTAGAPPPAAIISRAETLGFNVGHGYGLTETGGPVVSCAWKAEWDHLDPLERARLKSRQGVRTIGFAEVDVRDPRTGKSVEHDGVSVGEIVLKGGSVMLGYYKDPEGTAACMREDGWFYSGDVGVIHEDGYLEVKDRSKDVIICGGENISSAEVETVLYTNPVVKEAAVVAKPDKMWGETPCAFVSLKYDSNGNGLVTEREIREFCKTRLPKYMVPRKVIFQEELPKTSTGKIQKFLLRQMAKSLP

SEQ ID NO: 28074 - DNA, 1683 bp, Arabidopsis thaliana
  CDS (1)..(1683)
atggctaatcactctcggcctcacatctgccagtgtttgactcggctagcctccgtcaaacggaacgccgtcgtcacagtctacggaaaccggaagcgcaccggcagggagttcgttgacggcgtactgagccttgccgccggactgattcgtctcggcctccgaaacggtgatgtcgtctctattgctgcttttaacagtgatttgttcttggagtggttattagctgttgcattggttggaggagtagttgctcctttgaattacagatggagcttgaaagaagcaaaaatggcaatgctgctagtagaacctgtgcttttggttactgatgagacatgtgtctcgtggtgcattgatgttcaaaatggagatataccttccttgaaatggcgtgtgttgatggagtctacttcaacagattttgcaaatgaacttaaccagtttttgacaaccgagatgcttaaacagcgtacactggtgccttccttagcaacgtatgcttgggcttctgatgatgctgttgttatatgtttcacttctggtacaacgggaagacccaagggtgtgacgataagccacttggctttcataacacagtctctagctaagattgctattgctggctacggtgaggatgatgtgtatttgcacacgtctccattagttcatatcggcggtctgtcatcagctatggccatgctaatggttggagcttgccatgttctgctgcccaagtttgatgccaaaacagctcttcaagttatggaacaaaaccatataacttgcttcatcaccgtcccagctatgatggctgatcttattcgtgtcaacaggacaacgaaaaatggagctgaaaaccgcggtgtgagaaagatactaaacggaggtggatctttatcaagcgaactccttaaagaagctgtgaacatcttcccatgtgcgaggatactttcagcatatgggatgacagaggcgtgctcttcgctgaccttcatgactctccatgatccaacacaagagtcttttaaggtgacttatcctttgcttaaccaaccaaagcaaggcacatgtgttggcaagcctgcccctcatatcgaactgatggttaaactcgacgaagattcatcgagggtcgggaaaattctaacgcgcggaccacacactatgcttagatattggggtcatcaagtagctcaagaaaatgttgaaacatcagaatccagaagcaatgaagcttggcttgacacaggtgatatcggggcctttgatgagtttggtaacttatggcttataggccggtccaatggccgaatcaagactggaggcgagaatgtttaccccgaagaggtggaagctgttctagtagagcatccagggattgtttctgctgtggtgataggcgtcattgatactcgtcttggagagatggtcgttgcttgtgttcgtttacaggagaaatggatatggtctgatgttgaaaaccgtaaaggaagtttccaactgtcaagtgagacactcaaacatcattgcagaacacagaacctaaccgggtttaagataccgaagaggtttgtccgatgggagaagcagtttccgttgacaacaactgggaaagtgaaaagagatgaagttcgaagacaagttttgtctcatttccaaatcatgactagctctctctga

SEQ ID NO: 28075 - protein, 560 aa, Arabidopsis thaliana
MANHSRPHICQCLTRLASVKRNAVVTVYGNRKRTGREFVDGVLSLAAGLIRLGLRNGDVVSIAAFNSDLFLEWLLAVALVGGVVAPLNYRWSLKEAKMAMLLVEPVLLVTDETCVSWCIDVQNGDIPSLKWRVLMESTSTDFANELNQFLTTEMLKQRTLVPSLATYAWASDDAVVICFTSGTTGRPKGVTISHLAFITQSLAKIAIAGYGEDDVYLHTSPLVHIGGLSSAMAMLMVGACHVLLPKFDAKTALQVMEQNHITCFITVPAMMADLIRVNRTTKNGAENRGVRKILNGGGSLSSELLKEAVNIFPCARILSAYGMTEACSSLTFMTLHDPTQESFKVTYPLLNQPKQGTCVGKPAPHIELMVKLDEDSSRVGKILTRGPHTMLRYWGHQVAQENVETSESRSNEAWLDTGDIGAFDEFGNLWLIGRSNGRIKTGGENVYPEEVEAVLVEHPGIVSAVVIGVIDTRLGEMVVACVRLQEKWIWSDVENRKGSFQLSSETLKHHCRTQNLTGFKIPKRFVRWEKQFPLTTTGKVKRDEVRRQVLSHFQIMTSSL

SEQ ID NO: 28076 - DNA, 1743 bp, Arabidopsis thaliana
  CDS (1)..(1743)
atggatgatttggcattatgtgaagcaaacaatgttcctctaacccccatgacgttcttgaagagagcttcagagtgttatccaaatcgaacttcaataatctacggaaaaactcgtttcacttggcctcagacctatgaccgttgttgtcgtctagccgcttctctaatctctcttaacatctccaagaacgatgtggtatcagttatggctccaaacacacccgccttgtatgaaatgcactttgccgttcccatggctggagctgtacttaaccctatcaacactcgtctagacgcaacatccattgccgcaatcctccgccacgccaagcccaagatcttattcctagaccgcagttttgaggccttggctagagaaagcctccatttattatcatctgaagactcaaacctaaacttgccggtcatatttatccacgagaacgattttcctaaaagggcttcattcgaggagttagactacgagtgtctcatccagaggggagagcctacgccctcgatggtggcacgcatgttccgtattcaagacgagcatgatccaatctccttaaactacacatcgggtaccactgccgacccaaaaggtgttgtgattagccaccgaggagcatatttgtgcacattaagcgcgattattggttgggaaatggggacctgccctgtctacctttggactctgcctatgtttcattgcaatggatggacgtttacatggggaaccgcggcgcgtgggggtaccagtgtgtgtatgaggcacgtgactgccccggagatctataaaaacatagaaatgcataacgtgacacatatgtgttgtgttcctacggttttcaacattcttctgaaaggaaattcacttgacctgtcacctagatctggaccggtccatgtgcttaccggaggttcaccgcctcccgctgctcttgtcaagaaagttcaacggttggggtttcaagtgatgcatgcctatgggcagaccgaggccactggtccaattttgttttgtgagtggcaagatgagtggaatagattaccagagaatcaacagatggaattaaaagccaggcaagggataagcatcttaggcctagctgacgttgacgtgaaaaacaaggaaacgcaaaagagtgctccgcgcgatggaaagacaatgggagaaatcctcattaaaggaagtagcataatgaaagggtatctaaaaaatcccaaagctacatttgaggcatttaaacacggatggctcaacacaggagatgtaggtgtgattcaccctgatgggcacgtcgagatcaaagatcggtcaaaagacataatcatatcgggaggcgaaaacattagtagtgttgaggtcgagaatgttctttataagtacccaaaagtccttgagactgcagttgtggccatgcctcaccctacgtggggtgaaaccccgtgtgcgtttgttgttctagaaaagagtgagactactattaaagaagatcgtgttgataaatttcagaccagagagagaaatctgattgagtattgccgtgaaaatctgccacattttatgtgtccgagaaaagtggtgtttttggaagaactgcccaaaaacgggaatggaaagatccttaagcctaagctaagagacattgctaaaggtttggttgttgaggatgagatcaatgttatagctaaagaagttaaacggccggttggacattttatttcgcggctttga

SEQ ID NO: 28077 - protein, 580 aa, Arabidopsis thaliana
MDDLALCEANNVPLTPMTFLKRASECYPNRTSIIYGKTRFTWPQTYDRCCRLAASLISLNISKNDVVSVMAPNTPALYEMHFAVPMAGAVLNPINTRLDATSIAAILRHAKPKILFLDRSFEALARESLHLLSSEDSNLNLPVIFIHENDFPKRASFEELDYECLIQRGEPTPSMVARMFRIQDEHDPISLNYTSGTTADPKGVVISHRGAYLCTLSAIIGWEMGTCPVYLWTLPMFHCNGWTFTWGTAARGGTSVCMRHVTAPEIYKNIEMHNVTHMCCVPTVFNILLKGNSLDLSPRSGPVHVLTGGSPPPAALVKKVQRLGFQVMHAYGQTEATGPILFCEWQDEWNRLPENQQMELKARQGISILGLADVDVKNKETQKSAPRDGKTMGEILIKGSSIMKGYLKNPKATFEAFKHGWLNTGDVGVIHPDGHVEIKDRSKDIIISGGENISSVEVENVLYKYPKVLETAVVAMPHPTWGETPCAFVVLEKSETTIKEDRVDKFQTRERNLIEYCRENLPHFMCPRKVVFLEELPKNGNGKILKPKLRDIAKGLVVEDEINVIAKEVKRPVGHFISRL

SEQ ID NO: 28078 - DNA, 1737 bp, Arabidopsis thaliana
  CDS (1)..(1737)
atggataatttggcgttatgtgaagcaaacaatgttcctctaactcccataacgttcttgaagagagcttcggagtgttatccgaatcgaacttcgataatatacggaaaaactcgtttcacttggcctcagacctatgaccgttgctgtcgtctagccgcttctctcatatctcttaatatcggcaagaacgatgtggtatccgttgttgctccaaacacaccggccatgtatgagatgcactttgccgttcccatggctggagctgtacttaaccctatcaacactcgtctagacgcaacatccattgccgcaatcctccgccacgccaagcccaagattttattcatataccgcagttttgagccattggctcgagaaatcctccagttattatcatctgaagactcaaacctaaacttgccggtcatatttatccacgagattgatttccctaaaagggtttcgtccgaggagtcagactacgagtgtctcatccagaggggagagcctacgcccttgttgttggcacgcatgttctgtattcaagacgagcatgatccaatctctttaaactacacatcgggtaccacagccgacccaaaaggtgttgtgattagccaccgaggagcatatttaagcacattaagcgcgattattggttgggaaatggggacatgccctgtctacctttggactctgcctatgtttcattgcaatggatggacgtttacatggggaactgcggcccgtgggggtactagtgtgtgtatgaggcatgtgactgccccggagatctataaaaacatagaaatgcataacgtgacgcatatgtgttgtgttcctacggtttttaacattcttctgaaaggaaattcacttgacctgtcacataggtctgggccggtccatgttcttaccggaggttcaccgcctcccgctgctcttgtcaagaaagttcagcggttggggtttcaagtgatgcatgcctatggtttgaccgaggccactggtccggttctgttttgtgagtggcaagatgagtggaacagattacctgagaatcaacagatggagttaaaagcaaggcaagggctaagcatcttaggcctaactgaagttgacgtgagaaacaaggaaactcaagagagtgttccgcgagatgggaagacgatgggagaaatcgttatgaaaggaagcagcataatgaaaggctatctgaagaatcccaaagctacatatgaagcatttaaacacggatggctcaactcaggagacgtaggtgtgattcatcctgatggacacgtagagatcaaagatcggtccaaagacataatcatatctggaggcgaaaacattagtagtgttgaagtcgagaatattatttataagtacccaaaagtgcttgagactgccgtcgtggccatgcctcaccctacatggggagaaaccccatgtgcatttgttgttctagaaaagggtgagactaataatgaagatcgtgaagataaacttgtgaccaaagagagagatttgattgagtattgccgtgaaaatcttccacattttatgtgtccgagaaaagtggtgtttttggatgaattgcccaaaaacgggaatggaaagatccttaagcctaagctaagagacattgctaaaggtttggttgctgaggatgaggtcaatgttagatctaaagttcaacggccggttgaacactttacttcgcggctttga

SEQ ID NO: 28079 - protein, 578 aa, Arabidopsis thaliana
MDNLALCEANNVPLTPITFLKRASECYPNRTSIIYGKTRFTWPQTYDRCCRLAASLISLNIGKNDVVSVVAPNTPAMYEMHFAVPMAGAVLNPINTRLDATSIAAILRHAKPKILFIYRSFEPLAREILQLLSSEDSNLNLPVIFIHEIDFPKRVSSEESDYECLIQRGEPTPLLLARMFCIQDEHDPISLNYTSGTTADPKGVVISHRGAYLSTLSAIIGWEMGTCPVYLWTLPMFHCNGWTFTWGTAARGGTSVCMRHVTAPEIYKNIEMHNVTHMCCVPTVFNILLKGNSLDLSHRSGPVHVLTGGSPPPAALVKKVQRLGFQVMHAYGLTEATGPVLFCEWQDEWNRLPENQQMELKARQGLSILGLTEVDVRNKETQESVPRDGKTMGEIVMKGSSIMKGYLKNPKATYEAFKHGWLNSGDVGVIHPDGHVEIKDRSKDIIISGGENISSVEVENIIYKYPKVLETAVVAMPHPTWGETPCAFVVLEKGETNNEDREDKLVTKERDLIEYCRENLPHFMCPRKVVFLDELPKNGNGKILKPKLRDIAKGLVAEDEVNVRSKVQRPVEHFTSRL

SEQ ID NO: 28080 - DNA, 1719 bp, Arabidopsis thaliana
  CDS (1)..(1719)
atggataatctagtgttatgtgaagcaaacaatgttcctctaacgcccataacgttcttgaagagagcttcggagtgttatcccaaccgaacttcgataatctacgggcaaactcgcttcacttggcctcagacttatgaccgttgctgtcgtctagctgcttctctcctctctcttaacatcacccgaaacgacgttgtctcgattttggccccaaacgtacctgccatgtacgagatgcactttagcgttcccatgaccggagccgtacttaaccccattaacacccgtcttgacgccaaaaccatagccatcattctccgccacgccgagccaaagatcttatttgtggactacgagtttgctcctttgatccaagaagtcctccgtctcatacccacttaccagtcacaaccgcatccgcggatcatattaattaacgagattgattccactacaaagcctttctccaaggagttagactacgagggtctcatccgaaaaggagaacctacgccatcctcctccgcaagcatgttccgtgtccacaacgagcatgaccctatctccttgaactacacgtcaggtaccacggcagacccaaaaggtgtggtgattagccaccaaggagcctacttgagcgctttgagctccattattggctgggaaatggggattttccctgtctacctctggacactacctatgtttcattgcaatggatggacgcacacgtggtccgtcgctgctcgtggtggtactaatgtatgcatcagacatgtcactgctccagagatctataagaacatagaattgcatggcgtgactcacatgtcatgtgttcctacggtctttaggtttctccttgaaggaagtcgaaccgaccagtcacccaagtcctcgccggttcaggtgttgactggaggttcttctcctccggctgtccttataaagaaagttgagcagctggggtttcacgtgatgcatggctatgggcttacagaggccaccggcccggttctcttttgtgaatggcaagacgagtggaacaaactaccagagcatcaacagatagagctacaacaaaggcaaggtgtaaggaacctaaccctagccgacgttgacgtgaagaacacgaaaactctagagagtgtcccacgcgacgggaagacaatgggagaaattgttattaaaggaagcagcctaatgaaagggtatctaaagaatcctaaagcaacatctgaagcatttaaacacggatggcttaacacgggagacataggtgtgattcatcctgatggatatgtagagatcaaagatcgatccaaagacatcataatctcgggaggtgagaacataagtagtattgaggtcgagaaagttctttacatgtatcaggaagtgctcgaggctgcggttgtagccatgcctcatcctctatggggtgaaaccccgtgtgcgtttgttgttctaaagaagggtgaagagggattggtgactagtgaaggagatctcattaaatattgccgtgagaatatgccgcattttatgtgtccgaaaaaggtggtgttctttcaagagcttccaaagaatagtaacggaaagatcctaaagtctaagttgagagacatcgctaaggcattggtggtcagggaggacgatgccggctccaagaaagttcatcaacgcagtatcgaacacgttagttcgaggctttag

SEQ ID NO: 28081 - protein, 572 aa, Arabidopsis thaliana
MDNLVLCEANNVPLTPITFLKRASECYPNRTSIIYGQTRFTWPQTYDRCCRLAASLLSLNITRNDVVSILAPNVPAMYEMHFSVPMTGAVLNPINTRLDAKTIAIILRHAEPKILFVDYEFAPLIQEVLRLIPTYQSQPHPRIILINEIDSTTKPFSKELDYEGLIRKGEPTPSSSASMFRVHNEHDPISLNYTSGTTADPKGVVISHQGAYLSALSSIIGWEMGIFPVYLWTLPMFHCNGWTHTWSVAARGGTNVCIRHVTAPEIYKNIELHGVTHMSCVPTVFRFLLEGSRTDQSPKSSPVQVLTGGSSPPAVLIKKVEQLGFHVMHGYGLTEATGPVLFCEWQDEWNKLPEHQQIELQQRQGVRNLTLADVDVKNTKTLESVPRDGKTMGEIVIKGSSLMKGYLKNPKATSEAFKHGWLNTGDIGVIHPDGYVEIKDRSKDIIISGGENISSIEVEKVLYMYQEVLEAAVVAMPHPLWGETPCAFVVLKKGEEGLVTSEGDLIKYCRENMPHFMCPKKVVFFQELPKNSNGKILKSKLRDIAKALVVREDDAGSKKVHQRSIEHVSSRL

SEQ ID NO: 28082 - DNA, 1635 bp, Arabidopsis thaliana
  CDS (1)..(1635)
atggaagatttgaagccaagtgccgctaactcgttaccattgacactgttaggctttcttgagagagcagccaccgtgtatggagactgtacctccatcgtttacggcaattccaccgtgtacacatggcgagaaacgaatcaccgttgcctctgcgtcgcgtctgctctgtcttccattggaataggaagatccgacgttgtctctgtcctatctgctaatactccggaaatgtacgagctccagttttccgttccgatgtctggcgcgatccttaacaacatcaatacccgcctcgacgcgcgaaccgtctctgttcttctccgccattgcgagtctaagctgctcttcgtcgacttcttttactccgatctcgctgtcgaagcgatcacgatgttgctcaatccgccgattctcgtcctaatcgccaatgaggaggaggaagaaggaggagctgaagtaacggagcgttcaaaattctgttacttgtacagtgatctaatcactagagggaatccggattttaaatggatccgacccggaagtgaatgggacccgattgtggtcaattacacatcaggtacgacgtcgtctcctaaaggagtggttcattgccacaggggtatattcgtcatgacgcttgattccctaaccgattgggccgtaccgaaaaccccggtttacttatggaccttaccgatatttcacgccaacggttggacctatccatggggaatcgccgccgtcggaggaactaacgtctgtgtgcgtaaactccacgcgccgtcaatataccatctaatccgtgatcacggcgtgactcacatgtacggcgcaccaatagtgcttcagattctatcggcgagtcaagaatctgatcagcctcttaagagtccggtcaatttcttaaccgccggttcttctccgccagctacggtgcttctccgcgccgagtctctaggtttcatcgtcagtcacggttacggattaacggagacagccggtgtgatcgtctcctgcgcgtggaagccaaactggaatcggttaccggcgagtgatcaagcgcaattgaaatcacggcaaggagtgagaaccgtcggatttagcgaaatcgatgtagtggatccagaatcaggtcggagcgtggagagagacggagaaacagtcggagaaatagtgttgagagggagttcaatcatgctcggatacttaaaaaatccgatcggaactcaaaattcgtttaaaaacgggtggttcttcaccggagacctcggtgtgattcacggggatggttacttagagattaaagatagatcgaaagatgtgattatttcaggaggagagaatgtgagtagtgtggaagtggaggcggtgttgtacacgaatccggcggtgaatgaagcggcggtggtggctagacctgacgagttttggggagagacgccgtgtgcttttgttagtttaaaacccgggttgacccggaaaccaacggataaggagattatagagtattgcaaatataaaatgccacgttacatggctcctaaaacggtctcgtttcttgaagagttaccaaagacttccactgggaagattataaagtcattgcttaaagagattgccaaaaacatgtaa

SEQ ID NO: 28083 - protein, 544 aa, Arabidopsis thaliana
MEDLKPSAANSLPLTLLGFLERAATVYGDCTSIVYGNSTVYTWRETNHRCLCVASALSSIGIGRSDVVSVLSANTPEMYELQFSVPMSGAILNNINTRLDARTVSVLLRHCESKLLFVDFFYSDLAVEAITMLLNPPILVLIANEEEEEGGAEVTERSKFCYLYSDLITRGNPDFKWIRPGSEWDPIVVNYTSGTTSSPKGVVHCHRGIFVMTLDSLTDWAVPKTPVYLWTLPIFHANGWTYPWGIAAVGGTNVCVRKLHAPSIYHLIRDHGVTHMYGAPIVLQILSASQESDQPLKSPVNFLTAGSSPPATVLLRAESLGFIVSHGYGLTETAGVIVSCAWKPNWNRLPASDQAQLKSRQGVRTVGFSEIDVVDPESGRSVERDGETVGEIVLRGSSIMLGYLKNPIGTQNSFKNGWFFTGDLGVIHGDGYLEIKDRSKDVIISGGENVSSVEVEAVLYTNPAVNEAAVVARPDEFWGETPCAFVSLKPGLTRKPTDKEIIEYCKYKMPRYMAPKTVSFLEELPKTSTGKIIKSLLKEIAKNM

SEQ ID NO: 28084 - DNA, 1641 bp, Arabidopsis thaliana
  CDS (1)..(1641)
atggaaggaacaatgaggtgctcagcgaattacgtcccgctttctccgatcagctttctcgagagagctgctgtcgtcttcggctccagaacctctgtcgtgtatggtgatattcagtacacgtggcaccaaacacgtgaccgttgcgtccgccttgcatctgctctctctgaccttggtctctctcgccatgacgttgtggctgctttagcgccaaatgttcctgcgttatgcgagctttattttggagctccgatggctggagcagtactttgcgtgttgaacacgacattcgattctcagatgcttgcgatggcgctggagaaaacgaagccaaaagtattcttcgttgactctgagttcctctctgtcgctgaagaatctctcagtctcctctcaaacattgaagaaaaacctctcatcatcacaatcacagaaaatccaacagagcaatcaaaatatgaacaatacgaggattttctctccactggaaaccctaatttcaaaccaatacgaccagttgacgaatgtgatccaatcgccctcaacttcacatctggaaccacatcgactcccaaatgtgtcgtctatagtcatcgcggtgcctatctgaacgcaactgctgttggtgttatgaatgagatgaaaccaatgccggtttatctatgtacagttcctatgtatcattgtagcgggtggtgctatatttggacagttacggcttttggaggagtcatcgtctgtctcagggaagtcaacgacgaagttatatttgatagtatcgtgaagcacaaggtaactaactttggtggctcgcctccggttctcaacatgattgctaatgcaagagactcggtcaagaagtcgtttccatggaccgtacaggttatgagcggaggatcctctcctcctgaggtcatgttgaaactcaagaagctaggattcaaagtgatgatggcttatggatgctcggaggtgtatggactaggaacagcttgtttgtggatgcccgagtgggagactctacctgaagaggagagtttaaggctcaaggcaagagatggtctcaaccatttcgccaaggaagctgtcgatgtattggacccaaccaccatgaaatcggttccacacgacggaaagactatcagggtaattgctctccggggaaatacagtcatgagcggttacttcaaggacaaggaagccactgaagcggcttttcgaggtggatggtactggagtcgcgacatgggtgttatagatcctgatggctacatacaatttaaagataggtcacaagatgttataacatgcggaggagaaatcgtgggatcaaaggagatcgaagggattctctatagtcacccggcggtttatgacgcaggggtcgtgggtcgaccggacgaaactttaggagaatcgatgtgtgctttcgtgaagctcaaagaaggagctgaagcgagagaggaagagatcattgagttctgcaagagaaagcttgggaataagaacatgaagatgattccaaagacagtagtcttctcggatgttcctaagactcccactgggaagattcgaaagaatgttctgagaaagatggccaaggatatgggttatgttcaattgagagctgtggagtaa

SEQ ID NO: 28085 - protein, 546 aa, Arabidopsis thaliana
MEGTMRCSANYVPLSPISFLERAAVVFGSRTSVVYGDIQYTWHQTRDRCVRLASALSDLGLSRHDVVAALAPNVPALCELYFGAPMAGAVLCVLNTTFDSQMLAMALEKTKPKVFFVDSEFLSVAEESLSLLSNIEEKPLIITITENPTEQSKYEQYEDFLSTGNPNFKPIRPVDECDPIALNFTSGTTSTPKCVVYSHRGAYLNATAVGVMNEMKPMPVYLCTVPMYHCSGWCYIWTVTAFGGVIVCLREVNDEVIFDSIVKHKVTNFGGSPPVLNMIANARDSVKKSFPWTVQVMSGGSSPPEVMLKLKKLGFKVMMAYGCSEVYGLGTACLWMPEWETLPEEESLRLKARDGLNHFAKEAVDVLDPTTMKSVPHDGKTIRVIALRGNTVMSGYFKDKEATEAAFRGGWYWSRDMGVIDPDGYIQFKDRSQDVITCGGEIVGSKEIEGILYSHPAVYDAGVVGRPDETLGESMCAFVKLKEGAEAREEEIIEFCKRKLGNKNMKMIPKTVVFSDVPKTPTGKIRKNVLRKMAKDMGYVQLRAVE

SEQ ID NO: 28086 - DNA, 1638 bp, Arabidopsis thaliana
  CDS (1)..(1638)
atggaacttttactcccacacgcttcaaactcatgtcctctcactgttcttggcttcttagaacgagccgcctctgtcttcggcgactctccttcactcctccacacaaccactgttcatacttggtctgaaactcattctcgatgtctccgtatagcttcaactctctcttccgcttccctcggaatcaaccgcggccaagttgtctctgttattggtccaaacgtcccatctgtctacgagcttcagttcgcagttccgatgtcaggcgcagtcctcaacaacatcaacccacgtttagacgctcatgcactctccgtccttctacgtcacagcgaatccaagctcgtgtttgttgaccatcactcaagctctttagtcctcgaagctgtctcgtttttgcccaaggatgagagacctcgtctcgtcatactcaacgacggaaacgacatgccatcatcttcatcagctgatatggattttcttgacacgtacgaagggtttatggagagaggagacctgaggttcaagtgggtacgtcctaaaagcgagtggactccaatggtgcttaactacacctcaggaactacgtcgtccccaaagggagtggtgcatagccacagatcggttttcatgagcactattaactctttgctagactggtctttgcctaaccgtccggtatacctgtggacactgccgatgttccatgccaatggttggagctacacatgggccacagcagctgtgggagccagaaacatctgtgtcacaagagttgatgtgccgactattttcaacttgatcgacaagtatcaagtgacccacatgtgcgctgcgccaatggttctcaacatgttgactaatcacccagcccagaaaccgcttcagagcccagttaaggttatgactgctggagctccaccaccagctacagtcatctccaaggctgaggcgcttggtttcgacgtgagtcacggttacgggatgacagaaacaggcggtctggttgtctcgtgcgcattgaagcctgagtgggatcgtctagaaccagacgagagagcaaaacagaaatcaaggcaaggaattagaactgcagtattcgcggaagtcgatgttagagacccaatatccgggaagagcgtgaagcatgatggagcaactgtgggagagatcgtcttcagaggcggttcggtcatgctaggttattacaaagacccagaaggcaccgcagcaagtatgagagaagacggatggttctacaccggagacattggagtaatgcacccagacggttacttggaagtcaaagacagatcaaaggatgtggtcatttgcggaggagagaacatcagcagcacggaactcgaggcagttctgtacacaaaccccgcaattaaggaagcagctgtggtggctaagccagacaagatgtggggagaaactccatgtgcatttgtcagcctgaagtatcatgacgggtctgtgactgagagagagatacgggagttttgtaaaaccaagctgccaaagtatatggttccaaggaatgtggttttcctggaagagcttccaaagacttctactggaaagattcaaaagtttcttctcagacaaatggctaagtccttgccttga

SEQ ID NO: 28087 - protein, 545 aa, Arabidopsis thaliana
MELLLPHASNSCPLTVLGFLERAASVFGDSPSLLHTTTVHTWSETHSRCLRIASTLSSASLGINRGQVVSVIGPNVPSVYELQFAVPMSGAVLNNINPRLDAHALSVLLRHSESKLVFVDHHSSSLVLEAVSFLPKDERPRLVILNDGNDMPSSSSADMDFLDTYEGFMERGDLRFKWVRPKSEWTPMVLNYTSGTTSSPKGVVHSHRSVFMSTINSLLDWSLPNRPVYLWTLPMFHANGWSYTWATAAVGARNICVTRVDVPTIFNLIDKYQVTHMCAAPMVLNMLTNHPAQKPLQSPVKVMTAGAPPPATVISKAEALGFDVSHGYGMTETGGLVVSCALKPEWDRLEPDERAKQKSRQGIRTAVFAEVDVRDPISGKSVKHDGATVGEIVFRGGSVMLGYYKDPEGTAASMREDGWFYTGDIGVMHPDGYLEVKDRSKDVVICGGENISSTELEAVLYTNPAIKEAAVVAKPDKMWGETPCAFVSLKYHDGSVTEREIREFCKTKLPKYMVPRNVVFLEELPKTSTGKIQKFLLRQMAKSLP

SEQ ID NO: 28088 - DNA, 1812 bp, Arabidopsis thaliana
  CDS (1)..(1812)
atgagattcttgttaaccaaaagagcattcagaatcttcaacccacgtttccagagactgtggttaacttcttctcccttctcctcaacctcaaattccggcggatttcccgacgattccgagccggaatcatggagaactatagagggtcttctccgttcccctgcaaatttctctcctttatctccaatcacgttcttggagcgatccgctaaggtttacagagacagaacctctcttgtgtttggttccgttaaacacacttggttccaaacttatcaacgttgtctccgtcttgcctctgctcttaccaatctcggaatctctcgtggcgatgtggttgcagctttagctccgaatgttccagctatgcatgagcttcatttcgctgttcctatggctggtttgattctttgtccgcttaatactcgacttgatccttccacattgtcggttttgttagcacactccgaggccaaaatcctctttgttgatcatcagttacttgagattgctcatggagctcttgatcttcttgctaaatcagataaaactagaaaaagtctgaagcttgtgttgatctctcagtctaatgatgatgatgatagtgatgaagatagctcatctacctttgcttcaaagtactcttttgattacgaatatgaaactctgcttaaatccggagatagcgagtttgagataatcaaaccgagatgcgaatgggatcctattagtataaactacacttcagggacgacttcgagacctaagggtgtagtgtatagccatagaggagcttatctcaattctcttgctacagtctttcttcaccagatgtctgtttatccggtgtatttatggacagtgccgatgtttcactgtaacggatggtgtcttgtttggggagtagcagctcaaggtggtactaatatctgtctcaggaaagtctctcctaagatgatctttaagaacattgctatgcataaagtgactcacatgggaggagccccaactgtgttgaatatgattgtgaactatactgtgactgaacataaaccgcttcctcacagggttgagatcatgacaggtgggtcaccgcctctaccgcagatcctggctaagatggaagaattaggtttcaatgtgtctcatctttatggtttgacagagacatacggtccagggacacattgcgtgtggaaacctgaatgggattcactttcgttggaggagagaactaagttgaaggctagacaaggagtgcagcatttgggtctagaagggctcgatgtgaaagatccgctgacaatggagactgtccctgatgatggtttaaccatgggtgaggttatgttcagaggaaacactgtgatgagtggatatttcaaggacatagaggcaacacgaaaagctttcgagggagattggttccacagtggtgatctcgctgttaagtatccagacgggtacatagagataaaagaccggttaaaagatgtgatcatctcaggaggagaaaacataagctcagtggaggttgagagagttttgtgcagccatcaagcggttcttgaagctgctgttgtagcacgtccagatcatcactggggacagactccttgcggttttgtaaagctgaaagaaggatttgataccatcaaacccgaggagattatcgggttctgtcgagatcatttgccgcattacatggctccaaagactatagttttcggggacatacctaaaacctcgacggggaaagtacaaaagtatcttctgaggaagaaagctgatgaaatgggtagcttgtaa

SEQ ID NO: 28089 - protein, 603 aa, Arabidopsis thaliana
MRFLLTKRAFRIFNPRFQRLWLTSSPFSSTSNSGGFPDDSEPESWRTIEGLLRSPANFSPLSPITFLERSAKVYRDRTSLVFGSVKHTWFQTYQRCLRLASALTNLGISRGDVVAALAPNVPAMHELHFAVPMAGLILCPLNTRLDPSTLSVLLAHSEAKILFVDHQLLEIAHGALDLLAKSDKTRKSLKLVLISQSNDDDDSDEDSSSTFASKYSFDYEYETLLKSGDSEFEIIKPRCEWDPISINYTSGTTSRPKGVVYSHRGAYLNSLATVFLHQMSVYPVYLWTVPMFHCNGWCLVWGVAAQGGTNICLRKVSPKMIFKNIAMHKVTHMGGAPTVLNMIVNYTVTEHKPLPHRVEIMTGGSPPLPQILAKMEELGFNVSHLYGLTETYGPGTHCVWKPEWDSLSLEERTKLKARQGVQHLGLEGLDVKDPLTMETVPDDGLTMGEVMFRGNTVMSGYFKDIEATRKAFEGDWFHSGDLAVKYPDGYIEIKDRLKDVIISGGENISSVEVERVLCSHQAVLEAAVVARPDHHWGQTPCGFVKLKEGFDTIKPEEIIGFCRDHLPHYMAPKTIVFGDIPKTSTGKVQKYLLRKKADEMGSL

SEQ ID NO: 28090 - DNA, 1710 bp, Arabidopsis thaliana
  CDS (1)..(1710)
atggcggcaacgaagtggcgtgacatcgatgatcttcccaagattccggccaactacacggcgttgactccgctttggttccttgatagggctgccgtggttcatccgaccagaaaatctgtgattcacggatcgcgagagtacacgtggcgccagacttatgaccggtgtcgccgactcgcctccgctctcgccgatcgatcaatcggtcccggttcaacggtggctattattgcacctaacatcccagcaatgtacgaagctcatttcggagtaccaatgtgtggagctgttctgaattgtgtcaacatccgtctcaatgccccaacagtcgcttttcttcttagtcactcgcagagctctgttataatggtggatcaggagttctttactctggctgaggattctttgagacttatggaggagaaagctggaagtagcttcaaacgcccgcttttaatcgtcattggtgatcacacctgtgctcctgagtcacttaaccgggctttgtcgaagggagctatagaatatgaggattttcttgcaaccggagatccaaattatccgtggcagccaccagctgatgagtggcagagcatcgctcttggttatacctcgggaacaactgctagtccgaaaggagtggtgcttcatcatcgaggtgcgtatataatggctttgagcaatcctctcatttgggggatgcaagatggtgctgtttacttgtggactctccctatgtttcattgcaacggttggtgtttcccttggtcccttgctgtgctctctggtacaagcatctgtctccgtcaggttacggcgaaggaagtgtattcaatgatagccaaatacaaggtaactcatttctgtgcagctcctgtggtcctcaacgctattgtcaatgctcctaaagaagacactatccttcctcttccccatacagtccatgtcatgacagcaggagctgctcctccaccttctgttctcttctccatgaaccagaagggcttccgagtcgctcacacctatgggctttccgagacttatggtccttccaccgtatgcgcttggaaacccgagtgggattccctccctcctgagacgcaggccaagctcaatgctcgccaaggtgtccgctatactggcatggagcagcttgatgtcattgacactcagaccggaaaacctgttcctgcagatggaaaaaccgcaggagaaattgttttccgagggaatatggtgatgaaaggctatctaaagaatccggaagcgaacaaagagacatttgctggtgggtggttccactcgggggatattgcagtgaaacacccagacaactatatcgagatcaaggacaggtcaaaggacgttataatctctgggggcgagaatatcagcagtgtcgaagtcgaaaacgtagtgtaccatcaccccgcggttcttgaagcctctgttgtggccaggccagacgagcggtggcaagaatctccgtgtgcgtttgtgacacttaagagcgattacgagaagcatgaccagaataagttggctcaggatataatgaaattctgccgggagaagcttccggcatattgggtcccaaagtcagtggtgtttgggccgttaccaaagacagcaactggaaaaattcagaagcatattctgaggaccaaggccaaagagatgggaccagtaccaagaagcaggttatag

SEQ ID NO: 28091 - protein, 569 aa, Arabidopsis thaliana
MAATKWRDIDDLPKIPANYTALTPLWFLDRAAVVHPTRKSVIHGSREYTWRQTYDRCRRLASALADRSIGPGSTVAIIAPNIPAMYEAHFGVPMCGAVLNCVNIRLNAPTVAFLLSHSQSSVIMVDQEFFTLAEDSLRLMEEKAGSSFKRPLLIVIGDHTCAPESLNRALSKGAIEYEDFLATGDPNYPWQPPADEWQSIALGYTSGTTASPKGVVLHHRGAYIMALSNPLIWGMQDGAVYLWTLPMFHCNGWCFPWSLAVLSGTSICLRQVTAKEVYSMIAKYKVTHFCAAPVVLNAIVNAPKEDTILPLPHTVHVMTAGAAPPPSVLFSMNQKGFRVAHTYGLSETYGPSTVCAWKPEWDSLPPETQAKLNARQGVRYTGMEQLDVIDTQTGKPVPADGKTAGEIVFRGNMVMKGYLKNPEANKETFAGGWFHSGDIAVKHPDNYIEIKDRSKDVIISGGENISSVEVENVVYHHPAVLEASVVARPDERWQESPCAFVTLKSDYEKHDQNKLAQDIMKFCREKLPAYWVPKSVVFGPLPKTATGKIQKHILRTKAKEMGPVPRSRL

SEQ ID NO: 28092 - DNA, 1635 bp, Arabidopsis thaliana
  CDS (1)..(1635)
atggagaaatccggctacggcagagacggaatttaccgatcacttcgtccaacactcgttcttcccaaagatccaaacacatcgttagtctctttcctcttccgtaactcctcatcttacccatcaaaactcgctatcgccgattccgataccggcgattccttaaccttctctcagctcaaatccgccgtcgctagactcgctcacggattccaccgtttaggtattcgcaaaaacgacgtcgtgttgattttcgctcctaactcttaccagttccctctctgtttcctcgccgtaaccgcgatcggcggcgttttcaccaccgcgaatcctctttacactgtgaatgaggtttcgaaacagatcaaagattcgaatccgaagattatcatatccgttaatcaactgtttgataagatcaaaggctttgatcttcccgttgttctacttggatctaaagacaccgtagagattcctccgggatcgaattcgaagattcttagtttcgataacgtgatggaactctcagagccagtttctgagtacccgttcgttgagattaagcaatcagatacagctgcattgttgtattcatcaggaactacaggaacaagcaaaggtgttgaattgactcatgggaatttcattgcagcttcgttaatggttactatggatcaagatcttatgggagagtatcatggcgtcttcttgtgttttcttcctatgtttcatgtttttggtttggcagtgattacttattctcagcttcagagaggaaatgctttggtttctatggcgagatttgagcttgagttggtgcttaagaatattgagaagtttagagttactcatctttgggttgttcctcctgtgttccttgctctttccaagcagagtattgtgaaaaagtttgatctttcttcacttaagtatattggttcaggagctgctcctcttggtaaagatttgatggaggaatgtggaagaaacattcctaatgttttgcttatgcagggatatggaatgactgaaacgtgtggaattgtgtctgtggaagacccgagactcgggaaacggaactctggttcagctggaatgcttgctccaggtgttgaagctcagatagtgagtgtagaaactggaaaatctcagcctccaaatcaacaaggagaaatctgggttcgaggaccaaacatgatgaaagggtacctcaataaccctcaggctactaaagaaacaatagacaaaaaaagttgggtgcataccggagatcttggatatttcaacgaagatggtaacctttatgttgttgatcgaatcaaagaacttatcaaatacaaaggcttccaggttgctccagctgaactagaaggtcttcttgtatcacatcctgatatactagatgctgtcgttatcccgttccctgatgaagaagcaggtgaagttccaattgcgtttgttgttcgatcaccaaatagctcaataacagagcaagatattcaaaagttcatagccaaacaggtcgctccttacaaaagattacgacgagtgagcttcatcagccttgttccaaaatccgctgctggtaaaatcttgagaagagaacttgttcagcaagtaagatccaagatgtga

SEQ ID NO: 28093 - protein, 544 aa, Arabidopsis thaliana
MEKSGYGRDGIYRSLRPTLVLPKDPNTSLVSFLFRNSSSYPSKLAIADSDTGDSLTFSQLKSAVARLAHGFHRLGIRKNDVVLIFAPNSYQFPLCFLAVTAIGGVFTTANPLYTVNEVSKQIKDSNPKIIISVNQLFDKIKGFDLPVVLLGSKDTVEIPPGSNSKILSFDNVMELSEPVSEYPFVEIKQSDTAALLYSSGTTGTSKGVELTHGNFIAASLMVTMDQDLMGEYHGVFLCFLPMFHVFGLAVITYSQLQRGNALVSMARFELELVLKNIEKFRVTHLWVVPPVFLALSKQSIVKKFDLSSLKYIGSGAAPLGKDLMEECGRNIPNVLLMQGYGMTETCGIVSVEDPRLGKRNSGSAGMLAPGVEAQIVSVETGKSQPPNQQGEIWVRGPNMMKGYLNNPQATKETIDKKSWVHTGDLGYFNEDGNLYVVDRIKELIKYKGFQVAPAELEGLLVSHPDILDAVVIPFPDEEAGEVPIAFVVRSPNSSITEQDIQKFIAKQVAPYKRLRRVSFISLVPKSAAGKILRRELVQQVRSKM

SEQ ID NO: 28094 - DNA, 1653 bp, Arabidopsis thaliana
  CDS (1)..(1653)
atggaggaaatgaagccatgcgccgcaaactcgccgccgttgacgccgataggttttttagagagagccgccaccgtttacggtgactgtacctccatcgtttatggcagcaacaccgtttacacgtggcgtgaaacaaacctccgttgtctccgcgtggcgtcttctctgtcttcaatcggaatcggcaggtctgacgtagtctctgttctctctcccaatactccggctatgtacgagctccagtttgctgttcccatgtccggcgcaatcctcaacaacatcaacacacgcctcgacgcacgcaccgtctctgttcttctccgtcactgtgaatctaagcttcttttcgtcgacgtcttctccgttgatctcgccgttgaagcggtctcgatgatgacgactgatccgccgattctcgtcgtcatcgccgataaagaagaggaaggaggagttgctgacgtggctgatctttcaaaattcagttacacttacgatgatcttatcgaaagaggtgatccgggttttaaatggatccgacccgaaagcgaatgggatccggttgtgcttaattacacttccggtacgacttcagctcctaaaggagtggtacactgccacagaggaattttcgtaatgtcagttgattcactaattgattgggccgtaccgaaaaatccggtttacttatggactctaccgatatttcactctaacggttggaccaatccatggggaatcgccgccgtcggaggaactaacgtctgtttgcgtaaatttgacgcgccgttaatctaccgtctgatccgtgatcacggcgtcacacacatgtgtggagctccggtggtgctcaacatgttatccgcgactcaggaatctcagcctcttaaccatcccgtcaacatcttaaccgccggttctccgcctccagctaccgtcctcctccgagccgaatcaattggtttcgttatcagtcacggttacggattaacggaaaccgccggtgtaatcgtctcgtgcgcgtggaagccaaaatggaatcatttaccggcaagcgatcgagcgagattgaaggcacggcaaggagtgagaaccgtcgggtttactgaaatcgacgtggtggatcctgaatcgggtttgagcgttgagagaaatggagaaactgtcggagaaattgtgatgagaggaagctcggtcatgctcggttacttaaaagatccggtcggaacagagaaagctttaaagaacgggtggttttacaccggagatgttggtgtgattcattccgatggttatctagagattaaagatagatcgaaagatataattataacgggaggtgagaatgtgagtagtgttgaggttgaaacggtgttgtacacgattccggcggtgaatgaagtggcggtggtggctagacctgatgagttttggggagagacaccgtgtgcgtttgtgagtttgaaaaatgggtttagtgggaaacctacggaggaggaattgatggagtattgtagaaagaagatgcccaagtatatggttcctaaaacggtgtcgtttatggatgagttgcctaagagttcgacgggaaaggttacgaagtttgtgcttagggacattgcaaagaagatgggtgataagacaatttcttaa

SEQ ID NO: 28095 - protein, 550 aa, Arabidopsis thaliana
MEEMKPCAANSPPLTPIGFLERAATVYGDCTSIVYGSNTVYTWRETNLRCLRVASSLSSIGIGRSDVVSVLSPNTPAMYELQFAVPMSGAILNNINTRLDARTVSVLLRHCESKLLFVDVFSVDLAVEAVSMMTTDPPILVVIADKEEEGGVADVADLSKFSYTYDDLIERGDPGFKWIRPESEWDPVVLNYTSGTTSAPKGVVHCHRGIFVMSVDSLIDWAVPKNPVYLWTLPIFHSNGWTNPWGIAAVGGTNVCLRKFDAPLIYRLIRDHGVTHMCGAPVVLNMLSATQESQPLNHPVNILTAGSPPPATVLLRAESIGFVISHGYGLTETAGVIVSCAWKPKWNHLPASDRARLKARQGVRTVGFTEIDVVDPESGLSVERNGETVGEIVMRGSSVMLGYLKDPVGTEKALKNGWFYTGDVGVIHSDGYLEIKDRSKDIIITGGENVSSVEVETVLYTIPAVNEVAVVARPDEFWGETPCAFVSLKNGFSGKPTEEELMEYCRKKMPKYMVPKTVSFMDELPKSSTGKVTKFVLRDIAKKMGDKTIS

SEQ ID NO: 28096 - DNA, 1659 bp, Arabidopsis thaliana
  CDS (1)..(1659)
atggagcaaatgaagccatgcgccgcaaactcgccgccgttgacgccgataggtttcttagagagagccgccaccgtttacggtgactgtacctccatcgtttatggcagcaacaccgtttacacgtggcgtgaaacaaacctccgttgtctccgcgtggcgtcttctctgtcttcaatcggaatcggcaggtctgacgtagtctctgttctctctcccaatactccggctatgtacgagctccagtttgctgttcccatgtccggcgcaatcctcaacaacatcaacactcgcctcgacgcacgcaccgtctctgttcttctccgtcactgtggatctaagcttctcttcgtcgacgtcttctccgttgatcttgccgttgaagcgatctcgatgatgacgactgatccgccgattcttgtcttcatcgccgataaagaagaagaaggaggagatgctgacgtggcggatcgtaccaaattcagttacacttacgatgatctgatccatagaggtgatctggattttaaatggatccgacccgaaagcgaatgggatccggttgtgcttaattacacttccggtacgacttcggctcctaaaggagtcgtacactgccacagaggaattttcgtaatgtcaattgattctttaatcgattggaccgtaccgaaaaatccggtttacttatggactctaccgatatttcacgctaacggctggagctatccatggggaatcgccgccgtcggaggaactaacgtctgtttgcgtaaattcgacgcgccgttaatctaccgtttgatccgtgatcacggcgtcacacacatgtgtggagctccggtagtgctcaacatgttgtcggcgactaacgaatttcagccgttaaatcgtcctgtcaacatcttaaccgccggtgctccgcctccagcagccgtactcctccgagcagaatcaattggattcgtgataagtcacggatacgggttaacggaaaccgccggattaaacgtgtcatgcgcgtggaagccacagtggaatcgtttaccggcgagcgatcgagcgaggttgaaagcacggcaaggagtgagaaccgtcggatttactgaaatcgacgtggtggatcctgaatcaggtaggagcgttgagagaaacggagaaaccgtcggagaaatagtgatgagaggaagctcgatcatgctcggttacttaaaagatccggtcggaacagagaaagctttaaagaacgggtggttttacaccggagatgttggtgtgattcattccgatggttatctagagattaaagatagatcgaaagatataattataacgggaggtgaaaatgtgagtagtgttgaggttgaaacggttttgtatacgaatccggcggtgaatgaagtggcggtggtggcgagacctgatgtgttttggggagagacgccgtgtgcgtttgttagtttgaaaagtgggttgactcaaagaccgacggaggtggaaatgatagagtattgtaggaagaagatgccgaaatatatggttcctaaaacggtgtcctttgtggatgagctgcctaaaacttcgacggggaaggttatgaagtttgtacttagagagattgcgaagaagatgggtacgacgaggttgagtcggatgtaa

SEQ ID NO: 28097 - protein, 552 aa, Arabidopsis thaliana
MEQMKPCAANSPPLTPIGFLERAATVYGDCTSIVYGSNTVYTWRETNLRCLRVASSLSSIGIGRSDVVSVLSPNTPAMYELQFAVPMSGAILNNINTRLDARTVSVLLRHCGSKLLFVDVFSVDLAVEAISMMTTDPPILVFIADKEEEGGDADVADRTKFSYTYDDLIHRGDLDFKWIRPESEWDPVVLNYTSGTTSAPKGVVHCHRGIFVMSIDSLIDWTVPKNPVYLWTLPIFHANGWSYPWGIAAVGGTNVCLRKFDAPLIYRLIRDHGVTHMCGAPVVLNMLSATNEFQPLNRPVNILTAGAPPPAAVLLRAESIGFVISHGYGLTETAGLNVSCAWKPQWNRLPASDRARLKARQGVRTVGFTEIDVVDPESGRSVERNGETVGEIVMRGSSIMLGYLKDPVGTEKALKNGWFYTGDVGVIHSDGYLEIKDRSKDIIITGGENVSSVEVETVLYTNPAVNEVAVVARPDVFWGETPCAFVSLKSGLTQRPTEVEMIEYCRKKMPKYMVPKTVSFVDELPKTSTGKVMKFVLREIAKKMGTTRLSRM

SEQ ID NO: 28098 - DNA, 1623 bp, Pseudomonas aeruginosa PAO1
  CDS (1)..(1623): transl_table=11
atgtcgatcttcgaacagggtctcgcgcccgccgccgtcaaccacatcgccctgacgccgctgagcttcatcgagcgcaccgccagcgtctatccgcactaccccgcggtgatccacggcaacatccgccgcgactgggcgcagacctaccaacgctgccgacgcctggcctcggccctggccgggcgcggcatcggccagggcgacacggtggcggtgatgctgccgaacatccccgagatgctcgaggcgcactatggcgtgccgatgatcggcgcggtgctgaacaccctcaacgtacgcctcgacgccgaagccatcgccttcatgctgcaacacggcgaagccaaggtgctgatcaccgactacgaattccacgaggtgatccatgccgccatcggtatgctcgaccacccgccgctggtggtcgacgtcaacgaccccgagtatggcgaaggccgcccggttggcgaactggactacgaggcgctgctcgccgagggcgacccgcagttcgcctgggaatggccccgggacgagtggcaggcgatctcgctgaactacacctcgggcaccaccggcaaccccaagggcgtggtctaccatcaccgcggcgcctacctgaacgcgctgggcaaccagatgacctggtccatgggccagcacccggtgtacctctggaccctgccgatgttccactgcaacggctggtgctatccgtggacggtgaccgcgctggccggcgtccacgtctgcctgcggcgggtcgatccgcaaaaggtcctcaccctgatccgcgagcaccaggtcagccacctgtgcggcgcgcccatcgtgctcaacgccctgatcaacatgcccgactcggccaaggccgccatcgaccacccggtgcatgccatggtcgccggcgccgcgccaccggccaaggtgatcggcgcggtggaagagatgggcatccgcgtcacccatgtctacggcctcaccgaggtctacggcccggtcacggtctgcgcctggcacggcgagtgggacgacctgccgctggagcgacgcgccgcgatcaagtcgcgccagggcgtgcgctacccgaccctcgaaggggtgatggtggccgacccgaagaccctcgagccggtgccgcgcgacggccagtccatcggcgagatattcatgcgcggcaataccgtgatgaagggctacctgaagaatcccagcgccaccgaggaagccttcgccggcggctggttccataccggcgacctggcggtctgccatccggacggctacatcgagatccgcgaccggctcaaggacatcatcatctccggcggcgaaaacatctccaccatcgaactggagggcgtgctctaccgccacccggcggtgctggaggcggcggtggtggcgcggcccgacgaaaagtggggggaaacgccctgtgcgttcattaccctgaagagcgatcatcaggggctcgccgagagcgagatcgtcgcgttctgtcgcgaacacctggccgcgttcaagattccgcgtaccgtggtgttctcggaactgccgaagacctccaccggcaagatccagaaatacgtgctgcgcgagtgggccgccgccctctga

SEQ ID NO: 28099 - protein, 540 aa, Pseudomonas aeruginosa PAO1
MSIFEQGLAPAAVNHIALTPLSFIERTASVYPHYPAVIHGNIRRDWAQTYQRCRRLASALAGRGIGQGDTVAVMLPNIPEMLEAHYGVPMIGAVLNTLNVRLDAEAIAFMLQHGEAKVLITDYEFHEVIHAAIGMLDHPPLVVDVNDPEYGEGRPVGELDYEALLAEGDPQFAWEWPRDEWQAISLNYTSGTTGNPKGVVYHHRGAYLNALGNQMTWSMGQHPVYLWTLPMFHCNGWCYPWTVTALAGVHVCLRRVDPQKVLTLIREHQVSHLCGAPIVLNALINMPDSAKAAIDHPVHAMVAGAAPPAKVIGAVEEMGIRVTHVYGLTEVYGPVTVCAWHGEWDDLPLERRAAIKSRQGVRYPTLEGVMVADPKTLEPVPRDGQSIGEIFMRGNTVMKGYLKNPSATEEAFAGGWFHTGDLAVCHPDGYIEIRDRLKDIIISGGENISTIELEGVLYRHPAVLEAAVVARPDEKWGETPCAFITLKSDHQGLAESEIVAFCREHLAAFKIPRTVVFSELPKTSTGKIQKYVLREWAAAL

SEQ ID NO: 28100 - DNA, 1803 bp, Halobacterium sp. NRC-1
  CDS (1)..(1803): transl_table=11
atggaacgccgtgcgcagcgaggtggacgacggagacctgagctggcgggacgctgcctacgttgtcgcgctgcaacgcatcggccgtgcgaaggaagcccgtgggctctggccctgatctgcacggcgttgggtgtgcccacaccccaaacaactatcacggacgtttgtgatggtggtggtgtcatgcatcgacccctcctcgtcaccgacttcatcgaccgcgcgcgcacctactacggcgacgaaaccgccgtcgtcgccaccaccggccggcggtacacgtacagcgagctcgccgaccgcgccgaccgcttttcggcggtcctccaggcggccggcatcgacagcggcgaccgcgtcgccgtcctcgacccgaacacccactaccacctcgaagccgcctacggcgcgatgcagctgggggccatccacacgccactgaactaccggctcacgcccgacgactacgcgtacatcctcgccgacgccggcgcggacgccatctacgccgacgccgcgtacgccgaccgcgtcgaggcggtccgcgaccagatcccgacgaccacgttcatcaccgacgaccccgccgccgtcgacggcgactggcaggacgccgacgccctgctggccgacgccgatcccgacgactacgaccgccccgatatggccgaggacgacgtgatcaccatcaactacacgtccggcaccaccggggaccccaagggcgtctgtcgcacccaccgcaacgaagtggtgcacgcgctgttgttgtccacccaccacaccatcacggacaccgacacctacctctggacgctgccgatgttccacgccaacggctgggggcacatcttcgccatcacgggcgctggtgccacccacgtctgcacgcggggcgtcgacgccgccagcgtcttcgacaccatccaggccgaagccgtgtcgtacctgtgtgccgccccgaccgtcctgaacatgctcctggactaccacgaggcccacgacgtcgcggccactggcgacgccgacgtgcgggtcgccaccgccggcagcgcgcccccggaggcgacgatccgcgccgtcgaatcggcgctcgactggtcgctcatgcacgtctacggggccaccgaaaccggccccctgatcgccacctccgacgccgaccgactgctcgccgccgggggcggcagccgcgccgcgatgcagaaacgccagggcatcggcctgttgggcaccgaactgcgcgtcgtcgacgagcacggcaacgacgtcccccgcgacaacgagaccatcggcgagatcgtcgtctccggcaaccaggtgatggaccgctactggaacaagcccgacgccaccgagcgggcgttcaccgaccgcgtcgacggctacttccacatgggtgatttcgcggtggtcgacgacaccggcttcgtctcgatcctggaccgcaaaaaggacatcatcatctccggcggcgagaacatctcctccatcgaactggaggacacgctcttcgagcacgacgccgtcggcgaggtcgccgtcgtgccctccccccacgacgactggggtgaaacaccgaaggcgttcgtcgtccctgcctccggggaccccaacaaccccggcgtcacgaccaccgcgctcgtcgagtacacccgggcggagctggcgtcgttcaagacggtgcggcgggtcgagttcgtcgacgaactccccaccacggccaccggcaaagtccagaagtacgagctgcgtgccgcggagttcgccgacgaggagtcgctggtcggccaggggtaa

SEQ ID NO: 28101 - protein, 600 aa, Halobacterium sp. NRC-1
MERRAQRGGRRRPELAGRCLRCRAATHRPCEGSPWALALICTALGVPTPQTTITDVCDGGGVMHRPLLVTDFIDRARTYYGDETAVVATTGRRYTYSELADRADRFSAVLQAAGIDSGDRVAVLDPNTHYHLEAAYGAMQLGAIHTPLNYRLTPDDYAYILADAGADAIYADAAYADRVEAVRDQIPTTTFITDDPAAVDGDWQDADALLADADPDDYDRPDMAEDDVITINYTSGTTGDPKGVCRTHRNEVVHALLLSTHHTITDTDTYLWTLPMFHANGWGHIFAITGAGATHVCTRGVDAASVFDTIQAEAVSYLCAAPTVLNMLLDYHEAHDVAATGDADVRVATAGSAPPEATIRAVESALDWSLMHVYGATETGPLIATSDADRLLAAGGGSRAAMQKRQGIGLLGTELRVVDEHGNDVPRDNETIGEIVVSGNQVMDRYWNKPDATERAFTDRVDGYFHMGDFAVVDDTGFVSILDRKKDIIISGGENISSIELEDTLFEHDAVGEVAVVPSPHDDWGETPKAFVVPASGDPNNPGVTTTALVEYTRAELASFKTVRRVEFVDELPTTATGKVQKYELRAAEFADEESLVGQG

SEQ ID NO: 28102 - DNA, 1701 bp, Escherichia coli O157:H7 EDL933
  CDS (1)..(1701): transl_table=11
atgcatcccacaggcccgcatctcgggcctgatgttctgtttcgagagtccaaaatgaaagtgacattaacgtttaacgaacaacgtcgtgcggcgtatcgtcagcaagggctatggggcgatgcttcgctggccgattactggcagcagaccgctcgtgcgatgccagacaaaattgccgtggtcgataatcatggagcatcgtacacctatagcgcgctcgatcacgccgcgagctgtctggcaaactggatgttagcgaagggtattgaatcaggcgatcgcatagcatttcaactgccaggctggtgtgaatttaccgttatctatcttgcctgcctgaaaatcggtgcggtttccgtaccgctgttgccttcctggcgggaagcagaactggtatgggtgcttaataagtgtcaggcaaaaatgttctttacaccgacgttgtttaaacaaacgcgtccggtagatttaatcctgccgctgcaaaatcagcttccacaactacaacaaattgtcggcgtggacaaactggctcccgccacctcttccctctcattaagtcagattatcgccgacaataccccactgaccacggcgataacgacccacggcgatgaattagctgcggtgctgtttacctccggaaccgagggtctgccaaagggcgtgatgcttacgcataacaatattctcgccagtgagcgggcttattgcgcgcggctgaatctaacctggcaggatgtctttatgatgcctgcgccacttggtcacgcaacgggctttctgcatggcgtaacggcaccattcttaattggcgctcgcagcgtgttgttagatattttcactcctgatgcgtgtctcgcgctgcttgagcagcagcgttgctcctgtatgctcggcgcaacgccgtttgtctatgatcttttgaatttactagagaaacaacccgcagacctttcagcgctgcgcttctttctttgcggcggtaccacaatccccaaaaaagtggcgcgtgaatgccagcagcgcggcattaaattattaagtgtttatggttccacagaaagttcgccgcatgcggtggtgaatctcgatgatcctttgtcgcgctttatgcacaccgatggttacgctgccgcaggtgtagagattaaagtggtcgatgacgcacgcaagaccttaccgccaggttgcgaaggtgaagaagcctcgcgtggccccaatgtgtttatgggatattttgatgaacctgaattaaccgcccgtgccctggatgaagaaggctggtattacagcggcgatctctgccgtatggatgaggctggctatataaaaattaccggacgcaaaaaagatattattgtccgcggcggcgaaaatattagcagccgtgaagtggaagatattttattgcagcatcctaaaattcacgatgcctgtgtggttgcaatgcccgatgaacgtttaggtgaacgatcatgcgcttatgtcgtgctgaaagcgccgcatcattcattatcgctggaagaggtggtggctttttttagccgtaaacgggtcgcaaaatataaatatcctgaacatatcgtggtaatcgaaaaactaccgcgcactgcctcaggtaaaatacaaaagtttttgttacggaaagatattatgcggcgattaacgcaggatgtctgtgaagagattgaataa

SEQ ID NO: 28103 - protein, 566 aa, Escherichia coli O157:H7 EDL933
MHPTGPHLGPDVLFRESKMKVTLTFNEQRRAAYRQQGLWGDASLADYWQQTARAMPDKIAVVDNHGASYTYSALDHAASCLANWMLAKGIESGDRIAFQLPGWCEFTVIYLACLKIGAVSVPLLPSWREAELVWVLNKCQAKMFFTPTLFKQTRPVDLILPLQNQLPQLQQIVGVDKLAPATSSLSLSQIIADNTPLTTAITTHGDELAAVLFTSGTEGLPKGVMLTHNNILASERAYCARLNLTWQDVFMMPAPLGHATGFLHGVTAPFLIGARSVLLDIFTPDACLALLEQQRCSCMLGATPFVYDLLNLLEKQPADLSALRFFLCGGTTIPKKVARECQQRGIKLLSVYGSTESSPHAVVNLDDPLSRFMHTDGYAAAGVEIKVVDDARKTLPPGCEGEEASRGPNVFMGYFDEPELTARALDEEGWYYSGDLCRMDEAGYIKITGRKKDIIVRGGENISSREVEDILLQHPKIHDACVVAMPDERLGERSCAYVVLKAPHHSLSLEEVVAFFSRKRVAKYKYPEHIVVIEKLPRTASGKIQKFLLRKDIMRRLTQDVCEEIE

SEQ ID NO: 28104 - DNA, 1575 bp, Deinococcus radiodurans R1
  CDS (1)..(1575): transl_table=11
ttgcccatgaacacgcccctgacacccctgaccctggtccgccggggcctcaagctctatcccgaccacaccgccgtgattgaacccggcgggccccggttcacttaccgcgagtggggccggcgcatttatcagcttgcccgcgcgatccaggcggcaggctacggcgggcagcatgtggcggtgctttcgcccaacacgcacggcgggctgctgacctacgcgggggtgccctgggcgggcagcgtgctggtgccgctcaacactcgcctgacccccgaggaatacgagtttcagctgcggcacgccgaggtgcggctgctgctggtggacgagtcgctgcacgaccgggtgcgcgaggtggccgccgggctcggcatcgaagtctgggtgatgggcgacgcgcggggcgccggaacagccttcgaggcgaagctcgctgcgcaggacgactcgccgctgccgctgccggtgcaagacgagaacggcaccatcaccctcaacttcacctccggcacgacctccgaccccaagggcgtgatgatgacgcaccgctcgaccatgctcaacgccatcgagacgatctattacttcaaggccgaccaggacactgtttacctgcacactctgcccgatttccacgccaacggctggggcggcgtgtggagccccttcggcgtgggggcgacccatgtgaccctgcccaccgtccgcgccgacgccgcctacgacgcgattgagcagcacggcgtgacccacctctgcgccgcgcccaccgtgctgtccatgctgaccgacccggcgcacgcccgcccgctcagccgccagattcgggtggcgacggcgggcagcccgccccacgcccgcatcatcgccgacatgaacgcgctcgggtttcacgtcactcaggtgtacggcctgaccgaaaccagcccgctgattacggtggccgaactctcggcgcagcaggaggagttacccaccccgcgccgcgccgccctcatcgccaagcagggcgtggaaatgattctggcgggcgaggtggaggtgctggaccccgagctgcggcccgtgcccggcgacggcgaaacgctgggcgaaatcatggtgcgcggcaacctcgtgatgaaaggctattaccgcaacgaggaggccaccgccaaagccctggagggcggctggttccacaccggcgacgtggcggtggtgcaccccgacgggcgcatcgaaatccgcgaccgcaacaaggacgtgatcatctcgggcggcgagaacatcagcagcgtggaggtcgaaggggtgctctacgcccaccccgccgtgcgcgaagccgtggtggtcgccatgccccacgagaaatggggcgaggtgccctgcgccttcatcgccctgcaccagggccaggaagtcacccccgaagacctcacggcgcatgtgcgcgagcatctggcgggcttcaaagtccccaagcactacgaattccgcgacgatttgcccaagacggcgagcggcaagttccagaagttcatcctgcgcgccgagctgtggcaggggaaggcgcggggcgtgaactga

SEQ ID NO: 28105 - protein, 524 aa, Deinococcus radiodurans R1
MPMNTPLTPLTLVRRGLKLYPDHTAVIEPGGPRFTYREWGRRIYQLARAIQAAGYGGQHVAVLSPNTHGGLLTYAGVPWAGSVLVPLNTRLTPEEYEFQLRHAEVRLLLVDESLHDRVREVAAGLGIEVWVMGDARGAGTAFEAKLAAQDDSPLPLPVQDENGTITLNFTSGTTSDPKGVMMTHRSTMLNAIETIYYFKADQDTVYLHTLPDFHANGWGGVWSPFGVGATHVTLPTVRADAAYDAIEQHGVTHLCAAPTVLSMLTDPAHARPLSRQIRVATAGSPPHARIIADMNALGFHVTQVYGLTETSPLITVAELSAQQEELPTPRRAALIAKQGVEMILAGEVEVLDPELRPVPGDGETLGEIMVRGNLVMKGYYRNEEATAKALEGGWFHTGDVAVVHPDGRIEIRDRNKDVIISGGENISSVEVEGVLYAHPAVREAVVVAMPHEKWGEVPCAFIALHQGQEVTPEDLTAHVREHLAGFKVPKHYEFRDDLPKTASGKFQKFILRAELWQGKARGVN

SEQ ID NO: 28106 - DNA, 1611 bp, Sulfolobus tokodaii str. 7
  CDS (1)..(1611): transl_table=11
atgagtgaatattacgaatatgaattaacaatagataagattctagatactggagtgaaaagcttcccagatagagaaatagtatatagggatgttagaaggtatactttttcatcttttgcagattctgtaagaaggttaatgagtgggttaaagaaactaggtgttaaagagggcgagactgtaggtgttatagattgggatactgatgtctaccttcattcttactatgctattcctatgttgggttctgttttgcatacagttaatataagatacccaccagaaataatattgaagactatattacaagctgaagataaatatttgatcgttagggacgagtttttacccttattagagaaagccaagaatcttcttccagtgggaatgaagattataacatatagtgatagcaaagagaaagtaaggtctaatatttctgatgcagatttttgggagttgattgatagtagtgagccttcagaaataccacaagttagtgaaaatagtagagctactatattctttacttctggaactactggtgaccctaaaggtgtttggtttacgcatagaaaacttgttcttcacgcgttaagtgtaagcttagtaggtgcgagaccacctttaaacgtaacaactaatgacgtttacttaatattggttccaatgtttcatgtacattcttggggatatccctacgtgtttatgttgtctggaattaaatatgttttaccggggaagtatgattacggtcttatactaaaacttatggataaggaaagagttaccttctcggctatggtacctactatattatatttcataattacccatccagaggcacaaaactacttacatgtatttaagagatggaaagttattataggtggatcagctttaccagaagggttagcaaggaaggctaaagaactgggtattacaataatttgcggttatggactttctgagacttgcccggtgcttactgtgagttattacaattcattagtagaaaatttagatgaaaataaaaagttcctagaacaaataactgctggaactcctatacccttagtccagttaaggatagttgacccagtatctggtgaggagaaaaaggtaaatgaaattggtgagatagttgtaagaagtccttggcttacaaaggagtattataaagacccggagaagactaaagctttatggagaggtggatggcttcacacgggagatttaggttatattgatgagtatggatatgtacatattgtagatagagagaaagatgcaataaaaagtggtggtgaatttattccgtcattacttttagaaaatgtaatatcattgtatcctaaggtctcacaagtagcggttgtaggtagaaaggacgagaaatggggtgaaagacctatagcatttatagttcctaaagagccaattactgaagaagaattaaggaacttcttgctcgaaatgagtaaccaagggaagatccaaaagtggtggattccagataagttcatcttcatacaatcaatgcctcttacctcaacaaataagatagacaaaaaaatattaagagatttggctaataagagtatgtag

SEQ ID NO: 28107 - protein, 536 aa, Sulfolobus tokodaii str. 7
MSEYYEYELTIDKILDTGVKSFPDREIVYRDVRRYTFSSFADSVRRLMSGLKKLGVKEGETVGVIDWDTDVYLHSYYAIPMLGSVLHTVNIRYPPEIILKTILQAEDKYLIVRDEFLPLLEKAKNLLPVGMKIITYSDSKEKVRSNISDADFWELIDSSEPSEIPQVSENSRATIFFTSGTTGDPKGVWFTHRKLVLHALSVSLVGARPPLNVTTNDVYLILVPMFHVHSWGYPYVFMLSGIKYVLPGKYDYGLILKLMDKERVTFSAMVPTILYFIITHPEAQNYLHVFKRWKVIIGGSALPEGLARKAKELGITIICGYGLSETCPVLTVSYYNSLVENLDENKKFLEQITAGTPIPLVQLRIVDPVSGEEKKVNEIGEIVVRSPWLTKEYYKDPEKTKALWRGGWLHTGDLGYIDEYGYVHIVDREKDAIKSGGEFIPSLLLENVISLYPKVSQVAVVGRKDEKWGERPIAFIVPKEPITEEELRNFLLEMSNQGKIQKWWIPDKFIFIQSMPLTSTNKIDKKILRDLANKSM

SEQ ID NO: 28108 - DNA, 1641 bp, Salmonella typhimurium LT2
  CDS (1)..(1641): transl_table=11
atgagtgttacattaacgtttgacgccgcaaggcggaaaacctatcgcgagtccggctactggggcgatgcttcactgggcgactactggcggcaaaccgcacgcgccgtacccgataaaatcgccgtggtcgataatcatggcgcgtcctggacctacgccgcgctcgactacgcggcaagccgcctggcaaactggttactgtctcaggggattcaaccgggcgatcgcgtggcctttcagcttccgggctggtgtgagtttaccctcatttatctggcctgcctgaaaacgggcgcggtatctgtcccgctacttcccgcctggcgagaagcagagctggtttgggtgctgaacaaatgtcaggctaaaatattcttcgcccccaccgtgttcaaacagaatcgtccggtcgatcttatccttccgctacaaaatcaactgcgccatctgacgcatattgtcggcgtggataaactggcgcctgccaccacagcgcttgcgcttagtcaaatcatcgaccgcagcgaaccgttgcagtcagacattaacattcacggtgatgaactggcggcagtgctgtttacctccggcacagaaggaatgccgaaaggggtgatgttgacccacaataatattcttgccagcgaacgggcgtattgcgcgcggttgaatttaacctggcaagatgtgttcctgatgcctgcgccactgggccacgccaccggatttttacacggcgtcaccgcgccctttttaatcggggcgcgtagcgtattgctggacatctttaccccagaagcctgccttaccttattagcgcagcaacgctgtacctgtatgtcaggcgcgacgccgtttatttacgatctgctttgtgccattgagcaacagcctgccgacctctcctcactacgattcttcttatgcggcggcacgactattcccaaaaaggttgcccgcgactgccagcagcgcggtatcaaattattgagtatttacggttctacagaaagttctccacactcgatggttaatctgggtgattcgacttcacgcatgatgaacaccgatggttatgccgccaccggtgtagaaattaaaatcgtggatgaagatcgcaatacgcttccagcaggccacgaaggcgaagaagcctcgcgcgggccgaacgtttttatgggatacctggacgagccggaacttaccgcccgcgcactggataatgagggctggtattacagcggcgacctctgccgcatggatgaagacggttatatcaaaattaccgggcgcaaaaaggatattattatacgtggaggtgaaaatatcagcagtcgcgaggtggaggatattttattgcaacacccccgcatacacgatgcttgcgtcgttgctatgcctgatgaacgcttaggcgaacgttcatgcgcgtatgtagtcttaaaaccgccacacctttcgctgacgctggaagaggtgatcgcttttttcagtcgaaaacgggtagcgaagtataaatatccggaacggatcgtcatcgtagaaaaactgcccagaaccgcctctggcaaagtgcagaagtttctgttgcggcaggatattattgagcggctgcgccaggagcacactgcggtataa

SEQ ID NO: 28109 - protein, 546 aa, Salmonella typhimurium LT2
MSVTLTFDAARRKTYRESGYWGDASLGDYWRQTARAVPDKIAVVDNHGASWTYAALDYAASRLANWLLSQGIQPGDRVAFQLPGWCEFTLIYLACLKTGAVSVPLLPAWREAELVWVLNKCQAKIFFAPTVFKQNRPVDLILPLQNQLRHLTHIVGVDKLAPATTALALSQIIDRSEPLQSDINIHGDELAAVLFTSGTEGMPKGVMLTHNNILASERAYCARLNLTWQDVFLMPAPLGHATGFLHGVTAPFLIGARSVLLDIFTPEACLTLLAQQRCTCMSGATPFIYDLLCAIEQQPADLSSLRFFLCGGTTIPKKVARDCQQRGIKLLSIYGSTESSPHSMVNLGDSTSRMMNTDGYAATGVEIKIVDEDRNTLPAGHEGEEASRGPNVFMGYLDEPELTARALDNEGWYYSGDLCRMDEDGYIKITGRKKDIIIRGGENISSREVEDILLQHPRIHDACVVAMPDERLGERSCAYVVLKPPHLSLTLEEVIAFFSRKRVAKYKYPERIVIVEKLPRTASGKVQKFLLRQDIIERLRQEHTAV

SEQ ID NO: 28110 - DNA, 1713 bp, Agrobacterium tumefaciens str. C58
  CDS (1)..(1713): transl_table=11
atgagtgaattgtccctgggacatccggaaaatgtcagcgttgccaagcgctggctggcatcctatccgccgggcgtgccttcagagattcccgcctcggcaaatgcctccctcattgaccttctcgaaaagagctgcaagcaatttgccgaccgcaaggccttttccagcatgggaaaatccctgacctaccgggaactcgacgctgacacccgtgcggtcgccgcatggctgcaatccagaggactggaaaaaggcgaccgggttgcggtgatgatgccgaacatcctgcaaaatcccgtcgcggtttatgggattctgcgggcgggcatggtcgtggtcaatgtcaacccgctctataccccgcgcgaactggagcaccagctcaaggactccggcgcgaaagccctgttcgtgctggagaacttcgcccatgtggcgcagcaggctgtaccgaaaaccgccgtccggcatgtggtcgtcgcagcaatgggcgatcttctcggcctcaagggacatatcgtcaatctggtggtgcgcaaggtcaagaagctggtgcccgcccatgccattcccggctcgatcagcttcaaggccatgctgaaggaaggccagggggtttccctgaaaccggtcggccttacggcgcaggacatcgccttcctgcaatataccggtgggacgacgggcgtatccaagggcgccgtcctcacccatgccaatctccttgccaacaaggcgcagatcagcctgtggctcgacgctgccttcaacggccgcaaggaccgccccgaggttctcaacttcatctgcgcgctgccgctctaccatatcttcgcactgacggtgaattcactgatgggcattgcgctgggcggccataatctgctgatcgccaatccgcgcgacattcccggcttcgtaaaagagctttcgcattaccagccgcatatcttccctggcctcaccacgcttttcaacgcgttgatgaacaatgaagagttccgcaaacttgacctgtcgtcgctcatcttcgtactcggcggtggcatggcagtgcagaggccggtggccgaacgctgggtttccgtggtcggctgccctatcaccgaaggttacgggctgtcggaaacctcgcccgtcgccaccgtcaatcggctcgatgctgcggaattcagcggcaccatcggcctgcccatctcctccaccgaaatcgatattcgcgatgaggacggcaacagtctgccaacaggcgaagtcggcgagatttgcattcgcgggccgcaggtcatggccggttactggcagaggccggatgaaaccgcgaaggcgataacggcagacggcttcttccgttccggcgatatgggcttcatggacgaacgcggttacaccaagatcgttgaccgcaagaaggacatgatccttgtttccggattcaacgtctatccgaacgaggtggaagaagtggccgccagccatcctggtgtcctcgaatgcgccgcgatcggcgttccggacgaacattccggcgaaaccgtcaagcttttcgtggtcaagaaggaccagtccctgacggaagcggagctcaaggccttctgtgccaagaacctgacgaattacaaacggccgaaaatcatcgagttccgcaccgacctgccgaaatcgaatgtcggcaagattttgcggcgcgaattgcgcaatctgaactga

SEQ ID NO: 28111 - protein, 570 aa, Agrobacterium tumefaciens str. C58
MSELSLGHPENVSVAKRWLASYPPGVPSEIPASANASLIDLLEKSCKQFADRKAFSSMGKSLTYRELDADTRAVAAWLQSRGLEKGDRVAVMMPNILQNPVAVYGILRAGMVVVNVNPLYTPRELEHQLKDSGAKALFVLENFAHVAQQAVPKTAVRHVVVAAMGDLLGLKGHIVNLVVRKVKKLVPAHAIPGSISFKAMLKEGQGVSLKPVGLTAQDIAFLQYTGGTTGVSKGAVLTHANLLANKAQISLWLDAAFNGRKDRPEVLNFICALPLYHIFALTVNSLMGIALGGHNLLIANPRDIPGFVKELSHYQPHIFPGLTTLFNALMNNEEFRKLDLSSLIFVLGGGMAVQRPVAERWVSVVGCPITEGYGLSETSPVATVNRLDAAEFSGTIGLPISSTEIDIRDEDGNSLPTGEVGEICIRGPQVMAGYWQRPDETAKAITADGFFRSGDMGFMDERGYTKIVDRKKDMILVSGFNVYPNEVEEVAASHPGVLECAAIGVPDEHSGETVKLFVVKKDQSLTEAELKAFCAKNLTNYKRPKIIEFRTDLPKSNVGKILRRELRNLN

SEQ ID NO: 28112 - DNA, 1641 bp, Pyrobaculum aerophilum str. IM2
  CDS (1)..(1641): transl_table=11
atggaaaaataccaactcactttaaataacatatggaagtatgttaaagaagtatttggagatgttgaagtggcctatctgccgccgcacggcaataacatacgatctacttatggacgcgaatacgagcgcacgctccgcctagccgatagcctaaggcagttgggaataggcccaggcgataaagtggcgacgatggactggaacactatatggcattttgaattatactgggccgtccccggaatgggcgctgtgttacacccgcttaatgtgaggctggcgcctgaggaccttgtctatattgtaaatcacgcgcaagataaggcgttaatttaccacagagactttgccccattagtggagaagttaaagcctcatttaaagtccgtcaaggtgtatattcaaatttccgacggccagggagccgccacaagagatccggagattgaggacgtgataagacagggggagccaaagccattccccgagattagtgaagactccgttgccacaattggatatactagcggaactactggaaggcccaagggggcgtacttcacacacagagcgttaactttacacacgcttgtcagcgccgtcgcttttgctggctatagaggttttgccaggcctgagtgcgccgaacatctctgtacttttctacaattagtccctatgttccacgtacacggatggggaactccctggacttttgcgttattaggctggcggcaggtttaccccggccgctttgatcccaaccatgtggttaaacttatagcagaagagaaagtgaagagcctagccggcgtgcccacaatgttatatatgttactcacagcgccagacctccataaatatatagagaaaatcagagaaataaggccgattttcactgttggcggcgctgccttgcctaaagaacttgccagaaaggcctcggaggcgggcttcatacccagggtgggatacggcatgacggaaacagcgccaatattaaccctcggcttcttcagacatacagaagagatgcccagggatctcgatgagtactacagcctcctcactgccactggtcttcctattcctcttgttgatttaatggttgtggatgagaatttaaaccccgtgcctcgtgatgggaaaagtattggggagattgttgttagagctccttgggtcacccctgaatatctcggggatttagaaaaaactaaagaggcttggcgaggggggtggtttcatactggagacgtggctgtgtggcttccagacggccgcgtgagaattgtagacagggctaaagacgtgataaaatctgggggcgagtggatatcttctctccaattagaagatttaatttccactcacccggcagtggcgcaagtcgccgtaataggagtaccccatgagaaatggggcgagaggccagtggcagtggtggtattaaaaccaggggcaacagccacagaacaagacataattaaacaccttgagaaattcgtagaggcggggaaaataccaaaatggtggctaccagataaaataatatttacaaatcaactgcccctcacaggcacaggaaaaatagacaagaaaatactaaaggaacaatataaagatgtgttaagatga

SEQ ID NO: 28113 - protein, 546 aa, Pyrobaculum aerophilum str. IM2
MEKYQLTLNNIWKYVKEVFGDVEVAYLPPHGNNIRSTYGREYERTLRLADSLRQLGIGPGDKVATMDWNTIWHFELYWAVPGMGAVLHPLNVRLAPEDLVYIVNHAQDKALIYHRDFAPLVEKLKPHLKSVKVYIQISDGQGAATRDPEIEDVIRQGEPKPFPEISEDSVATIGYTSGTTGRPKGAYFTHRALTLHTLVSAVAFAGYRGFARPECAEHLCTFLQLVPMFHVHGWGTPWTFALLGWRQVYPGRFDPNHVVKLIAEEKVKSLAGVPTMLYMLLTAPDLHKYIEKIREIRPIFTVGGAALPKELARKASEAGFIPRVGYGMTETAPILTLGFFRHTEEMPRDLDEYYSLLTATGLPIPLVDLMVVDENLNPVPRDGKSIGEIVVRAPWVTPEYLGDLEKTKEAWRGGWFHTGDVAVWLPDGRVRIVDRAKDVIKSGGEWISSLQLEDLISTHPAVAQVAVIGVPHEKWGERPVAVVVLKPGATATEQDIIKHLEKFVEAGKIPKWWLPDKIIFTNQLPLTGTGKIDKKILKEQYKDVLR

SEQ ID NO: 28114 - DNA, 1641 bp, Arabidopsis thaliana
  CDS (1)..(1641)
atggcttcagtgaattctcgaagtggtttctgcaactcaaactcaacattctacagcaaacgaacaccaatcccactcccgccaaatccatcactcgacgtcactactttcatttcttcacaagctcatcgtggccgtatcgccttcatcgacgcttccacaggtcaaaacctcaccttcaccgagctatggcgtgccgtggaatccgtcgccgattgtctctccgagatagggattcgcaaaggccacgtcgtcctcctcctctccccaaactcaattttattccccgtcgtttgtctctccgtcatgtcactaggcgcaatcatcaccaccacgaatccactcaacacttcaaacgagatcgctaaacagattaaggattcaaatccagtcctcgccttcaccacatcgcagcttctcccgaaaatctccgccgccgcaaagaagctcccgatcgtgcttatggacgaggaacgagttgactcagtgggtgatgtgagaagattggtggagatgatgaagaaggaaccgagtgggaaccgagtcaaggagcgagttgaccaggatgatacggcgactttgctttactcttcaggaaccacgggaatgagcaaaggagtgatctcgtctcaccgtaacttaatcgcgatggttcaaaccatcgtgaatcgatttggatctgatgatggagagcaacgattcatctgcactgttcctatgtttcacatctacggtttagctgcgttcgctactggattactcgcttacggatctacgatcatcgttctctctaaattcgagatgcacgagatgatgtcagcgattggcaagtatcaagccacgtctttgcctctcgtgcctccgattcttgtggcgatggttaacggtgcagatcagattaaggctaagtatgatttgagctctatgcatactgttttatgcggcggagctccgttgagtaaggaagtgactgaaggattcgcggagaagtatccgacggttaagattttacaaggttatgggttgactgagtcaacgggtataggagcttctacggatactgttgaggaaagtcggagatacggtaccgctgggaaattgtcggcaagtatggaagggaggattgttgatccggttactggtcagattcttggaccgaaacaaaccggtgagctttggctcaagggtccttccataatgaaaggttatttcagcaatgaggaagctacgagttcgactcttgattctgaaggatggttaagaactggagatctttgctatatcgatgaagatggattcatattcgtggttgatcggttaaaggaactgatcaagtacaagggttatcaggttgctccagctgagctagaggctttgttgcttactcatcctgaaatcactgatgctgcagtgatcccgtttccggacaaagaagtggggcaatttccaatggcatacgtcgtaaggaaaactgggagcagcttatcagagaagacaataatggagtttgtagcgaaacaagtagcaccatacaagaggatacgaaaagttgctttcgtatcttcaataccaaagaacccttcaggcaagattctacgcaaagatctcatcaagatagcaacttccaactccaagctttga

SEQ ID NO: 28115 - protein, 546 aa, Arabidopsis thaliana
MASVNSRSGFCNSNSTFYSKRTPIPLPPNPSLDVTTFISSQAHRGRIAFIDASTGQNLTFTELWRAVESVADCLSEIGIRKGHVVLLLSPNSILFPVVCLSVMSLGAIITTTNPLNTSNEIAKQIKDSNPVLAFTTSQLLPKISAAAKKLPIVLMDEERVDSVGDVRRLVEMMKKEPSGNRVKERVDQDDTATLLYSSGTTGMSKGVISSHRNLIAMVQTIVNRFGSDDGEQRFICTVPMFHIYGLAAFATGLLAYGSTIIVLSKFEMHEMMSAIGKYQATSLPLVPPILVAMVNGADQIKAKYDLSSMHTVLCGGAPLSKEVTEGFAEKYPTVKILQGYGLTESTGIGASTDTVEESRRYGTAGKLSASMEGRIVDPVTGQILGPKQTGELWLKGPSIMKGYFSNEEATSSTLDSEGWLRTGDLCYIDEDGFIFVVDRLKELIKYKGYQVAPAELEALLLTHPEITDAAVIPFPDKEVGQFPMAYVVRKTGSSLSEKTIMEFVAKQVAPYKRIRKVAFVSSIPKNPSGKILRKDLIKIATSNSKL

SEQ ID NO: 28116 - DNA, 1671 bp, Arabidopsis thaliana
  CDS (1)..(1671)
atgaaaatggagggaactatcaaatctccggccaactacgttcctctcactccgatcagcttcctcgatagatctgctgtcgtctacgctgacagagtctccatcgtttatggctccgtcaagtacacgtggcgccagactcgtgaccgctgcgtcagaatcgcctccgctctctcccagctcggaatctctaccggagatgtggtttcagtgttggctccaaacgttccagctatggttgaattgcattttggtgttcctatggctggagctttgctctgtacactcaacattcgtcatgattcatcacttgttgctgtcttgcttagacattcagggacaaaagtgatttttgcagatcatcagtttctccaaatagctgaaggagcttgtgaaatcctctcaaataaaggtgacaaggtcccgattttggtcttgatcccagagcctcttactcaatctgtttcaaggaagaagagatctgaggaaatgatggaatacgaagatgttgtagcgatggggaaatcggacttcgaggttatacgaccaacagatgagtgtgatgctatatctgttaattacacatcaggtaccacttcaagccccaaaggtgttgtttatagtcacagaggtgcttatttgaattctctggctgcggttttactcaacgaaatgcactcctcgcctacttatctatggactaatcccatgtttcactgcaatggctggtgcttattgtggggtgttactgctattggtgggactaatatatgtttgaggaatgttacggccaaggctatatttgataatatttcccagcataaggtgactcatatgggaggtgcgccgacgatattgaatatgatcatcaatgcgcctgaatctgagcagaaaccgcttcccgggaaggtgtcttttataaccggtgctgcaccgccaccagctcatgtgattttcaagatggaagagttggggttttctatgtttcattcctatgggttaactgaaacttatggaccaggcacaatctgtacatggaagcctgagtgggactctttgcctagagaagaacaggcgaaaatgaaagctcgacaaggcgtgaatcatttagggctcgaggaaatacaagttaaagaccctgtaaccatgagaactttgccagctgatggtgtgactatgggtgaagttgtcttcagaggaaacacggtgatgaatggttacttaaagaaccctgaagcaaccaaggaagcttttaaaggaggttggttttggagtggcgacttaggtgttaaacaccctgacggatacatagagctgaaagacagatcgaaagacattataatctctggaggagaaaacattagctcgattgaagtcgagtctactctgttcactcacccttgtgttcttgaagcagctgtagttgcgaggcctgatgagtattggggtgagactgcttgtgcatttgtgaaacttaaagacgggtctaaggccagtgcggaggagcttattagctattgcagggaccggcttccacattatatggctccgaggagtattgtgtttgaggatcttcctaaaacatcgactggaaaagtccagaagtttgttctgaggaccaaggctaaggctttggtaagcttatcaaagaaaggcagaagcaagttatga

SEQ ID NO: 28117 - protein, 556 aa, Arabidopsis thaliana
MKMEGTIKSPANYVPLTPISFLDRSAVVYADRVSIVYGSVKYTWRQTRDRCVRIASALSQLGISTGDVVSVLAPNVPAMVELHFGVPMAGALLCTLNIRHDSSLVAVLLRHSGTKVIFADHQFLQIAEGACEILSNKGDKVPILVLIPEPLTQSVSRKKRSEEMMEYEDVVAMGKSDFEVIRPTDECDAISVNYTSGTTSSPKGVVYSHRGAYLNSLAAVLLNEMHSSPTYLWTNPMFHCNGWCLLWGVTAIGGTNICLRNVTAKAIFDNISQHKVTHMGGAPTILNMIINAPESEQKPLPGKVSFITGAAPPPAHVIFKMEELGFSMFHSYGLTETYGPGTICTWKPEWDSLPREEQAKMKARQGVNHLGLEEIQVKDPVTMRTLPADGVTMGEVVFRGNTVMNGYLKNPEATKEAFKGGWFWSGDLGVKHPDGYIELKDRSKDIIISGGENISSIEVESTLFTHPCVLEAAVVARPDEYWGETACAFVKLKDGSKASAEELISYCRDRLPHYMAPRSIVFEDLPKTSTGKVQKFVLRTKAKALVSLSKKGRSKL

SEQ ID NO: 28118 - DNA, 1794 bp, Drosophila melanogaster
  CDS (1)..(1794)
atgaacccagccgctcaactgctgcgcatgcgcagcgctaccgcatttggtagcgccgcaacgcgctccatcacgacgaaccggcgccagcggaccaccagtaccgccagcgcccagcgggagcggacgcagagcgtcagcgagacggacaagtttctgcactacagccccgaggacggctactacaagacctcgccctttgaccccgtcaccattcccaacgtaccgctgcatgagtacgtgtggcgcgacttcaaaaagtgggagcgacgcactgcagcggtttgtgtgatcaccgatcggcagtacactttcgctcaaatgcgtgatgccagcgccgcttttgccgttcgtctgcagaccaaattcaatctccaaaagcccgacgttttggccatctgtctgccgaatcttcccgagtatcccattgccacattgggcgccattgaggcgggactgacggtgaccacagtgaatcccgtctacacgccggatgagatcgccaggcaattgacctttagcggagccaagttcctggtgggaacggtatccggatttgccacactaagccaggccagcaaactggtgggcaggcaaatacccatcgccgtggtgcgtaccagtgccgaggaggccctgcccgagggtgccatcgatttcagcgagctgacgagcacccagaatgtgcgttacgaggatctgaaagcgcccaaagaagcctccgccgacgatatggtcttcctgcccttctcctccggcaccactggtctgcccaagggtgtgatgctatcgcacaacaacatcactagcaattgcgagcaggtgcaggcctccctgccactggatctcatgggtccgcagaacacgttgccgggcgtcctgcccttctttcacatctacggcctcaccgtggtgatgctctcgaaactgggacagggctgccgactggccaccatgccgtgctttaagccggatgacttcatgaggtcgctggacaagtaccagggcagcatcctcaacttggtgcccccaattgccctctttatgattaaccatcccaagctgacgcaggaaacagcgccccacttgaaggtggtgatgagtggagcggccccaattggtcagcacgatgtggagcgcttcctgaacaagttcccgaacactgtcttcaagcagggctatggcatgacagaggcttctcccgtggttttgctaacaccggagggcaacaaggtgtacgcctcgaccggtgtgctgccggccagcacggaggccaagatcgttccactggatggaagcgatgccaagggcgttggtccgcgcaccactggcgagctgtgcgttcgtggtccccaggtgatggccggttatttgaacaacgatgaggccaatcaggtcaccttctatccgggcaactggctgcgcagtggcgacgtcgccttctacgacgaggacggtctcttctatatcacggaccgcatgaaggagctgattaaggtgaagggtttccaagtgccacccgccgaattggaggcagtgctgcgtgatcaccccaagattctggaggcggccgtctttggtattccccacgaattcaacggcgaggcaccacgcgccattgtcgtcctgcgtcagggggagaaagccagcgccgaggagatctccgcctacgtggccgaacgggtggcccactacaagaagcttgagggcggagtgatctttgtggacgaggtgccaaagaatcccaccggcaagatcctgcgccgcgagctcaaggagaagttctccgattaa

SEQ ID NO: 28119 - protein, 597 aa, Drosophila melanogaster
MNPAAQLLRMRSATAFGSAATRSITTNRRQRTTSTASAQRERTQSVSETDKFLHYSPEDGYYKTSPFDPVTIPNVPLHEYVWRDFKKWERRTAAVCVITDRQYTFAQMRDASAAFAVRLQTKFNLQKPDVLAICLPNLPEYPIATLGAIEAGLTVTTVNPVYTPDEIARQLTFSGAKFLVGTVSGFATLSQASKLVGRQIPIAVVRTSAEEALPEGAIDFSELTSTQNVRYEDLKAPKEASADDMVFLPFSSGTTGLPKGVMLSHNNITSNCEQVQASLPLDLMGPQNTLPGVLPFFHIYGLTVVMLSKLGQGCRLATMPCFKPDDFMRSLDKYQGSILNLVPPIALFMINHPKLTQETAPHLKVVMSGAAPIGQHDVERFLNKFPNTVFKQGYGMTEASPVVLLTPEGNKVYASTGVLPASTEAKIVPLDGSDAKGVGPRTTGELCVRGPQVMAGYLNNDEANQVTFYPGNWLRSGDVAFYDEDGLFYITDRMKELIKVKGFQVPPAELEAVLRDHPKILEAAVFGIPHEFNGEAPRAIVVLRQGEKASAEEISAYVAERVAHYKKLEGGVIFVDEVPKNPTGKILRRELKEKFSD

SEQ ID NO: 28120 - DNA, 1899 bp, Encephalitozoon cuniculi GB-M1
  CDS (1)..(1899)
atggacagaagcgagtatgagggattgtacaagagatctattgaggataaagagggtttttggggagagcaagcaaaggtgcttttgaagtgggacaggatgtttgacagggtttacaacaatgactttgagaactcaaggtggttcgaaggaggtatgttgaatgcatgctataattgcgttgatagacatgcggcctgcagcccggacaaagtcgcggttatttatgagggaaacgatggggagtcggtctactacacattcaaagacgtccttgatgaagttataaggatctgtaccatacttaaggacgaaggtcttgagaagggagatacggttgctatgtatatggcaatgtccccgtatgcagtgttttctgcacttgcatgtgctaggcttggtcttgtgcataatgcaatcttcggaggatttagtgcaagcagcgtggctctacggcttaacgactcgaatgccaagcttttaatagtccaggacgtcgttgcaaggcaagactccaccatgaacttccttgagaacacaagggtagcgctcaagggaaaatcaattcctgttctagtcttcgacacatttctggacgagagaaagatcttagattcactggatgggattggaggaaggattctgatatggtcaaaggttttgaagagggagaatgaattcattccctgtgtctcggtcaatgcagaggacagacttttctatctgtacacaagtggaagtacaggaaagccaaaaggaattatccacacggccggtgggtatctggtgtatgcgatgcttacttccaaaatatgctttgatcttcaagaaaacgatgtttttgcctgtacggcagacataggatggatcacagggcatacatatgtcatttacgggccgctgttgaatggaatcacgaccgttgtatttggaggaacgcccttctatccttcgtattacaggctcttcaagatggtcgaaaagtatagaataactcagttgtacactgcgcctacagttataaggatgctgaggaagcatttttccacaacaccccttgatcacaactatgacctgtcttccctgagaattctcggatctgttggagagccgataaataagaatgcccatctgtggtttagtgagaacttcaacggctgtcctgttattgatacatattggcaaactgaatctggtgggattctgattgcgcctattccgcacgccgtagacataaagcctgagtgtgcctgtcttccatttttaggccaagaggttgttattgcggatccgagctctagaagcgactgtgttgtcgaagcgaaggcctatgagttagggcgtgttcttctcaagggttcctggcctgggataaccagagggattctaggaaacccggagagattcagaaagggatattttttctacaagggattctacttcacgggcgacgaaggatataaagattctgatggacatgtgtggatcagaggaagagctgacgacgtgataaatgtctctggacacaggattagcacggcagaggtcgaaggcgcggcatgtacggatccgcatatagctgaggcagcagctgttgcagaaagcgacgatattactgggcaggccctttgcatttttgtggtcttgaaagacaggaaaacatctcatgaaggagtaagagcgtctctgagaacaactctgagaagcaagatcggaaagtttgttaatgcaaaaagaatctacttctgtgaaggtattcccaagactgcaactggaaagatcatgagaagagtcctgaaaagtatcctggccggagatccgcctggagatgtatcgacttgtaccaatgcagacattattgagggcctgagagaaattgctggatcggaagtaaattaa

SEQ ID NO: 28121 - protein, 632 aa, Encephalitozoon cuniculi GB-M1
MDRSEYEGLYKRSIEDKEGFWGEQAKVLLKWDRMFDRVYNNDFENSRWFEGGMLNACYNCVDRHAACSPDKVAVIYEGNDGESVYYTFKDVLDEVIRICTILKDEGLEKGDTVAMYMAMSPYAVFSALACARLGLVHNAIFGGFSASSVALRLNDSNAKLLIVQDVVARQDSTMNFLENTRVALKGKSIPVLVFDTFLDERKILDSLDGIGGRILIWSKVLKRENEFIPCVSVNAEDRLFYLYTSGSTGKPKGIIHTAGGYLVYAMLTSKICFDLQENDVFACTADIGWITGHTYVIYGPLLNGITTVVFGGTPFYPSYYRLFKMVEKYRITQLYTAPTVIRMLRKHFSTTPLDHNYDLSSLRILGSVGEPINKNAHLWFSENFNGCPVIDTYWQTESGGILIAPIPHAVDIKPECACLPFLGQEVVIADPSSRSDCVVEAKAYELGRVLLKGSWPGITRGILGNPERFRKGYFFYKGFYFTGDEGYKDSDGHVWIRGRADDVINVSGHRISTAEVEGAACTDPHIAEAAAVAESDDITGQALCIFVVLKDRKTSHEGVRASLRTTLRSKIGKFVNAKRIYFCEGIPKTATGKIMRRVLKSILAGDPPGDVSTCTNADIIEGLREIAGSEVN

SEQ ID NO: 28122 - DNA, 1539 bp, Corynebacterium glutamicum ATCC 13032
  CDS (1)..(1539): transl_table=11
atgaaagtgaacctcggaataggaagctacccacgacgcagggcaactgttcgaccagagtccactgcaatcgaattcgaaggcaccagcatcacctacggagaattcagcaaacgagtcaatcggcttggacatgctcttctagacctcggcgttgcgcaccaagatcgagtagcttatgtcggattcaaccaccctgccctgctagaagtgttcttttcaacgaacctcattggggcaacacccgtgcttgttaaccctcgcctatcggcaaacgaaatcgattacatcatccaagacagcggtgcgagcatcgtgttttacggaatcgacctcatcgagcacgccacttacctccaagaactccatccagagatcatcatggtggccgttgaaggcgatgagggtccaggtttgcgtcgaaaagcgcttattgaagcggcgagcgacgccgacatcgacctagaagtcagcgatgatgacatcgcgctgctcatgtacacctccggaaccactggccgcccaaagggcgccatgttatcccaccgaaacctcttctttaactacttcaatgccctgctcagccaggaaattgaacaaggcgcggtacttttatccactgcgccgttattccacatcgcgggcctcaacatgaccaccatcccggtgatgatgaagggcggaaaggtgatcatccaccgcgaattccgggcagagcacgtcctcgacgaaatcgaacgctccaaggtatccgaatccttcatggtgccagcgatgatcgacatgttgtccaaccacccatcatttgccgaacgcgacctttcttcccttcgcgccatcatggtgggcggctctccccttagcgaacgtgcgctgcgaatctggcaaggacgcgacgtaaaaattgtccaaggcttcggcatgacagaaaccgcaccgggcgcctgtatcctcgaggcaacagacacaagcacacaccttggaaccgcaggtcgagcccacttcttcaccgacatcaaactagtggacccgaaaaccggcgaagaagtccccaccggagaggccggcgaagttctcatccgcggaccacatgtgatgaccggatactggaaccgaccagaagacaccgccagcgcactacaaaatggctggtaccactccggagatatcgccatcaaagatgaagacggctactacaccatcaaagaccgcatcaaagacatgtacatctccggcggcgaaaacatttaccccgcagaagtcgaacaagcactccaggaactggaagcagtccttgatgccgcagtcatcggagtccccgatgaacgatggggcgaaactggcatcgcctttgtctccatccgagaaagctacctgaccaacccaccaaccggaccggaactacgagaactactaggcagtgtcctagccagatacaaacttccacgagaaatccacatcatcgaagaactcccccgcaacgccacaggcaaaatccaaaagaacatcctgcgagacttcaccatccccgtttcataa

SEQ ID NO: 28123 - protein, 512 aa, Corynebacterium glutamicum ATCC 13032
MKVNLGIGSYPRRRATVRPESTAIEFEGTSITYGEFSKRVNRLGHALLDLGVAHQDRVAYVGFNHPALLEVFFSTNLIGATPVLVNPRLSANEIDYIIQDSGASIVFYGIDLIEHATYLQELHPEIIMVAVEGDEGPGLRRKALIEAASDADIDLEVSDDDIALLMYTSGTTGRPKGAMLSHRNLFFNYFNALLSQEIEQGAVLLSTAPLFHIAGLNMTTIPVMMKGGKVIIHREFRAEHVLDEIERSKVSESFMVPAMIDMLSNHPSFAERDLSSLRAIMVGGSPLSERALRIWQGRDVKIVQGFGMTETAPGACILEATDTSTHLGTAGRAHFFTDIKLVDPKTGEEVPTGEAGEVLIRGPHVMTGYWNRPEDTASALQNGWYHSGDIAIKDEDGYYTIKDRIKDMYISGGENIYPAEVEQALQELEAVLDAAVIGVPDERWGETGIAFVSIRESYLTNPPTGPELRELLGSVLARYKLPREIHIIEELPRNATGKIQKNILRDFTIPVS

SEQ ID NO: 28124 - DNA, 1707 bp, Corynebacterium glutamicum ATCC 13032
  CDS (1)..(1707): transl_table=11
atgtcagcatacgaaaccaaagaatggctccagcactacccagagtggacgccacactcgctggaatatggcgacaccaccctgctggacgtttacgacaacaacctggccatcaacgcagacaagccagccacctactttttcggtcgttcacaaacctacggtgaactggacaaagaagtccgcaaaactgccgctggcctgcgcgcactaggtgtccgccccggcgatcacgtagcgattatcctccccaactgcccacagcacatcgcagctttctacgcagtgctgaaactcggcgcagtagtcattgagcacaacccgctctacaccgcccacgaactgctcgaacccttcaaagaccacggtgcccgcgttgccatcgtctgggacaaagcctcccccaccgtcgaacagctacgtggacagacccagttggaaaccatcgtgtcggtcaacatgatcaacgcgatgccaccactccagcgcctagcacttcggctcccaatccctgcactgcgcaagagccgcgaatccctctccggcgcagcccccaacaccgttccttttgaaaccctgaccagcgcagcaatgggcggcgacggcgacgacgtagtttcagaacccaccgtgaccaaagaatccgtcgcgctgatcctctacacctccggcaccaccggacgccccaagggtgcccagctcacccacggaaacctgttctccaatctcctccaaggaaagcactgggttccaggtctcggagacaaaccagaacgcatgcttgcagccctaccaatgttccacgcatacggtctgaccatggtcggcacactgtccgtgttcatcggtggcgaaatggtgctacttcccaccccacgcatcgacctgatcatgaacgtaatgaaaaagcacaccccaacctggctaccaggcgtgcccaccctttacgaaaaaatcgtcgacgcctccgaaaaagaaggaatccccatcaagggagtccgcaacgccttctccggtgcatccacactctcccagcgcaccgttgaacgctgggaaaagcacaccggcggacgcctcgtcgaaggctacggcctcaccgaaacctcccccatcatcgtgggtaaccccatgagcgatcaccgacgccaaggctacgtaggaatccccttccccgacaccatcgtgcgcatcgcaaacccagaaaacctcgacgaaaccatgcccgacggcagcgaaggcgaagtcctagtcaagggcccacaggtgttcaagggttacctcaaccaggaagaagccaccaagaacagcttccacggcgagtggtaccgcaccggcgacgtcggagtgatggaagaagacgggttcatccgcctagttgctcgcatcaaggaagtcatcatcactggcggtttcaacgtgtacccagctgaggttgaagaagtcctcgcagagcacccagacattgaagattccgcagtcgttggtatcccgcgtgaagacggctccgaaaacgtcgttgctgccatcactttggtggaaggtgcagcgctggatccggatggcctgaaggaattcgcccgcaagaacctcacccgctacaaggttccgcgcactttctaccactttgaggagatgccgcgggatcagatgggcaagattaggcgtcgtgaagtgcaggcggagttgttgaagaagctcggcaagtag

SEQ ID NO: 28125 - protein, 568 aa, Corynebacterium glutamicum ATCC 13032
MSAYETKEWLQHYPEWTPHSLEYGDTTLLDVYDNNLAINADKPATYFFGRSQTYGELDKEVRKTAAGLRALGVRPGDHVAIILPNCPQHIAAFYAVLKLGAVVIEHNPLYTAHELLEPFKDHGARVAIVWDKASPTVEQLRGQTQLETIVSVNMINAMPPLQRLALRLPIPALRKSRESLSGAAPNTVPFETLTSAAMGGDGDDVVSEPTVTKESVALILYTSGTTGRPKGAQLTHGNLFSNLLQGKHWVPGLGDKPERMLAALPMFHAYGLTMVGTLSVFIGGEMVLLPTPRIDLIMNVMKKHTPTWLPGVPTLYEKIVDASEKEGIPIKGVRNAFSGASTLSQRTVERWEKHTGGRLVEGYGLTETSPIIVGNPMSDHRRQGYVGIPFPDTIVRIANPENLDETMPDGSEGEVLVKGPQVFKGYLNQEEATKNSFHGEWYRTGDVGVMEEDGFIRLVARIKEVIITGGFNVYPAEVEEVLAEHPDIEDSAVVGIPREDGSENVVAAITLVEGAALDPDGLKEFARKNLTRYKVPRTFYHFEEMPRDQMGKIRRREVQAELLKKLGK

SEQ ID NO: 28126 - DNA, 1758 bp, Corynebacterium glutamicum ATCC 13032
  CDS (1)..(1758): transl_table=11
gtgtcgcatgccccggctattgttgattgcatgctcagcacgatgcaggacgtcccactgtcattaaccagaatcctcgagtacgggtccactgttcacggtgatactttgatcaccacgtggggcggtgccgatggcattgaacaagcacagcaaacttttagtgctgtgggggctagagctgcggctttggctcatgcgctgcatgattctttaggtattactggggatcagcgagtggcgtcgatgctctataactgcgcggaacacatggaaactatgtttgcagtcgcatgcatgggtgccgtgtttaatccgctgaacaagcagttgatgaatgatcagattgtgttcattctcaatcactctgaagctgaagtggttatcgctgatccgcgcatggctgaacaattgggtgagatcttaaaagaaacaccaaaagttcgtgccgtggtgtttattggaccgaatgatttctctagcgcggcggcccacatgccggagggaatgaagctgtattcctatgaagcgctccttgacggccgttccactgtttacaactggcccgagcaggatgaacgcactgctgctgcaatttgctattccaccggtacatcgggaccgccgaagggtgtggtgtattcccaccgctcgctttatttacagtcgttgagcttgcgcaccacggattccctcgcagtggaacacggcgaaacgttcctgtgctgtgtgccgatttaccacgtcctcagctggggcgtgccgatcgcagcgtttatgtccggcactcccctggtgcttcctggaccggatctttctgcgccgacattggcaaagatcatttccaccacgctgcctcgcgtggcgcatggcgtgcctactctctggattcagctgatggttcactacctgaaaaatcccccagagcgtatgtctctgcgtgagctatacgtgggcggttctgcggtgcctccaatcgtgatcaccatgtgggagcagcgctatggcgtggatgttgtccacgtgtggggtatgacggaaacctccaccgtgggtactgtgtctcgcccaccatcaggtgtttctggtgaaagccggtggaattatcgagtctcccagggccgattccccgcctccctgcagtaccgcattgtcaacgacggccaggtcatggcgtccaccgaccgcaacgagggcgagattcaggtccgcggtccgtgggtgactgcaagttacttccaccccgatgtggaaaaagaaggtggcaccgcctcaacattccgcgaccatgacgttgaagaggaaaacgatgagctcttcaccgccgacggctggctgcgcaccggggacgttggatctgtcaccagcgatggattcctcaccatccaagaccgcgcccgcgatgtcatccgttctggcggcgagtggatttactccgctcagctggaaaacctcatcgtggctacggaagaggttgtcgaatgcgccgtcattggcttccccgatgacaagtgggtggaacgtcccctcgcagtcaccatgctctaccccggcattgaacgcacccgggaaaccgccgagcgcctccgcgatcaacttcgcgaccgcctacccaactggatgctgccagaatattggacatttgttgatgaggtggataaaacctccgtcggtaaatatgacaagaaggacctccgcaaccacctgcgcaacggcgatttcgaagtaattaagcttaaagggccaggtgaaaaataa

SEQ ID NO: 28127 - protein, 585 aa, Corynebacterium glutamicum ATCC 13032
MSHAPAIVDCMLSTMQDVPLSLTRILEYGSTVHGDTLITTWGGADGIEQAQQTFSAVGARAAALAHALHDSLGITGDQRVASMLYNCAEHMETMFAVACMGAVFNPLNKQLMNDQIVFILNHSEAEVVIADPRMAEQLGEILKETPKVRAVVFIGPNDFSSAAAHMPEGMKLYSYEALLDGRSTVYNWPEQDERTAAAICYSTGTSGPPKGVVYSHRSLYLQSLSLRTTDSLAVEHGETFLCCVPIYHVLSWGVPIAAFMSGTPLVLPGPDLSAPTLAKIISTTLPRVAHGVPTLWIQLMVHYLKNPPERMSLRELYVGGSAVPPIVITMWEQRYGVDVVHVWGMTETSTVGTVSRPPSGVSGESRWNYRVSQGRFPASLQYRIVNDGQVMASTDRNEGEIQVRGPWVTASYFHPDVEKEGGTASTFRDHDVEEENDELFTADGWLRTGDVGSVTSDGFLTIQDRARDVIRSGGEWIYSAQLENLIVATEEVVECAVIGFPDDKWVERPLAVTMLYPGIERTRETAERLRDQLRDRLPNWMLPEYWTFVDEVDKTSVGKYDKKDLRNHLRNGDFEVIKLKGPGEK

SEQ ID NO: 28128 - DNA, 1782 bp, Drosophila melanogaster
  CDS (1)..(1782)
atgaacagcaagctgcagaccatctcccgatacatgctcaggcagaaatgtgccttcaactcgatgcgcagcatttccacctcgatgcccagcttgatcagccataagcatcatattggtaaggatcccttggtatatcgcaccattggccagcagttggagctatctgcttcgaattttggggatgtggaggcgattgtctcctgtcacgagggcaagcggtacagcttcaaaagtttgctacaggaagcggatgcgctggcggcgggtttccggaaattgggcctgcagccaggtgatgccgttggtctgtgggcaccgaactacttgcactggtacttgggcatgatgggagcagctcgagcgggtctcacctcggtgggtttgaatccagcttaccagggacccgaaatagcctactgtctgaataaggtcaatgtgaaggccatcattgcgccggagaccttcaagacgcagaactactatgagattttgagagatatctgcccggaaatctcagatgcggatactggcaagatccggagtgagaagtttccgcacctgcgatccgtaatcattgatagcaacgatagcctgaagggtgccctgcgcttcgatgacttcctggacctggccagcaaatcggagcgcgaagaggtggccaaaatgcagaagagcattctgcccgagtctgcgtgcaatattcagttcacatcgggaaccactggcaatcccaaggctgcctgtcttacccatcacaatttcgtcaacaatggcatccatgtgggcaatcgcaacgaactggagggcgagaggatctgtgttcaggtgcccatgttccatgccttcggtgtgatcatctccatcatggctgctctgaccaaaggtgccaccatggtcctacccgctgccggtttcagtcccaaggactcgctgcaagccatcgtcaatgaaaagtgttcggtgatccatggcacaccaaccatgtatgtggatttggtcaacacgcaaaagaagctacaggtgccgctgggcaggattaagaaggccgtcaccggaggtgccattgtatcgccgcagctgatcaaggatgtgagacaggttctcaacgtggaagcggtgcatagtgtctatggcctgacggaaaccacagctgtgatcttccaatccttgcccggcgatagcagtgatgttgtcctcaactcagttggccatctgacggatcacatcgaagccaaggtggtggatgccgagggcaggtgtgtgccatttggacagcccggagagctgtgcgtccgcggatataccacaatgctgggctaccacgatgatgaggagaaaacaaaggaaaccatcggtaatgataggtggttgcgcacgggcgatcagtttgtcctggaggccaatggatatggacggattgtgggtcgcctaaaggagatgctcatccgtggcggcgaaaatatattccccaaagagatcgaagactttctaaacgcccatccacaggtcattgaggcgcatgtgattggagtgcctgatgagcgattgggtgaagaagtctgcgcctatgttcgcctggaggagggcgtggaccccgcctccttcaccgcggagaccttaaaggcctatgccaagggcaagctggcccacttcaaggtgcccagatatgtgatccccatagatgcattccctaaaaccacctcgggcaagatccagaaattcaagctagtggaggctttcaaggccaaggaaacagagctaaaagctgccagactatga

SEQ ID NO: 28129 - protein, 593 aa, Drosophila melanogaster
MNSKLQTISRYMLRQKCAFNSMRSISTSMPSLISHKHHIGKDPLVYRTIGQQLELSASNFGDVEAIVSCHEGKRYSFKSLLQEADALAAGFRKLGLQPGDAVGLWAPNYLHWYLGMMGAARAGLTSVGLNPAYQGPEIAYCLNKVNVKAIIAPETFKTQNYYEILRDICPEISDADTGKIRSEKFPHLRSVIIDSNDSLKGALRFDDFLDLASKSEREEVAKMQKSILPESACNIQFTSGTTGNPKAACLTHHNFVNNGIHVGNRNELEGERICVQVPMFHAFGVIISIMAALTKGATMVLPAAGFSPKDSLQAIVNEKCSVIHGTPTMYVDLVNTQKKLQVPLGRIKKAVTGGAIVSPQLIKDVRQVLNVEAVHSVYGLTETTAVIFQSLPGDSSDVVLNSVGHLTDHIEAKVVDAEGRCVPFGQPGELCVRGYTTMLGYHDDEEKTKETIGNDRWLRTGDQFVLEANGYGRIVGRLKEMLIRGGENIFPKEIEDFLNAHPQVIEAHVIGVPDERLGEEVCAYVRLEEGVDPASFTAETLKAYAKGKLAHFKVPRYVIPIDAFPKTTSGKIQKFKLVEAFKAKETELKAARL

SEQ ID NO: 28130 - DNA, 1557 bp, Streptomyces coelicolor A3(2)
  CDS (1)..(1557): transl_table=11
atgaatctcgggcgttacgtacgccggacggcggagcaccacccggacgcggaggcggtggtctgcggccacgtccggttgacgtatgcggaactcgacgaccacagcgaccggctggcggccgcgctcacggggctgggcctgagccgcggcgagcgcgtggcgacgctcgcggccaaccgcgcggagctggtcgtcacggaggtcgccctctacaaggcgggcctgacccgggcgccggtcaacgcccgcctcggcgacggcgaagtcgcccatctgctgcgggagtcggacgcccgcgtcctgctcaccgacgccgcccacctggacacggcgcggcgggcggtgcccggttcgggcgtgaaggccgtcatcggctacgacggccccgccgacctcggccccggctaccaggaactcctcgcggccaccccccgcgaggccgtcgacgtggagtgcgccgaggacgacatcgccgtcctgcacttcacctccggctccaccggcaagctcaaggcagccgtgcagacgtacggcaatcggctggccctgctgcgcaagtcggtgatgaaccaggccactcgggtcgggacgggcgaccggcagatcctcgccggacccgtcacccacgcctccggcatgccgctcatgggcatcttcttcgccggcggatgtgccgtcgtgctgccccgctgggacgccgcggaattcctcgccaccgtggaacgggagcgtgccacccacgcgttcctcgtccccaccatggtcaacacggtcctcgcgctggagaacgcccgcgaccacgacctctccagcctccgccacctgctctacggcgccgcgcccatgtcaccggcccgggtccgggcggcctgggacctcttcggccccgtgctcagccagggctacggatgcggcgagacgacctccggggtgctgttcctctccacggaggaccaccgccgcgccgtcgagggcgacgacgaggaactgctgctgtcctgcggcagaccgctggccgaggccgaggtacggatcgtcgacgacggcggcgagccggtggcggacggcgagatcggcgagatcgcggtccgcgggcccgacgtcgttcccggctaccacaacgagccggaactgaccgcgcggagctttcgcgacggctggttcctcaccggcgacctggcgcggcggcgccgcgacggctacgtcttcatcgtcgaccgcaagaaggacatgatcatctccggcggcttcaacatctacgccgtcgaggtcgagtccgtcctccaccagcatccggacgtcttcgaggccgcggtcgtgggcgtacccgacgagcaatggggcgaggcggtcaaggccgtcgtcgtgccgcgggcgggggtcacgctcgacgcgacggaactgatcgccttctgcgccgagcacctggcgcgcatgaagaagccccgctccgtcgacgtcgtcgccgcgcttccccacaaccccaacggcaagatcgaccgccgcgccatacgcgacacctactggtccggcgccgagcgtcgcgtccactga

SEQ ID NO: 28131 - protein, 518 aa, Streptomyces coelicolor A3(2)
MNLGRYVRRTAEHHPDAEAVVCGHVRLTYAELDDHSDRLAAALTGLGLSRGERVATLAANRAELVVTEVALYKAGLTRAPVNARLGDGEVAHLLRESDARVLLTDAAHLDTARRAVPGSGVKAVIGYDGPADLGPGYQELLAATPREAVDVECAEDDIAVLHFTSGSTGKLKAAVQTYGNRLALLRKSVMNQATRVGTGDRQILAGPVTHASGMPLMGIFFAGGCAVVLPRWDAAEFLATVERERATHAFLVPTMVNTVLALENARDHDLSSLRHLLYGAAPMSPARVRAAWDLFGPVLSQGYGCGETTSGVLFLSTEDHRRAVEGDDEELLLSCGRPLAEAEVRIVDDGGEPVADGEIGEIAVRGPDVVPGYHNEPELTARSFRDGWFLTGDLARRRRDGYVFIVDRKKDMIISGGFNIYAVEVESVLHQHPDVFEAAVVGVPDEQWGEAVKAVVVPRAGVTLDATELIAFCAEHLARMKKPRSVDVVAALPHNPNGKIDRRAIRDTYWSGAERRVH

SEQ ID NO: 28132 - DNA, 1458 bp, Streptomyces coelicolor A3(2)
  CDS (1)..(1458): transl_table=11
gtgtcctctctcttcccggccctctccccggccccgaccggcgccccggccgaccggcccgcgctgcggttcggcgagcgctccctgacctacgcggaactcgccgcggcggcgggcgccacggccgggcggatcggcggcgccggccgggtcgcggtctgggccaccccggcgatggagaccggcgtcgccgtggtggcggcgctgctggccggggtcgccgccgtaccgctcaacccgaagtccggcgacaaggaactcgcgcacatcctctccgacagcgcgccctcgctcgtcctggcgcccccggacgcggaactcccgcccgccctcggggccctggagcgcgtcgacgtcgacgtgcgggcccgcggggcggtccccgaggacggtgccgacgacggcgaccccgcgctcgtcgtctacacctcgggcaccacgggaccgccgaagggcgccgtcatcccccggcgggcgctcgccacgaccctggacgcgctcgccgacgcgtggcagtggaccggcgaggacgtgctggtgcaggggctgccgctgttccacgtgcacgggctggtcctcggcatcctcggcccgctgcgccggggcgggtccgtgcggcacctgggccggttctccaccgagggtgcggcgcgggagctgaacgacggcgcgaccatgctgttcggggtgccgacgatgtaccaccggatcgccgagacgctccccgccgacccggagctggcgaaggcgctcgccggggcccggctgctggtgtcggggtcggccgcgctgccggtgcacgaccacgagcgcatcgccgccgccaccgggcgccgggtgatcgagcggtacggcatgaccgagacgctgatgaacaccagcgtgcgcgccgacggcgagccgcgcgccgggacggtgggcgtgccgctgcccggtgtggagctgcggctggtggaggaggacggcacgccgatcgcggcgctcgacggggagagcgtcggcgagatccaggttcgcggcccgaacctgttcaccgagtacctgaaccgccccgacgccaccgccgccgccttcaccgaggacggcttcttccgcaccggcgacatggcggtgcgcgaccccgacggctatgtccgcatcgtcggccgcaaggccaccgacctgatcaagagcggcggttacaagatcggggccggggagatcgagaacgccctgctcgaacacccggaggtccgggaggccgccgtcaccggcgaacccgaccccgacctcggggaacggatcgtggcctggatcgtcccggccgaccccgccgccccgcccgccctcggcacgctggccgaccacgtcgccgcccggctcgccccgcacaagcggccgcgcgtcgtccggtacctcgacgcggtgccccgcaacgacatggggaagatcatgaagcgggcgctgaaccgtgactga

SEQ ID NO: 28133 - protein, 485 aa, Streptomyces coelicolor A3(2)
MSSLFPALSPAPTGAPADRPALRFGERSLTYAELAAAAGATAGRIGGAGRVAVWATPAMETGVAVVAALLAGVAAVPLNPKSGDKELAHILSDSAPSLVLAPPDAELPPALGALERVDVDVRARGAVPEDGADDGDPALVVYTSGTTGPPKGAVIPRRALATTLDALADAWQWTGEDVLVQGLPLFHVHGLVLGILGPLRRGGSVRHLGRFSTEGAARELNDGATMLFGVPTMYHRIAETLPADPELAKALAGARLLVSGSAALPVHDHERIAAATGRRVIERYGMTETLMNTSVRADGEPRAGTVGVPLPGVELRLVEEDGTPIAALDGESVGEIQVRGPNLFTEYLNRPDATAAAFTEDGFFRTGDMAVRDPDGYVRIVGRKATDLIKSGGYKIGAGEIENALLEHPEVREAAVTGEPDPDLGERIVAWIVPADPAAPPALGTLADHVAARLAPHKRPRVVRYLDAVPRNDMGKIMKRALNRD

SEQ ID NO: 28134 - DNA, 1677 bp, Streptomyces coelicolor A3(2)
  CDS (1)..(1677): transl_table=11
atgtcgccccgggaggacaccgtgctgagcacgatgcaggacgtaccgctgctgatatcgaggatcctgacccacgggtcggccatccacggcagctcgcaggtgaccacctggaccggtgaggacgagccgcaccgccgctccttcgccgagatcggtgcccgcgccgcccagctggcgcacgccctgcgcgaggacctcgccgtcggcgacgacgaacgcgtggcgaccctcatgtggaacaacgccgagcatgtcgaggcctacttcgcgatcccctccatgggcgcggtcctccacaccctcaatctccgcctcccgcccgagcagctggcctggatcgtgaaccacgccgccgaccgggtcgtgctcgccaacggttcgctgctgccgctgctcgccccgctgctgccgcacctgaagacggtcgagcacgtcgtcgtcaccgggccgggcgaccgctcgctgctggacggggccgccgtccaggtgcacgagtacgaggacctgatcgccgggaagccgaccgcctacgactggcccgagctggacgagcgggccgcggccgccatgtgctacacctccggcaccaccggcgaccccaagggcgtggtctacagccaccgctccatctacctgcactccatgcaggtcaacatggcccagtcgatgggcctgaccgaccaggacacgtcgctggtcgtggtcccgcagttccacgtcaacgcctgggggctgccgcacgccaccttcatgaccggcgtgaacatgctgatgccggaccgcttcctgcaacccgcgcccctcgccgcgatgatcgagggcgagcggcccacgcacgccgccgccgtccccaccatctggcagggcctgctggccgagctgacggccaggccccgcgacgtctcctccctcacccaggtcaccatcggcggctcggcctgccccccctccctcatggaggcgttcgacgcgctgggcatgcgggtctgccacgcctggggcatgacggagacctcgccgctcggcaccatcgcccggccgccggcccacgtgatcgggacgccggaggagttcgcctaccgcctcacccaggggcgtttcccggccggcgtcgaggcccggctcaccggtcccggcggcgagcgcctgccctgggacggcgagtccgccggtgagctggaggtgcgcggcaactggatcgccggtgcctactacaacggccccggggccgatccgctgcgtcctgacgacaagttcagcgcggacggctggctgaagaccggtgacgtcggcacgatctcccatgacgggttcctcaccctcaccgaccgggccaaggacgtcatcaagtccggcggcgagtggatctcctcggtcgagctggagaacgcgctgatggcccacccggacgtcgccgaggccgcggtcgtcgccgtaccggacgacaagtggggcgagcgtccgctggccaccgtcgtcctcagggagggcgccagcaccgacttcgccgccctgcgcaccttcctcgccgaggacggcaagatcgccaagtggcagctcccggaacgctggacggtcatcgagacggtgccgaagacgagcgtcggcaagttcgacaagaaggtgctgcgccggcagtacgccgagggcggtctcgacgtcacccggctctga

SEQ ID NO: 28135 - protein, 558 aa, Streptomyces coelicolor A3(2)
MSPREDTVLSTMQDVPLLISRILTHGSAIHGSSQVTTWTGEDEPHRRSFAEIGARAAQLAHALREDLAVGDDERVATLMWNNAEHVEAYFAIPSMGAVLHTLNLRLPPEQLAWIVNHAADRVVLANGSLLPLLAPLLPHLKTVEHVVVTGPGDRSLLDGAAVQVHEYEDLIAGKPTAYDWPELDERAAAAMCYTSGTTGDPKGVVYSHRSIYLHSMQVNMAQSMGLTDQDTSLVVVPQFHVNAWGLPHATFMTGVNMLMPDRFLQPAPLAAMIEGERPTHAAAVPTIWQGLLAELTARPRDVSSLTQVTIGGSACPPSLMEAFDALGMRVCHAWGMTETSPLGTIARPPAHVIGTPEEFAYRLTQGRFPAGVEARLTGPGGERLPWDGESAGELEVRGNWIAGAYYNGPGADPLRPDDKFSADGWLKTGDVGTISHDGFLTLTDRAKDVIKSGGEWISSVELENALMAHPDVAEAAVVAVPDDKWGERPLATVVLREGASTDFAALRTFLAEDGKIAKWQLPERWTVIETVPKTSVGKFDKKVLRRQYAEGGLDVTRL

SEQ ID NO: 28136 - DNA, 1569 bp, Streptomyces coelicolor A3(2)
  CDS (1)..(1569): transl_table=11
gtgttccgcagcgagtacgcagacgtcccgcccgtcgacctgcccatccacgacgccgtgctcggcggggccgccgccttcgggagcaccccggcgctgatcgacggcaccgacggcaccaccctcacctacgagcaggtggaccggttccaccggcgcgtcgccgccgccctcgccgagaccggcgtgcgcaagggcgacgtcctcgccctgcacagccccaacaccgtcgccttccccctggccttctacgccgccacccgcgcgggcgcctccgtcaccacggtgcatccgctcgcgacggcggaggagttcgccaagcagctgaaggacagcgcggcccgctggatcgtcaccgtctcaccgctcctgtccaccgcccgccgggccgccgaactcgcgggcggcgtccaggagatcctggtctgcgacagcgcgcccggtcaccgctccctcgtcgacatgctggcctcgaccgcgcccgaaccgtccgtcgccatcgacccggccgaggacgtcgccgccctgccgtactcctcgggcaccaccggcacccccaagggcgtcatgctcacacaccggcagatcgccaccaacctcgcccagctcgaaccgtcgatgccgtccgcgcccggcgaccgcgtcctcgccgtgctgccgttcttccacatctacggcctgaccgccctgatgaacgccccgctccggctcggcgccaccgtcgtggtcctgccccgcttcgacctggagcagttcctcgccgccatccagaaccaccgcatcaccagcctgtacgtcgccccgccgatcgtcctggccctcgccaaacaccccctggtcgccgactacgacctctcctcgctgaggtacatcgtcagcgccgccgccccgctcgacgcgcgtctcgccgccgcctgctcgcagcggctcggcctgccgcccgtcggccaggcctacggcatgaccgaactgtccccgggcacccacgtcgtccccctggacgcgatggccgacgcgccgcccggcaccgtcggcaggctcatcgcgggcaccgagatgcgcatcgtctccctcaccgacccgggcacggacctccccgccggagagtccggggagatcctcatccgcggcccccagatcatgaagggctacctgggccgccccgacgccaccgccgccatgatcgacgaggagggctggctgcacaccggggacgtcggacacgtcgacgccgacggctggctgttcgtcgtcgaccgcgtcaaggaactgatcaagtacaagggcttccaggtggcccccgccgaactggaggcccacctgctcacccaccccggcgtcgccgacgcggccgtcgtcggcgcctacgacgacgacggcaacgaggtaccgcacgccttcgtcgtccgccagccggccgcacccggcctcgcggagagcgagatcatgatgtacgtcgccgaacgcgtcgccccctacaaacgcgtccgccgggtcaccttcgtcgacgccgtcccccgcgccgcctccggcaagatcctccgccgacagctcagggagccgcgatga

SEQ ID NO: 28137 - protein, 522 aa, Streptomyces coelicolor A3(2)
MFRSEYADVPPVDLPIHDAVLGGAAAFGSTPALIDGTDGTTLTYEQVDRFHRRVAAALAETGVRKGDVLALHSPNTVAFPLAFYAATRAGASVTTVHPLATAEEFAKQLKDSAARWIVTVSPLLSTARRAAELAGGVQEILVCDSAPGHRSLVDMLASTAPEPSVAIDPAEDVAALPYSSGTTGTPKGVMLTHRQIATNLAQLEPSMPSAPGDRVLAVLPFFHIYGLTALMNAPLRLGATVVVLPRFDLEQFLAAIQNHRITSLYVAPPIVLALAKHPLVADYDLSSLRYIVSAAAPLDARLAAACSQRLGLPPVGQAYGMTELSPGTHVVPLDAMADAPPGTVGRLIAGTEMRIVSLTDPGTDLPAGESGEILIRGPQIMKGYLGRPDATAAMIDEEGWLHTGDVGHVDADGWLFVVDRVKELIKYKGFQVAPAELEAHLLTHPGVADAAVVGAYDDDGNEVPHAFVVRQPAAPGLAESEIMMYVAERVAPYKRVRRVTFVDAVPRAASGKILRRQLREPR

SEQ ID NO: 28138 - DNA, 1626 bp, Streptomyces coelicolor A3(2)
  CDS (1)..(1626): transl_table=11
gtgaccgcacccgcgccccagccgtcgtacgcgcacggcaccagcaccaccccgctgctcggcgacaccgtcggcgccaacctcggccgcgcgatcgccgcccacccggaccgcgaggccctcgtcgacgtcccgtccggacggcgctggacctacgccgagttcggcgccgccgtcgacgagctggcccgggggctgctcgcgaagggcgtcaccaggggcgaccgggtcggcatctgggcggtcaactgccccgagtgggtcctcgtccagtacgccaccgcccgcatcggcgtcatcatggtgaacgtcaacccggcctaccgggcccacgagttggagtacgttctccagcagtccggcatcagcctgctggtcgcctccctcgcccacaagagcagcgactaccgggcgatcgtggagcaggtccgcggccgctgccccgcgctgcgcgagaccgtctacatcggcgacccgtcctgggacgcgctcaccgcgggcgccgccgcggtggagcaggaccgggtcgacgccctcgccgccgaactgagctgcgacgacccggtcaacatccagtacacctccggcaccaccggcttccccaagggcgccaccctctcccaccacaacatcctcaacaacggctactgggtgggccgcacggtcggctacacggagcaggaccgggtctgtctgccggtgcccttttatcactgctttggcatggtgatggggaatctgggtgccacctcccacggcgcctgcatcgtcatccccgccccgtcctccgagccggcggccacgctggaggcggtgcagcgggagcggtgcacgtccctgtacggcgtcccgaccatgttcatcgcggagctgaacctgccggacttcgcctcctacgacctcacctccctgcgcaccggcatcatggcgggctcgccctgcccggtggaggtgatgaagcgggtggtcgccgagatgcacatggagcaggtctccatctgctacggcatgaccgagacctccccggtctccctgcagacccgcatggacgacgacctcgaacaccgcaccggcaccgtcggccgcgtcctgccgcacatcgaggtcaaggtcgtcgacccggtcaccggcgtgaccctgccgcgcggcgaggcgggcgaactgcgcacccgcggctacagcgtgatgctcggctactgggaggagcccgggaagaccgccgaggccatcgacccgggccgctggatgcacaccggggacctcgcggtgatgcgcgaggacggatacgtcgagatcgtcggccgcatcaaggacatgatcatccggggcggcgagaacatctacccgcgcgaggtcgaggagttcctgtacgcccacccgaagatcgcggacgtccaggtcgtcggcgtcccgcacgaacgctacggcgaggaggtcctggcctgcgtcgtcgtgcgcgatgccgccgacccgctcaccctggaggaactgcgcgcctactgcgccgggcagctcgcccactacaaggtgcccagccgcctccagctcctcgactccttcccgatgaccgtctcggggaaggtgcgcaaggtggagttgcgggagcggtacggagcgcgcccctga

SEQ ID NO: 28139 - protein, 541 aa, Streptomyces coelicolor A3(2)
MTAPAPQPSYAHGTSTTPLLGDTVGANLGRAIAAHPDREALVDVPSGRRWTYAEFGAAVDELARGLLAKGVTRGDRVGIWAVNCPEWVLVQYATARIGVIMVNVNPAYRAHELEYVLQQSGISLLVASLAHKSSDYRAIVEQVRGRCPALRETVYIGDPSWDALTAGAAAVEQDRVDALAAELSCDDPVNIQYTSGTTGFPKGATLSHHNILNNGYWVGRTVGYTEQDRVCLPVPFYHCFGMVMGNLGATSHGACIVIPAPSSEPAATLEAVQRERCTSLYGVPTMFIAELNLPDFASYDLTSLRTGIMAGSPCPVEVMKRVVAEMHMEQVSICYGMTETSPVSLQTRMDDDLEHRTGTVGRVLPHIEVKVVDPVTGVTLPRGEAGELRTRGYSVMLGYWEEPGKTAEAIDPGRWMHTGDLAVMREDGYVEIVGRIKDMIIRGGENIYPREVEEFLYAHPKIADVQVVGVPHERYGEEVLACVVVRDAADPLTLEELRAYCAGQLAHYKVPSRLQLLDSFPMTVSGKVRKVELRERYGARP

SEQ ID NO: 28140 - DNA, 1536 bp, Streptomyces coelicolor A3(2)
  CDS (1)..(1536): transl_table=11
atggcaaccctctccgtcgccgccgtcctcgccgagaacgcccggcgccgtcccgacaaggaggcgctggtcgagggcgacctgcggctgaccttcgccgaggtgtggcggcgggccctcgcccgggccggcgccctcgtcggcctggacgtccggccgggggaccgggtggcgctgatggcaccgaacaccgccgacttccccgtcgcctactacgccgccgccgcggccggcgccgtggtggtgccggtgcacctgctgctgtccccggccgaggtcgagcacgtcctgcgcgacagcggtgccaccctgctgctgtgccatccggcccaggcggagaccggagcggccgccgcgcggcaggcgggtgtacggacgatcacgctcggcgaggagttcgaccggctcgccgccgacgccgagcccctgccctcgtacgtcacccgggacgccgacgacccggccgtcgtcttctacaccagcggcacgaccggagtgcccaagggcgccgtgctcagccacttcaacctggtgatgaacgcgacggtcaacgccttcgacgccaacgacatccggcccgacgacgtggcgctcggcgcgctgcccctcttccacgccttcggccagaccgtctccctcaactccacctggcgggcgggcgcgaccctcgtcctgctgccgcgcttcgacgcggcgcgcgcgatcgagctgatggtgaaggagggcgtcaacaccttccacggggtgccgaccatgttcgtcgccctcgccgccgcggcggccggggccgcggccctgccggagctgcgggtgtgcatctccggcggtgcctcgctgccggtggccgtcctcgaacggttcgaggaggccttcggggcgaagatctacgagggctacgggctgtcggagacctctccggcggcggctgtgaaccagccggtgttcggcgccaggccgggcaccatcggccacccgctgtggggcgtcgacgtggagatcgcccgcgccgaggtcgaggacgccgtggaactgctgccgcccggggaactgggcgaggtcgtcgtccgcggccacaacgtcttctccggctacctcggccgccccgaggccaccgctcaggcgctcgtcgacggctggttccgcaccggcgacctgggaaccaaggacgaggacgggttcctgaggatcgtcgaccggaagaaggacgtcatcatccggggcggctacaacgtctatccgcgggaggtcgaggaggtgctgatgcgccaccccggcatcgcccaggtcgccgtcatcgggctcccggacgaactccacggcgaggaggtctgcgccgtggtcgtgcgcgcccccggcacgacgcccgacgcggtgccggacgccgccggggtcaccgagtggtccaagcagcacctcgggcggcacaagtacccgcgccgggtggagttcacggacgagctgccgctcgggccgagcatgaaggtgctgaagcgcgagctgagggcggtgtacaccgaccaccggggaccacgctaa

SEQ ID NO: 28141 - protein, 511 aa, Streptomyces coelicolor A3(2)
MATLSVAAVLAENARRRPDKEALVEGDLRLTFAEVWRRALARAGALVGLDVRPGDRVALMAPNTADFPVAYYAAAAAGAVVVPVHLLLSPAEVEHVLRDSGATLLLCHPAQAETGAAAARQAGVRTITLGEEFDRLAADAEPLPSYVTRDADDPAVVFYTSGTTGVPKGAVLSHFNLVMNATVNAFDANDIRPDDVALGALPLFHAFGQTVSLNSTWRAGATLVLLPRFDAARAIELMVKEGVNTFHGVPTMFVALAAAAAGAAALPELRVCISGGASLPVAVLERFEEAFGAKIYEGYGLSETSPAAAVNQPVFGARPGTIGHPLWGVDVEIARAEVEDAVELLPPGELGEVVVRGHNVFSGYLGRPEATAQALVDGWFRTGDLGTKDEDGFLRIVDRKKDVIIRGGYNVYPREVEEVLMRHPGIAQVAVIGLPDELHGEEVCAVVVRAPGTTPDAVPDAAGVTEWSKQHLGRHKYPRRVEFTDELPLGPSMKVLKRELRAVYTDHRGPR

SEQ ID NO: 28142 - DNA, 1518 bp, Streptomyces coelicolor A3(2)
  CDS (1)..(1518): transl_table=11
atgacgcccggacacggcagcaccggcagcactggcagcactgttgacggggtgctgcgccgtagcgcccgacgcactccggcacgcgtcgcggtggagtaccgcgaccgttcctggacgtacgcggaactcgacaccgcggtctcccgcgcggcgagcgtcctgctgggcgagggactgtccccgggcgaccgggtcgccgcctacggccacaactccgacgcctacctgatcgcgttcctggcctgcgcccgcgcgggcctggtgcacgtcccggccaaccagaacctcaccggcgaggacctcgcccacatcgtcggccagtccggcagcaccctggtcctcaccgaccccggcctcgcctcccggctccccggcacgacccgcaccctgccgctgcgcgacaccgacgactcgctcctgtcccgcctcgcggcgacgcccccgtacgacggccccgagcccggcgccgaggacctggtgcagctcctgtacacctcgggcaccaccgcgctgcccaagggcgcgatgatgacccaccgggcgctggtgcacgagtacctgagcgccatcaccgcgctggacctcggcgccggcgaccgccccgtgcacgcgctcccgctctaccactcggcccagacccacgtcttcctgctgccctacctcgccgtcggcgcgaccaacgtcatcctggacgcgcccgacggcgaccggctcttcgacctgatcgaagcgggccgcgtggacagcctgttcgcgccgcccaccgtgtggatcggcctcgcgaaccgcgccgacttcgccacccgcgacctgaccggcctgcgcaaggcctactacggcgcgtccatcatgccggtgcccgttctggagcgactgcgcgcacgcctgccgcacctcgccttctacaactgcttcggccagagcgagatcggcccgctcgccaccgtgctcggcccggacgagcacgagggccgcatggactcctgcggccgccccgtcctcttcgtcgacgcccgtgtggtcgacgaggacggcaaggacgtccccgacggcacgcccggcgaagtcgtctaccgctccccgcagctgtgcgacggctactgggaccggcccgaggagaccgaggccgccttccgcgacggctggttccactccggcgacctcgccgtccgggacgccgacggctactacaccatcgtcgaccgggtgaaggacgtcatcaactccgggggcgtactggtcgcctcccgccaggtcgaggacgccctctacacgcacgacgccgtcgccgaggcggccgtgatcgccctgcccgacgaacggtggatcgaggccgtcacggccgtcgtcgtcccccgctcggaggtcaccgaggacgagctgatcgcccatacccgcgagcgactcaccgccttcaaggcgcccaaacgcgtcctgttcgtggacgccctgccgcgcaacgccagcgggaagatcctcaagagggaactgcgggaccgcttcgccggtgcctga

SEQ ID NO: 28143 - protein, 505 aa, Streptomyces coelicolor A3(2)
MTPGHGSTGSTGSTVDGVLRRSARRTPARVAVEYRDRSWTYAELDTAVSRAASVLLGEGLSPGDRVAAYGHNSDAYLIAFLACARAGLVHVPANQNLTGEDLAHIVGQSGSTLVLTDPGLASRLPGTTRTLPLRDTDDSLLSRLAATPPYDGPEPGAEDLVQLLYTSGTTALPKGAMMTHRALVHEYLSAITALDLGAGDRPVHALPLYHSAQTHVFLLPYLAVGATNVILDAPDGDRLFDLIEAGRVDSLFAPPTVWIGLANRADFATRDLTGLRKAYYGASIMPVPVLERLRARLPHLAFYNCFGQSEIGPLATVLGPDEHEGRMDSCGRPVLFVDARVVDEDGKDVPDGTPGEVVYRSPQLCDGYWDRPEETEAAFRDGWFHSGDLAVRDADGYYTIVDRVKDVINSGGVLVASRQVEDALYTHDAVAEAAVIALPDERWIEAVTAVVVPRSEVTEDELIAHTRERLTAFKAPKRVLFVDALPRNASGKILKRELRDRFAGA

SEQ ID NO: 28144 - DNA, 1662 bp, Streptomyces coelicolor A3(2)
  CDS (1)..(1662): transl_table=11
gtgagcgagactcaacggacctggtccgaagccgaatcggcgcactaccgtgcctccgggcactggcagggggtgaccttcgccgccctgctgcgggagagtgcggcggtccgtgcagggcacgtcgccctggtcgacggcgaccggcggtggacctacgcggagctggacgccgaggcggaccgtgtcgcccgcggactgcgagggctcgggatcgggcggggtgaccgcgtggtggtccagctccccaactgcgcggagttcgtgctggtgtggttcgcactgcagcgcgtcggtgccgttccggtgcacgccatgccgggtcaccggcgcctggagatcggtcacctggtgcgcgtggcgggcgccgtggcctgcgtggtgccggaccggcacgcccggttcgaccaccgcgaactgatgcgcgaggtacgggcggagcaggggccgggcggctctctgcggcacgtcgtggtggtcggcgagcccgggaccggcgagggcttcgtccccttcgaggcgctgcggacggacacaccgtccgcgtcgggccccggatccggccccgcatccggtgtcgcatccggcgaggacgccgcggacgcctccgatgtcgccctcctgctgctgtccggcggcaccacgggtcttcccaagctcatcccgcgcacccacgacgactacgcctacaacgcgcgtgcctgcgcggaggtctgcgcactcgacgcgcgcaccgtgtacctcgcggtgctgcccctcgggttcaacttcgccttcgcctgccccggtgtgctgggcaccctcatggccgggggaaccgtcgtcgtcgcgcccgaccccagcccgcagacggcgttcgccctcgtcgagcgggagggcgtgaccctgacctcgctgacgcccccgctcgtcccccactggacggacgaggccgcgtccggctcctgggacctcggcagcctctcggtggtgcaggtcggcggggcgcggctgcccgaggaccacgcccgcaagctcggaccggcgctcggggtgaccgtgcaacaggtcttcggcatggcggagggcctgatcaacctcacccgcctcgacgaccccgaggacctggtctgcgccacccagggccggccggtctcgccggacgacgaggtgctcgtggtggacgccgacggcaggcccgtgccggacggtacggagggtgagctgctcacccgcggtccgtacacgttgcgtggctactaccgcgccgaggagcacaaccgcaccgcgttcacgccggacggctactaccgctccggagacgtggtgcggcgtctgccgtccggtcacctcgtggtggtggggcggctcaaggaccagatcaaccgcggcggcgagaaggtcgccgcggtggaggtggaggagcagctgctgacgcatcccgcgatcacggcggcggcgctggtcggagtgccggacgagcggtggggcgagcggtcggtcgccttcgtcgtgtgtacgggcgcggctcccggcgtccgggcggtcgccgcccatctgaaggagcgcgggctggccgggtacaaggctccggacgaggtggtgcgggtcccccggcttccgctcaccgcggtcgggaaggtcgacaaggcggcactggcacggcagttgccccggccgtga

SEQ ID NO: 28145 - protein, 553 aa, Streptomyces coelicolor A3(2)
MSETQRTWSEAESAHYRASGHWQGVTFAALLRESAAVRAGHVALVDGDRRWTYAELDAEADRVARGLRGLGIGRGDRVVVQLPNCAEFVLVWFALQRVGAVPVHAMPGHRRLEIGHLVRVAGAVACVVPDRHARFDHRELMREVRAEQGPGGSLRHVVVVGEPGTGEGFVPFEALRTDTPSASGPGSGPASGVASGEDAADASDVALLLLSGGTTGLPKLIPRTHDDYAYNARACAEVCALDARTVYLAVLPLGFNFAFACPGVLGTLMAGGTVVVAPDPSPQTAFALVEREGVTLTSLTPPLVPHWTDEAASGSWDLGSLSVVQVGGARLPEDHARKLGPALGVTVQQVFGMAEGLINLTRLDDPEDLVCATQGRPVSPDDEVLVVDADGRPVPDGTEGELLTRGPYTLRGYYRAEEHNRTAFTPDGYYRSGDVVRRLPSGHLVVVGRLKDQINRGGEKVAAVEVEEQLLTHPAITAAALVGVPDERWGERSVAFVVCTGAAPGVRAVAAHLKERGLAGYKAPDEVVRVPRLPLTAVGKVDKAALARQLPRP

SEQ ID NO: 28146 - DNA, 1593 bp, Oceanobacillus iheyensis HTE831
  CDS (1)..(1593): transl_table=11
atgctagcaccactaaccccactagattggaaacgtagagctatcaagtattatccggaaaaaatagcgatagttgatggagataaatcatttacgtataaagaatttggtcatcgagttgatcaattatctaaaggtttgctcgaaaaaggtattaaagaaggtgaccatgtcgctgtaatgcttccaaatacacattatatgttggagtgcttttatggaatctgtcagattggagcagtcatggttccattaaactatcgtctatcagcaaaagatttaaactatattattaatcatagtgatgctaagttattaattgttgatgaggcattcactgagcctattgaagaaattcagaatagtttgtccttggaagagatgattatcgtagaagttgatggagagagtacttccttacaaggtactctttatgaagcgttaatacatcatgataatgataaggtcgaattaccaatagtagaaattgatgaaaatcagttaatgacgattaattatacaagtggtactacgtcgaatccaaagggggttatgctaacccatcgtagtaactatataaacgcagccaacttcctttatcatattaatgtttctcatgatgatcgctatttgcatacattaccaatgtttcatgcgaatggatggggaggagtgtgggcaataactgctgcaggtggtacgcatgtgtgcttgcgcaaagtggatccgccattaatattagatatttttgaagaacaacagataaccatgctttgcggggcacctacagtggttaatatgctggtgaatgagcccaaagcaaaacaattaaatttacaatcgaagcttaggatggcaaccgcaggatctcctcctgcagcggcattaatccaaaaagcacaagatattttaggattagaaatggtgcatgtttacggactaacagaaacgtcaccttttatcttatattgtgaatggaaacaagattttaatgagaaatcctccgatgaacaagcaacaattaaagcaagacagggaattgagcttgcatttaatggtgaaactaccgtcattcgtcctgatggagaagaagttctctggaatggggaggaattaggagagattgtcactcgtggaaatgtagtgatgcaaggttattataaagatgtggaaaaaaccgatgcggccatgaaagacggatggttccatactggagatttagctgtcattcattcagatggttttatagaaattcgggatcgagcaaaggatttaattatttccggtggagagaatatttcatctacagaagtagagggagtgctttataaacatccagatgtattagaagtagccgtaattgcaattcctgatgaaaagtggggagaagtaccattagcaatcattgtgccacaaccacattcagcactgacagaagaggaagtcataacctattgccgagaaaatcttgctcactttaaatctcctaaaaaagttgagtttgttgaagaattaccaaagacagcaacaggaaaactgcaaaaattccgtttgcgagagttgtactgggaaagagcaaagagagtaaattaa

SEQ ID NO: 28147 - protein, 530 aa, Oceanobacillus iheyensis HTE831
MLAPLTPLDWKRRAIKYYPEKIAIVDGDKSFTYKEFGHRVDQLSKGLLEKGIKEGDHVAVMLPNTHYMLECFYGICQIGAVMVPLNYRLSAKDLNYIINHSDAKLLIVDEAFTEPIEEIQNSLSLEEMIIVEVDGESTSLQGTLYEALIHHDNDKVELPIVEIDENQLMTINYTSGTTSNPKGVMLTHRSNYINAANFLYHINVSHDDRYLHTLPMFHANGWGGVWAITAAGGTHVCLRKVDPPLILDIFEEQQITMLCGAPTVVNMLVNEPKAKQLNLQSKLRMATAGSPPAAALIQKAQDILGLEMVHVYGLTETSPFILYCEWKQDFNEKSSDEQATIKARQGIELAFNGETTVIRPDGEEVLWNGEELGEIVTRGNVVMQGYYKDVEKTDAAMKDGWFHTGDLAVIHSDGFIEIRDRAKDLIISGGENISSTEVEGVLYKHPDVLEVAVIAIPDEKWGEVPLAIIVPQPHSALTEEEVITYCRENLAHFKSPKKVEFVEELPKTATGKLQKFRLRELYWERAKRVN

SEQ ID NO: 28148 - DNA, 1683 bp, Pseudomonas putida KT2440
  CDS (1)..(1683): transl_table=11
atgttgcagacacgcatcatcaagcccgccgagggcgcctatgcctatccattgctgatcaagcgcctgctgatgtccggcagccgctatgaaaagacccgggaaatcgtctaccgcgaccagatgcggctgacgtatccacagctcaacgagcgcattgcccgcctggccaacgtgctgaccgaggccggggtcaaggccggtgacaccgtggcggtgatggactgggacagccatcgctacctggaatgcatgttcgccatcccgatgatcggcgctgtggtgcacaccatcaacgtgcgcctgtcgcccgagcagatcctctacaccatgaaccatgccgaagaccgcgtggtgctggtcaacagcgacttcgtcggcctgtaccaggccatcgccgggcagctgaccactgtcgacaagaccctgctactgaccgatggcccggacaagactgccgaactgcccggtctggtcggcgagtatgagcagctgctggctgctgccagcccgcgctacgacttcccggatttcgacgagaattcggtggccactaccttctacaccactggcaccaccggtaaccccaagggcgtgtatttcagtcaccgccagctggtgctgcacaccctggccgaggcctcggtcaccggcagtatcgacagcgtgcgcctgctgggcagcaacgatgtgtacatgcccatcaccccgatgttccacgtgcatgcctggggcatcccctacgctgccaccatgctcggcatgaagcaggtgtacccagggcgctacgagccggacatgctggtcaagctttggcgtgaagagaaggtcactttctcccactgcgtgccgaccatcctgcagatgctgctcaactgcccgaacgcccaggggcaggacttcggcggctggaagatcatcatcggcggcagctcgctcaaccgttcgctgtaccaggccgccctggcgcgcggcatccagctgaccgccgcgtatggcatgtcggaaacctgcccgctgatctccgcggcacacctgaacgatgaactgcaggccggcagcgaggatgagcgcgtcacttaccgtatcaaggccggtgtgccggtgccgttggtcgaagcggccatcgtcgacggcgaaggcaacttcctgcccgccgatggtgaaacccagggcgagctggtactgcgtgcgccgtggctgaccatgggctacttcaaggagccggagaagagcgaggagctgtggcagggcggctggctgcacaccggtgacgtcgccaccctcgacggcatgggctacatcgacatccgcgaccgcatcaaggatgtgatcaagaccggtggcgagtgggtttcctcgctcgacctggaagacctgatcagccgccacccggccgtgcgcgaagtggcggtggtgggggtggccgacccgcagtggggtgagcgcccgtttgccctgctggtggcacgtgacggccacgatatcgacgccaaggcgctgaaggaacacctcaagccattcgtcgagcaaggtcatatcaacaagtgggcgattccaagccagatcgcccttgttactgaaattcccaagaccagtgtcggcaagctcgacaagaaacgcattcgccaggacatcgtccagtggcaggccagcaacagcgcgttcctttccacgttgtaa

SEQ ID NO: 28149 - protein, 560 aa, Pseudomonas putida KT2440
MLQTRIIKPAEGAYAYPLLIKRLLMSGSRYEKTREIVYRDQMRLTYPQLNERIARLANVLTEAGVKAGDTVAVMDWDSHRYLECMFAIPMIGAVVHTINVRLSPEQILYTMNHAEDRVVLVNSDFVGLYQAIAGQLTTVDKTLLLTDGPDKTAELPGLVGEYEQLLAAASPRYDFPDFDENSVATTFYTTGTTGNPKGVYFSHRQLVLHTLAEASVTGSIDSVRLLGSNDVYMPITPMFHVHAWGIPYAATMLGMKQVYPGRYEPDMLVKLWREEKVTFSHCVPTILQMLLNCPNAQGQDFGGWKIIIGGSSLNRSLYQAALARGIQLTAAYGMSETCPLISAAHLNDELQAGSEDERVTYRIKAGVPVPLVEAAIVDGEGNFLPADGETQGELVLRAPWLTMGYFKEPEKSEELWQGGWLHTGDVATLDGMGYIDIRDRIKDVIKTGGEWVSSLDLEDLISRHPAVREVAVVGVADPQWGERPFALLVARDGHDIDAKALKEHLKPFVEQGHINKWAIPSQIALVTEIPKTSVGKLDKKRIRQDIVQWQASNSAFLSTL

SEQ ID NO: 28150 - DNA, 1647 bp, Pseudomonas putida KT2440
  CDS (1)..(1647): transl_table=11
atgatggttccaaccctcgaacacgagcttgctcccaacgaagccaaccatgtcccgctgtcgccgctgtcgttcctcaagcgtgccgcgcaggtgtacccgcagcgcgatgcggtgatctatggcgcaaggcgctacagctaccgtcagttgcacgagcgcagccgcgccctggccagtgccttggagcgggtcggtgttcagccgggcgagcgggtggcgatattggcgccgaacatcccggaaatgctcgaggcccactatggcgtgcccggtgccggggcggtgctggtgtgcatcaacatccgcctggaggggcgcagcattgccttcatcctgcgtcactgcgcggccaaggtattgatctgcgatcgtgagttcggtgccgtggccaatcaggcgctggccatgctcgatgcgccgcccttgctggtgggcatcgacgatgatcaggccgagcgcgccgatttggcccacgacctggactacgaagcgttcttggcccagggcgaccccgcgcggccgttgagtgcgccacagaacgaatggcagtcgatcgccatcaactacacctccggcaccacgggggaccccaagggcgtggtgctgcatcaccgcggcgcctacctcaacgcctgcgccggggcgctgatcttccagttggggccgcgcagcgtctacttgtggaccttgccgatgttccactgcaacggctggagccatacctgggcggtgacgttgtccggtggcacccacgtgtgtctgcgcaaggtccagcctgatgcgatcaacgccgccatcgccgagcatgccgtgactcacctgagcgccgccccagtggtgatgtcgatgctgatccacgccgagcatgccagcgcccctccggtgccggtttcggtgatcactggcggtgccgccccgcccagtgcggtcatcgcggcgatggaggcgcgtggcttcaacatcacccatgcctatggcatgaccgaaagctacggtcccagcacattgtgcctgtggcagccgggtgtcgacgagttgccgctggaggcccgggcccagttcatgagccgccagggcgtcgcccacccgctgctcgaggaggccacggtgctggataccgacaccggccgcccggtcccggccgacggccttaccctcggcgagctggtggtgcggggcaacactgtgatgaaaggctacctgcacaacccagaggctacccgtgccgcgttggccaacggctggctgcacacgggcgacctggccgtgctgcacctggacggctatgtggaaatcaaggaccgagccaaggacatcatcatttctggcggcgagaacatcagttcgctggagatagaagaagtgctctaccagcaccccgaggtggtcgaggctgcggtggtggcgcgtccggattcgcgctggggcgagacacctcacgctttcgtcacgctgcgcgctgatgcactggccagcggggacgacctggtccgctggtgccgtgagcgtctggcgcacttcaaggcgccgcgccatgtgtcgctcgtggacctgcccaagaccgccactggaaaaatacagaagttcgtcctgcgtgagtgggcccggcaacaggaggcgcagatcgccgacgccgagcattga

SEQ ID NO: 28151 - protein, 548 aa, Pseudomonas putida KT2440
MMVPTLEHELAPNEANHVPLSPLSFLKRAAQVYPQRDAVIYGARRYSYRQLHERSRALASALERVGVQPGERVAILAPNIPEMLEAHYGVPGAGAVLVCINIRLEGRSIAFILRHCAAKVLICDREFGAVANQALAMLDAPPLLVGIDDDQAERADLAHDLDYEAFLAQGDPARPLSAPQNEWQSIAINYTSGTTGDPKGVVLHHRGAYLNACAGALIFQLGPRSVYLWTLPMFHCNGWSHTWAVTLSGGTHVCLRKVQPDAINAAIAEHAVTHLSAAPVVMSMLIHAEHASAPPVPVSVITGGAAPPSAVIAAMEARGFNITHAYGMTESYGPSTLCLWQPGVDELPLEARAQFMSRQGVAHPLLEEATVLDTDTGRPVPADGLTLGELVVRGNTVMKGYLHNPEATRAALANGWLHTGDLAVLHLDGYVEIKDRAKDIIISGGENISSLEIEEVLYQHPEVVEAAVVARPDSRWGETPHAFVTLRADALASGDDLVRWCRERLAHFKAPRHVSLVDLPKTATGKIQKFVLREWARQQEAQIADAEH

SEQ ID NO: 28152 - DNA, 1689 bp, Pseudomonas putida KT2440
  CDS (1)..(1689): transl_table=11
atgccccagccaagctacacccagggcacccaggacaagcccctgctgacccaatgcatcggcgacgccttcgacgccaccgtagcccgcttccccgaccgtgaggcgctggtggttcaccatcaggccctgcgctacacgtggcggcaactggccgatgccgtcgaccagcacgcccgcgcgctgatggccctgggcgtgcagcccggtgaccgtcttggcatctgggcacccaactgcgccgagtggtgcattacccagttcgccagcgccaaggttggcgcgatcctggtcaacatcaacccggcctaccgttccagcgaactggactatgcccttggccagtccggctgccgctgggtgatctgtgccgacgcattcaagacgtccgattaccacgccatgctgcagggcctgctcccgggcctggccagcagccaaccgggtgcgctgatctgcgagcggttccccgaactgcgtggcgtggtcagcctggcgctgtcgccaccgccggggtttctggcctggcacgcattgcaggcccgtgccgaggttgtcagcggcgaggccctggccgcgcgccaggcacaactgcgttgcgacgacccgatcaacatccagtacacctcaggcaccaccggtttccccaagggggccacccttagccacagcaatatcctcaacaacgggtacatggtcggtgaaagcctgggccttaccgagcacgatcggctggtggtgccggtgccgctgtaccactgcttcggcatggtcatggccaaccttggctgcatgacacacggcagcgcactgatttaccccagcgatgccttcgacccgctggccacgctgcgcgcagtggcgcaggaaaaagccactgcgctgtatggcgtgccgaccatgttcattgccgaactggaccatccacagcgtggtgaattcgacctgtcgagcctgcgcaccgggatcatggccggtgcgacctgcccgatcgaggtgatgcgccgggtgattggcgagatgcacatggccgaagtgcagattgcctatggcatgaccgagaccagcccggtgtccttgcagaccggtgccgctgacgacctggagcgtcgcgtgaccagcgtcggtcgcacccagccccggctggagagcaaggtggtggacgctgaaggcaacactgtcccgcgtggcgagatcggtgaactgtgcacccgcggctacagcgtgatgctgggttactggaacaaccccaaagccaccgccgagagcatcgacgcagagggctggatgcacaccggcgacctggcggtgatggacgagcagggctatgtgcgtattgtcgggcgcagcaaggacatgatcattcgcggcggcgagaacatttacccgcgcgagctggaggagttcttcttcacccacccggcggtggccgatgtgcaggtgattggcgtgccctgcagcaagtacggtgaagagatcgtggcctgggtgcggctgcacccggggcatgctgtcagtgaggtagagttgcgtgagtgggcgagggcaaggattgcgcacttcaaggtgccccggtatttccgttttgtcgacgagttcccgatgacggtgacgggcaaggtgcagaaattccggatgcgcgagatcagtgtcgaagagctgaaagcaacggccttgcccaagatttga

SEQ ID NO: 28153 - protein, 562 aa, Pseudomonas putida KT2440
MPQPSYTQGTQDKPLLTQCIGDAFDATVARFPDREALVVHHQALRYTWRQLADAVDQHARALMALGVQPGDRLGIWAPNCAEWCITQFASAKVGAILVNINPAYRSSELDYALGQSGCRWVICADAFKTSDYHAMLQGLLPGLASSQPGALICERFPELRGVVSLALSPPPGFLAWHALQARAEVVSGEALAARQAQLRCDDPINIQYTSGTTGFPKGATLSHSNILNNGYMVGESLGLTEHDRLVVPVPLYHCFGMVMANLGCMTHGSALIYPSDAFDPLATLRAVAQEKATALYGVPTMFIAELDHPQRGEFDLSSLRTGIMAGATCPIEVMRRVIGEMHMAEVQIAYGMTETSPVSLQTGAADDLERRVTSVGRTQPRLESKVVDAEGNTVPRGEIGELCTRGYSVMLGYWNNPKATAESIDAEGWMHTGDLAVMDEQGYVRIVGRSKDMIIRGGENIYPRELEEFFFTHPAVADVQVIGVPCSKYGEEIVAWVRLHPGHAVSEVELREWARARIAHFKVPRYFRFVDEFPMTVTGKVQKFRMREISVEELKATALPKI

SEQ ID NO: 28154 - DNA, 1623 bp, Pseudomonas putida KT2440
  CDS (1)..(1623): transl_table=11
atgtcgatctatgcccagggcctgatgcccgctgccgtcaaccatgtcgccctcaccccgctgagcttcatcgaacgcaccgctgccgtttacggcaactacccggccgtcatccacggcgccatccgccgcaactggcaagaaacctaccaacgctgtcggcgcctggccagcgccctggccggccgtggcatcggccgtggcgacaccgtggcagtgatgctgcccaacaccccgaccatgctcgaggcgcacttcggcgtacccatgaccggtgccgtgctcaataccctgaacgtgcgcctggatgccgaggccatcgccttcatgctgcagcatggcgaggccaaggtgctgatcaccgaccgcgagttccatgcggtcatcgaaggcgctctggcactgcttgaacacccgccgctggtggttgatgtggatgacccggagtacggcgaaggccgcgcggtcagccagctggactatgaggccctgctcaacgagggcgacccggaatttgcctgggaatggcccgatgacgagtggcaagccatttcgctgaactacacctccggcaccaccggcaaccccaagggcgttgtctaccaccaccgcggtgcctacctgaacgcactgggcaaccagatgacctgggccatgggccaccgcccggtgtacctgtggacgttgccaatgttccactgcaacggctggtgctacccctggaccatcaccgccctggccggcacccatgtgttcctgcgccgggtcgacccgcagaagatcctgaccctgatccgcgagcacaaagtcagccacctgtgcggtgcgccgatcgtgctcaacgcgctggtcaacatgcccgaggcggccaaggcagccatcgagcacccggtgcaggccatggtcgccggcgccgcaccaccggccaaggttatcggcgccgtggagcaaatgggcatcaaggtcacccacacctatggcctgaccgaggtctacggcccggtgaccgtgtgtgcctggcatgacgaatgggatgcgctttcgctggaagagcgtgcgcggatcaagtctcgccaaggcgtgcgctacccgaccctcgacggcctgatggtcgccgacccgcaaacccttcagccagtaccccgcgacggcgataccctgggcgaaatcttcatgcgcggcaacacggtgatgaagggctacctgaagaaccctgaagccaccgccgaagccttccgtggcggctggttccacaccggcgacctggccgtgtggcatgccgacggctatatcgagatcaaggaccggctcaaggacatcatcatttccggtggcgagaacatctccaccatcgaggtcgaagacgccctgtacaagcactcggcagtactggaagccgccgtggtggcacgcccggatgaaaaatggggcgaaaccccgtgcgccttcgttgccttaaagccaggccgggaggacacccgtgaagccgacatcaccagttggtgccgcgagcacctggccgggttcaaggtgccgaagaccgtggtgttcggcgagctgcccaagacctcgaccggcaagatccagaagtacgtgctgcgcgaccgggccaaagccctctga

SEQ ID NO: 28155 - protein, 540 aa, Pseudomonas putida KT2440
MSIYAQGLMPAAVNHVALTPLSFIERTAAVYGNYPAVIHGAIRRNWQETYQRCRRLASALAGRGIGRGDTVAVMLPNTPTMLEAHFGVPMTGAVLNTLNVRLDAEAIAFMLQHGEAKVLITDREFHAVIEGALALLEHPPLVVDVDDPEYGEGRAVSQLDYEALLNEGDPEFAWEWPDDEWQAISLNYTSGTTGNPKGVVYHHRGAYLNALGNQMTWAMGHRPVYLWTLPMFHCNGWCYPWTITALAGTHVFLRRVDPQKILTLIREHKVSHLCGAPIVLNALVNMPEAAKAAIEHPVQAMVAGAAPPAKVIGAVEQMGIKVTHTYGLTEVYGPVTVCAWHDEWDALSLEERARIKSRQGVRYPTLDGLMVADPQTLQPVPRDGDTLGEIFMRGNTVMKGYLKNPEATAEAFRGGWFHTGDLAVWHADGYIEIKDRLKDIIISGGENISTIEVEDALYKHSAVLEAAVVARPDEKWGETPCAFVALKPGREDTREADITSWCREHLAGFKVPKTVVFGELPKTSTGKIQKYVLRDRAKAL

SEQ ID NO: 28156 - DNA, 1683 bp, Pseudomonas putida KT2440
  CDS (1)..(1683): transl_table=11
atgagtcaaccgagctatacccgcggtcgccaggaccgacccttgctgacccagaccatcggccaggccttcgatgccaccgtggcccgctgttgcgacagcgaggccctggtgtcccgccaccagggcctgcgttacagctggcggcagttggccgaacaggtcgaaatatacgcccgcgccctgatcgcactgggcgtgaacaccggcgaccgtgttggcatctggtcgcccaactgcgcccagtggtgcatcttgcagctggccagtgccaaggtcggtgccattctggtcaacatcaacccggcctaccgtgtgggcgaactggaatacgtgttgcgccagtccggctgccgctggctggtctgcgctgaagccttcaagacgtctgattaccacaccatggtgcaggagctggtgcctgaactggccagtgccgcgcctggtgagctggccagtgaatgcctgcccgagttgcgtggcgtcatcagcctggccgccaacccgcctgccggcttcctgccctggcacgcatttgccgagcgggcagggcagacgtctgtcgaggcctgcacagcccgtcagcaaagcctgcaattcgaccagccggtaaacatccagtacacctccggcaccaccggtgcacccaaaggtgccacgctcagtcactacaacatcctcaacaacggtttcatggtgggtgaaagccttggcctgacggcccgcgaccgtatggtgatcccggtgccgctgtaccattgcttcggcatggtcatggcaaacctcggctgcatcacccacggcagcaccatgatctaccccaacgatgctttcgacgccgaacttaccttgcgcgccgtggccgaggagcgcgccaccatcctctacggcgtaccgaccatgttcatcgccatgctcgaccacccgtcccgtgcccacatggacctgtcgaccctgcgcagcggcatcatggccggcgctacctgcccgatcgaggtgatgcgccgggtcatcgaccagatgcacatggcagaagtgcagatcgcctacggcatgaccgaaaccagccccgtgtcgctgcagaccggcccggacgacgatctggagctgcgcgtgaccaccgtcggccgcacccagccgcagctggagaacaagctggtggacgccgatggctgcatcgtccctcgcggagagattggcgaactgtgcacccgcggctacagcgtgatgcttggctactgggacaacccccaggccacggcggatgccatcgacccggccggctggatgcattcgggtgacctggcggtgatggacgagcagggctatgtgcgcatcgtcgggcgcaacaaggacatgatcattcgcggcggcgagaacatttacccgcgtgagctggaggagtttttctacacccacccggcggtggccgatgcgcaggtgatcggcattccgtgcagccgctatggcgaagagatcgtcgcctggatcaagctgcacccggggcacagcgccacggtcgaggagctgcagggctggtgcaaggcacgcatcgcacacttcaaggtgccgcggtatatacgttttgtcgacgagtacccgatgaccgtgaccggcaaggtgcagaagttccgcatgcgtgagatcagtgtggcggagattgcggctgcatctgcgggttga

SEQ ID NO: 28157 - protein, 560 aa, Pseudomonas putida KT2440
MSQPSYTRGRQDRPLLTQTIGQAFDATVARCCDSEALVSRHQGLRYSWRQLAEQVEIYARALIALGVNTGDRVGIWSPNCAQWCILQLASAKVGAILVNINPAYRVGELEYVLRQSGCRWLVCAEAFKTSDYHTMVQELVPELASAAPGELASECLPELRGVISLAANPPAGFLPWHAFAERAGQTSVEACTARQQSLQFDQPVNIQYTSGTTGAPKGATLSHYNILNNGFMVGESLGLTARDRMVIPVPLYHCFGMVMANLGCITHGSTMIYPNDAFDAELTLRAVAEERATILYGVPTMFIAMLDHPSRAHMDLSTLRSGIMAGATCPIEVMRRVIDQMHMAEVQIAYGMTETSPVSLQTGPDDDLELRVTTVGRTQPQLENKLVDADGCIVPRGEIGELCTRGYSVMLGYWDNPQATADAIDPAGWMHSGDLAVMDEQGYVRIVGRNKDMIIRGGENIYPRELEEFFYTHPAVADAQVIGIPCSRYGEEIVAWIKLHPGHSATVEELQGWCKARIAHFKVPRYIRFVDEYPMTVTGKVQKFRMREISVAEIAAASAG

SEQ ID NO: 28158 - DNA, 1689 bp, Pseudomonas putida KT2440
  CDS (1)..(1689): transl_table=11
atgcaagccgacttctggaatgacaagcgcccggcaggcgtgccttccaccatcgacatcaatgcctacgcctcggtcgtcgaggtgttcgagcgctcctgcaagcgctttgccgaccgcccggcgttcagcaacctgggcgtgaccctcagctacgcggaactggagcgccattcggcagccttcgctgcctggttgcagcagcacaccgacctcaaaccgggtgagcgcatcgccgtacagatgcccaatgtgctgcagtaccccatcgccgtcttcggtgccatgcgcgccgggctgatcgtggtcaataccaacccgctgtacaccgagcgcgagatgcgccaccagttcaaggacagtggcgcgcgtgcgctggtgtacctgaacatgttcggcaagcgcgtgcaggaggtgctgcccgataccggtatcgaatacctgatcgaggcaaagatgggtgacctgctgccggccgccaagggctggctggtcaacaccgtggtcgacaagttgaagaagatggtgccggcctaccggttgccccaggcggtgccgttcaagcaggtgctgcgcgagggccgcgggctgtcgcccaaaccggtgtcgctgaacctcgatgacatcgcggtgctgcagtacaccggcggcaccaccggcctggccaagggcgccatgctcacccatggcaacctggtggccaacatgctgcaagtgctggcctgcttctcgcagcacggccccgatgggcagaagctgctgaaggacggccaggaagtgatgattgcgccgctgccgctgtaccacatctatgccttcaccgcgaactgcatgtgcatgatggtcaccggcaaccataatgtgctgattaccaacccgcgggatattcccggcttcatcaaggagctgggcaagtggcgtttctctgccttgctgggcctcaataccctgtttgtcgcactgatggaccacccgggattccgtcagctggacttctcggcgctgaaggtcaccaactctggtggcacagcgctggtcaaagccaccgccgagcgctgggaagaccttaccgggtgccgcatcgttgaaggctacggcctgacagaaacctcgccggtggccagcactaacccctacggccagctggcgcgtctgggtaccgtgggcatccccgtggcgggtaccgcgttcaaggtcatcgatgatgatggcaacgaactgccgctgggcgagcggggcgagctttgcatcaaaggcccgcaggtcatgaaggggtactggcagcagcccgaggcaacggcccaggcactggatgcagaaggctggttcaagaccggtgatatcgcggtgatcgacccggacggcttcacccgaattgtcgaccgcaagaaggacatgatcatcgtctcgggcttcaacgtgtaccccaacgaaatcgaggatgtggtgatggggcatcccaaggtcgccaactgtgcggctatcggcgtgccggacgagcgttccggcgaggcggtcaagctgttcgtggtgccgcgcgagggggggctgagcgttgatgagctgaaggcctactgcaaggccaacttcaccggctacaaagtacccaagcacatcgtgctgcgcgaatcgttgcccatgacgccggtgggcaagattttgcggcgggagttgcgcgatatagcgtga

SEQ ID NO: 28159 - protein, 562 aa, Pseudomonas putida KT2440
MQADFWNDKRPAGVPSTIDINAYASVVEVFERSCKRFADRPAFSNLGVTLSYAELERHSAAFAAWLQQHTDLKPGERIAVQMPNVLQYPIAVFGAMRAGLIVVNTNPLYTEREMRHQFKDSGARALVYLNMFGKRVQEVLPDTGIEYLIEAKMGDLLPAAKGWLVNTVVDKLKKMVPAYRLPQAVPFKQVLREGRGLSPKPVSLNLDDIAVLQYTGGTTGLAKGAMLTHGNLVANMLQVLACFSQHGPDGQKLLKDGQEVMIAPLPLYHIYAFTANCMCMMVTGNHNVLITNPRDIPGFIKELGKWRFSALLGLNTLFVALMDHPGFRQLDFSALKVTNSGGTALVKATAERWEDLTGCRIVEGYGLTETSPVASTNPYGQLARLGTVGIPVAGTAFKVIDDDGNELPLGERGELCIKGPQVMKGYWQQPEATAQALDAEGWFKTGDIAVIDPDGFTRIVDRKKDMIIVSGFNVYPNEIEDVVMGHPKVANCAAIGVPDERSGEAVKLFVVPREGGLSVDELKAYCKANFTGYKVPKHIVLRESLPMTPVGKILRRELRDIA

SEQ ID NO: 28160 - DNA, 1668 bp, Bradyrhizobium japonicum USDA 110
  CDS (1)..(1668): transl_table=11
gtgtcgatgagcgaacggcagaacccgtacaatatcggcctcgacaagacgcccgccaactacgtgccgctgagcccgctgagctttctcgcgcgcagcgccgcggtctaccccgatcacgtcagcacggtctatgaaggccgcagcttcacctgggcgcagacctatgagcgctgccggcgctttgcgtcgtatctcgccggcaagggcatcggcgtcggcgacaccgtggcggcgatgctgccgaacatcccggcgatgaacgaggtacacttcgcggtgccgatgacgggcgctgtgctcaatgcgctcaacatccgcctcgatgcaccgtcgatcgcgtttcagctcgatcatggcggggccaggatcatcctggtcgatcccgagttctctagcgtcatcaccgacgcactcgcgcagatgagcggaccgaagccgttcgtgatcgacgtcgacgatcccgccttcaaggggggcaagcgcatcggcgagatcgaatatgaggccgccgtcgcgcaaggcgatcctgatttcaccgcgatcccgccgaaggacgaatgggacgcgatcgcgctgagctacacctcgggcacgaccggtaatcccaagggcgtcgtcacgcatcatcgcggcgcttatctcaacgccgtcagcaacatccttgccggcaatctcggccagcatccggtgtatctctggacgctgccgatgttccattgcaacggctggtgcttcccctggaccatcgcggcctcagccggcatcaatgtctgcctgcgcaaggtcgagccgaccaagatcttcgagttgatcaagcagcacggcgtcacccacatgtgcggcgcgccgatcgtctacaacacgctgatcaacgcccccgacgcgcccaaggaaacgtcaacgggcaatgccgcccgccgcgtcgtcggcctgatcgccggcgccgcgcctccggttgcggtgctagaaggcgcggaaaacatcggcattaagctcacccacgtctatggcctgaccgaggtctacggccccgcctccgtctgcgccgagcagcccggctgggacgagcttccgccggccgagcgcgcgcggatgaagcgcaggcagggcgtgccctacccgctcgaggaaggcgtcaccgtcatcaacccgcagaccatgcaggaggtgccgcgcgacggcgagaccatcggcgaggtcatgttccgcggcaacatcgtcatgaagggttacctcaagaacgagaaggcgacgaaggaggccttcgagggcggctggtttcacaccggcgatctcggcgtgctcgacgagcacggctacgtcatcatcaaggaccgctccaaggacatcatcatctcgggcggcgagaacatttcctcggtcgaagtcgaggacatcctctacaagcacccggcggtgctgttcgccgccgtggtcgccaagcccgatccgaaatggggcgaagtgccgtgcgccttcgtcgagttgaaggacggcgccagcgcgaccgaggccgagatcatcgccttctgccgttcgcacatgagcggcttcaagacgccgaaggcaatcgtgttcgggccgatcccgaagacgtccacgggcaagatccagaaattcctgctgcgcaacgaggtgggatcagcgaaggcaataaccgcctga

SEQ ID NO: 28161 - protein, 555 aa, Bradyrhizobium japonicum USDA 110
MSMSERQNPYNIGLDKTPANYVPLSPLSFLARSAAVYPDHVSTVYEGRSFTWAQTYERCRRFASYLAGKGIGVGDTVAAMLPNIPAMNEVHFAVPMTGAVLNALNIRLDAPSIAFQLDHGGARIILVDPEFSSVITDALAQMSGPKPFVIDVDDPAFKGGKRIGEIEYEAAVAQGDPDFTAIPPKDEWDAIALSYTSGTTGNPKGVVTHHRGAYLNAVSNILAGNLGQHPVYLWTLPMFHCNGWCFPWTIAASAGINVCLRKVEPTKIFELIKQHGVTHMCGAPIVYNTLINAPDAPKETSTGNAARRVVGLIAGAAPPVAVLEGAENIGIKLTHVYGLTEVYGPASVCAEQPGWDELPPAERARMKRRQGVPYPLEEGVTVINPQTMQEVPRDGETIGEVMFRGNIVMKGYLKNEKATKEAFEGGWFHTGDLGVLDEHGYVIIKDRSKDIIISGGENISSVEVEDILYKHPAVLFAAVVAKPDPKWGEVPCAFVELKDGASATEAEIIAFCRSHMSGFKTPKAIVFGPIPKTSTGKIQKFLLRNEVGSAKAITA

SEQ ID NO: 28162 - DNA, 1575 bp, Bordetella bronchiseptica RB50
  CDS (1)..(1575): transl_table=11
atgagcagtctcgaacagcaaatgcagccgccgggccagacctggtgggacatcatcgaagcgcacgcgcggcgctttccggaacgcgacgcgctggcgcacggcgatggcgccatcacctatggcgagctggtcgcgcgggtgcggcgctgcgccgccggcctgagcgcacgcggcatcggcgcgggcgattgcgtggcgctgctggccccgcccacgcccgacgccatggtctgcctgctggccgcggcgcggttgggggcgttgtgggtcgggctgaatcccaggtaccaggcgcgcgaaatggcctatgtgatcggccacgcgcagcccaagctggtgctgtcggtgcgggagttcgaagcgcgccgctacgccgatgacctggaagcggcgctggccacgctggcgccgcaggcccggcgtcccgagctgctgtactacgacagccaggcgtcctgcgacgaggcaatgctgcacgcgttgtgcgacgcgccggatgctgcgtgtccggcgccgttcgacgatgccgcccagccctgcatgctggtctacacctcgggcaccacgggcaatcccaagggcgtcctgctgagccagacggcgctgatctatcgctctaccgtgcaggcccgcaccttcgccacgcgcagccacccggtggtcatcaacttcgcgccgatcaaccatatcggcggcatgcacttccgggggctgtcgcagatcctggccggcggcaccatcatctaccaggagcgctaccggccggccgaggtgatgggcctgatcgagaagcatcgcgtcaacatgctgatgctgggctcgaccatgctgcagatgctgatccgcgagccgtccttcgacatgtccatcatgcgcgggatggagtggttcattttctcgggcgcggccattcccatgcccatcctgcagcgcgtcaaggagcactgcccgcgcatcggctccacctacggcctgaccgaatcgtgcgggtcggtcagctacatcgtcgccagcgattcgctcgaggcggccgcctataccgtggggcgcgccattcccgaaggccagttgcgcgtggccgacgagcaagggcagccgctgcccgccgggacccagggcgagctgcaggtgcgcggccagtactgcatgaatggctacctgcgcgacgccgccgccacggccggcgccttcacgcgggacggctggctcaagaccggcgacatggcccagcgcgaggacgacggcaacttccgcctggtcgggcgcatcaaggaaatgtataaatcggggggctacaacgtttacccgcgcgagatcgaggtcgtgctcgagcagcaccccaatgtgctgatgtcggccgtcatcgccgtcgacgacgagctctaccagcaggtcggccacgcgcacctgatcctcaggcccgacaccgaggtgtcggaaccggagctggtgcagtggtgccgcgaacgcatggccaactataaagtgcccaagcgcattttcgtccgcaactcactaccgatgctgtccataggcaaggtcgacaagattgccttgcggcagcagcactag

SEQ ID NO: 28163 - protein, 524 aa, Bordetella bronchiseptica RB50
MSSLEQQMQPPGQTWWDIIEAHARRFPERDALAHGDGAITYGELVARVRRCAAGLSARGIGAGDCVALLAPPTPDAMVCLLAAARLGALWVGLNPRYQAREMAYVIGHAQPKLVLSVREFEARRYADDLEAALATLAPQARRPELLYYDSQASCDEAMLHALCDAPDAACPAPFDDAAQPCMLVYTSGTTGNPKGVLLSQTALIYRSTVQARTFATRSHPVVINFAPINHIGGMHFRGLSQILAGGTIIYQERYRPAEVMGLIEKHRVNMLMLGSTMLQMLIREPSFDMSIMRGMEWFIFSGAAIPMPILQRVKEHCPRIGSTYGLTESCGSVSYIVASDSLEAAAYTVGRAIPEGQLRVADEQGQPLPAGTQGELQVRGQYCMNGYLRDAAATAGAFTRDGWLKTGDMAQREDDGNFRLVGRIKEMYKSGGYNVYPREIEVVLEQHPNVLMSAVIAVDDELYQQVGHAHLILRPDTEVSEPELVQWCRERMANYKVPKRIFVRNSLPMLSIGKVDKIALRQQH

SEQ ID NO: 28164 - DNA, 1539 bp, Rhodococcus erythropolis
  CDS (1)..(1539): transl_table=11
atgcacatcccatttacggttacagactttctggagcggggagcggccggtttccctgacagcgtggccgtgatcgacgagccggaacaaccgggcgagtcggtcgggcaggtgacttttcgggaactcgcccaccgcgtgtgtgcctggcaagcaggattcgaccgtctgggcatcagggtcggcgaacgggtcgccgtcgtcagccacaattcggcccgactgctcgagctcttgtacgcggtgccggcgagcggccggatttgtgttccgatcaatttccgtctgtctccggcggaggtcgattacatcgtcggagattgcggcgcgtcagtgcttcttgtcgatcccgagctggaagaggcgttgtcgggtatcaaggttcggcaccggttcgtactcgggaagcacacagacgcggatctgatgcgcttcgatacggagccggccccctgggcgtcgcccacggaggagtcgacggcaacaatcaactacacctccggcaccaccgcgcgcccgaagggtgtcgagatgactcatcgtaatctttgggtcaatgccgtcacactcgcgatgcacacccgtgcgtgggaacgcgatgtgtacatgcacacgttgccgatgttccactgcaacggttgggggatgccgttcgggatggcgggactgggcgcgaagcagatcgtgttgcgcaaggtcgacggcaccgaaatcctccggcgggtggaggaacacggtgtgacgttgatgtgcggggctccggcggtgtggaacgcggtgctcgatgctgcccggtcctggcatggagagattcctggtcgcgatcgggtgcgggtggtgtgcgccggcgctcctccgcccagccgtaccatcgcgcgcctgagcagcgagttggggtgggaactgcagcagatctacgggctcacggaaacatcgccgctgctgactttcaaccggtcactgcctgcggatgacggtcttgatcttgaggaacgagcgcacagactgacccgcgccggacttcccgccctcggtgcacggcttcatatctccaactcgggtgaagttctggcgcgttcgaacgtcgtgatgaacggatactggaacaaccccgaggcgacggacgaggcgctgcgtgatggttggttccacacgggagacggcgggatgatcgacggcgagggccaactgacgatttccgaccgaaagaaggatgtgatcgtcaccggtggcgagaatgtgtcgtcgattgaggtggaggaatgcatcttcagccatcccggtgtgacccaggtcgcggtgatcggcgtaccggacgagaaatggggcgagaccgtcaaggcgctggtggtcaccacgggtccctccacagtctccgaggccgagatcatcgcacactgcaagcagcgcctggcgggctacaaggcgccgacttcggtggagtttcgtgactcgattccacataccgcgacgggcaagatccagaagttcaagctccgagcgccgtattgggaagggtcgacgcgcggcgtgaattga

SEQ ID NO: 28165 - protein, 512 aa, Rhodococcus erythropolis
MHIPFTVTDFLERGAAGFPDSVAVIDEPEQPGESVGQVTFRELAHRVCAWQAGFDRLGIRVGERVAVVSHNSARLLELLYAVPASGRICVPINFRLSPAEVDYIVGDCGASVLLVDPELEEALSGIKVRHRFVLGKHTDADLMRFDTEPAPWASPTEESTATINYTSGTTARPKGVEMTHRNLWVNAVTLAMHTRAWERDVYMHTLPMFHCNGWGMPFGMAGLGAKQIVLRKVDGTEILRRVEEHGVTLMCGAPAVWNAVLDAARSWHGEIPGRDRVRVVCAGAPPPSRTIARLSSELGWELQQIYGLTETSPLLTFNRSLPADDGLDLEERAHRLTRAGLPALGARLHISNSGEVLARSNVVMNGYWNNPEATDEALRDGWFHTGDGGMIDGEGQLTISDRKKDVIVTGGENVSSIEVEECIFSHPGVTQVAVIGVPDEKWGETVKALVVTTGPSTVSEAEIIAHCKQRLAGYKAPTSVEFRDSIPHTATGKIQKFKLRAPYWEGSTRGVN

SEQ ID NO: 28166 - DNA, 1629 bp, Chromobacterium violaceum ATCC 12472
  CDS (1)..(1629): transl_table=11
atgttgcttggacagatgatggatcagcctttgctgatcgccgacctgctcgcccatgccgagcgtttccacggcgacaccgagatcgtgtcgcgcacggtggaaggtccgatgcaccgatacacctaccgcgacgccgcccgccgcgccaggcaactggccaacgcgctgccgtcgctgggcgtggccccgggcgaccgggtgggcacgctggcctggaacggctaccgccatttcgagatctatttcgcggtgtccggcagcggcgccgtttgccacaccgtcaatccccgcctgtttcccgaacagatcgcctggatcgtcaaccacgccgaagacaaggtgctgatgttcgattcgagcttcctgccgctggtggcgcagatcgcggaccagttgaagaccgtggagcgcttcgtcctgctggccgaccacgccagcctgccggccgacagcggcatccccgatctgctcagctacgaagacctggtgcacggccacagcgacgtctacgactggccgcggctggacgagaacgccgcctccagcctgtgctacacctccggcaccaccggcaatcccaagggcgtgctgtactcgcaccgctccaccgtgctgcacgcctacggcagctcgctgccggacagcttcgatctctcggcgcgcgcggtggtgatgccggtggtgccgatgttccatgccaacgcctggggcctgccgtacagctgcgcgatgaacggcagcaagctggtgctgccggggccgaagctggacggcgccagcctgcagcaactgatcgcggaagagggcgtcaccaccaccataggcgtgcccaccgtctggttgcagctgctgcagcactgccagcgcgagcagctgtctctggcgcccttgaagcgggtgatcgccggcggctccgcggtgccggaaagcatgatcgagcagctggcggagcggggcatcgagatgcgccagctgtgggggatgaccgagttgtcgccgttcggcaccacctgcacgctgaagctcaagcatcagggcctggccggcaaggacttgaacgcgctgctgaccaagcagggccggccggtgtacggggtggacatccgcatcgtcgacgacgccggcctgccgctgccgcacgacggcgtctccttcggcaacctgcaggtgcgcggcccctgggtgctgtcgcagtacttcaagcgcgaactggacgccaaccacagcgccgacggctggttccataccggcgacgtggtgacgatagacgccgacggctacatgcgcatcaccgaccgcaccaaggacgtgatcaagtccggcggcgaatggatcagctccatcgacctggagaacatcctggtcggccaccccgcggtggcggaggcggcggcgatcgccgtgccgcatcccaagtgggacgagcggccgttgatggtggtgacgctgaagcccggcgcgcgcgcgacgcgggaagagctgctggcctacttcgacggcaagatcgccaagtggtggacgcccaacgacatcgccttcgtcgacgagctgccgcacaccgccaccggcaagctgctgaagatgaagctgcgcgagcagttccgggaccatcgctggccggaatga

SEQ ID NO: 28167 - protein, 542 aa, Chromobacterium violaceum ATCC 12472
MLLGQMMDQPLLIADLLAHAERFHGDTEIVSRTVEGPMHRYTYRDAARRARQLANALPSLGVAPGDRVGTLAWNGYRHFEIYFAVSGSGAVCHTVNPRLFPEQIAWIVNHAEDKVLMFDSSFLPLVAQIADQLKTVERFVLLADHASLPADSGIPDLLSYEDLVHGHSDVYDWPRLDENAASSLCYTSGTTGNPKGVLYSHRSTVLHAYGSSLPDSFDLSARAVVMPVVPMFHANAWGLPYSCAMNGSKLVLPGPKLDGASLQQLIAEEGVTTTIGVPTVWLQLLQHCQREQLSLAPLKRVIAGGSAVPESMIEQLAERGIEMRQLWGMTELSPFGTTCTLKLKHQGLAGKDLNALLTKQGRPVYGVDIRIVDDAGLPLPHDGVSFGNLQVRGPWVLSQYFKRELDANHSADGWFHTGDVVTIDADGYMRITDRTKDVIKSGGEWISSIDLENILVGHPAVAEAAAIAVPHPKWDERPLMVVTLKPGARATREELLAYFDGKIAKWWTPNDIAFVDELPHTATGKLLKMKLREQFRDHRWPE

SEQ ID NO: 28168 - DNA, 1509 bp, Gloeobacter violaceus PCC 7421
  CDS (1)..(1509): transl_table=11
atgaatttatcgcgcattctcgatcgccaggtccagcttcaccccgatgcacccgcttttatcggccccgaaaagtcgctcacctttggggagttggcgcgcgcaagtgccgccgtggcgggcggtctggctcagttgggggtggtgtgcggcgatcgtgtggcggtgatgctgcccaacgtgctgccttttccaatcgcagcctacgccatctggagactcggcgcgcaactggtgaccgtcaatcccctgctcaaaccccaggaggtccgccatctgctcaccgacagcggcgcgcgggtgctcgtctccctgggtcagttgttgccgcccatcgccgaattgatcgcggaactgaatatccaggtggtcacggtcggaggcggcgagttgggcacgccgtttgagcatctgtttgccgcgccgccgctgctggagccggctgcggtagcccccgaggatgtggtggccgttctgtataccagcggtactaccggccgacccaaaggggcgatgctcaccagccgcaaccttggttacgactcggaggcctgcgctgcggcgcttgaaattggcccctccgaccggctttttatggttctgccgctgtttcacgcctacgggatgaccatcggtctattggtctgcacccgcaacggcgcgagtgtgtatctggagccgcgctttgtacccgcccaggctctggcgcacctcaaacaattcgagtgcacggcctttatcggcgtgcccgcgctgttcgcggccctgcttaccaccgagggcacggcactcaccaacctgcgcttttgcatcagcggcggggcgccgctgcccctgcccgtcctcgaagcgtttgaagcgaaatttcagaccgtgatcctcgaaggagacgggccgaccgaatgctccccggtcaccgccgtcaatcccctgcgcggggtgcgcaaagccggatcgatcggcattccgctgccggggcagcagatgaccatccgcgatccccagagcggcgaatttttgagcgacggcgaggtgggcgagatcctggtgcgcgggccgaacacgttcaagggctacctcaacttgcccgaggagactgcccaagtctttgtagacgactggctgcgcaccggggatctgggctaccgcgacggcgacggctacttctacatcgtcgatcgcctcaaagatctgatcatcgtggccgggctgaatgtctatgcccgcgaggtcgaagaggtgctccagtcgcacccgcgggtgcggatggccgcggtggtgggcgaattcgacgagttgcgcggcgaggtggtgcacgcctttgtagaacccatttctgagcaggagccgcccgaagcccaggaaatcatccgctactgccgtgagaagctcgccgactataaatgtccgcgccgggtcaccgtgatggcagagttgccgcgctccactaccggcaaaatccttaagcgcgtcctcaaggaaggatttaaagggtattctgcgcagtag

SEQ ID NO: 28169 - protein, 502 aa, Gloeobacter violaceus PCC 7421
MNLSRILDRQVQLHPDAPAFIGPEKSLTFGELARASAAVAGGLAQLGVVCGDRVAVMLPNVLPFPIAAYAIWRLGAQLVTVNPLLKPQEVRHLLTDSGARVLVSLGQLLPPIAELIAELNIQVVTVGGGELGTPFEHLFAAPPLLEPAAVAPEDVVAVLYTSGTTGRPKGAMLTSRNLGYDSEACAAALEIGPSDRLFMVLPLFHAYGMTIGLLVCTRNGASVYLEPRFVPAQALAHLKQFECTAFIGVPALFAALLTTEGTALTNLRFCISGGAPLPLPVLEAFEAKFQTVILEGDGPTECSPVTAVNPLRGVRKAGSIGIPLPGQQMTIRDPQSGEFLSDGEVGEILVRGPNTFKGYLNLPEETAQVFVDDWLRTGDLGYRDGDGYFYIVDRLKDLIIVAGLNVYAREVEEVLQSHPRVRMAAVVGEFDELRGEVVHAFVEPISEQEPPEAQEIIRYCREKLADYKCPRRVTVMAELPRSTTGKILKRVLKEGFKGYSAQ

SEQ ID NO: 28170 - DNA, 1611 bp, Photorhabdus luminescens subsp. laumondii TTO1
  CDS (1)..(1611): transl_table=11
atgactgattctaattttttcttaagtgaatatgatggtgtcgcgctttcgcctatttcatttctaagacgagcaatactgagtaatggagatgatattgctgtcatagatggagaatgtcattggacttggagccaatatgcatctcggtgtgaaaggcttgcaatagctttgaaaaaaatgggcgtttgtaaagaaacagttgtgtccgcgcttctacccaatatacacgagcttcttgaattacattttgcggttccaatggcaggcggtatcttgaatgcgctcagtacccgaacggactcaaatactttaaattttatatttaaaaaacttaatcctaaggtattgtttattgatagaacctttatttcactgttggatgatgtttctctagacaaacaagtaaagatcatcgttattgatgtggatggcgcagtcatttcagaatcaatttctgaccgggaatttattcaatatgaatcgctgataactacgcataaatcgggagagttgtctttttctctacgagatgaacaagaggcgatcagcataaatgtaacttcaggaacaagtggacaacctaaacttattgtctattctcaccgtggcgtgtttcttaattctatttctaatgttctggattgggatataccaaaacgaccgacgttcttatggacgttaccaatgtttcactgtaatgggtggtgttttccgtgggctatcactgctcggggaggtacacacatctgtatgcgcaagtttgacgcagaagaagcgatattgctaatgcagaagcataaggtaacacactattgtggagcgcctattgtccattgcgcattaggtactattgcgcggaaacaagggctgcattttaaggagaaaattcatggattagtcgcaggtgcgccgcctacagagatgatgttttctctattagattccattggaatagcagtaacgcaagtctatggtatgactgagacatatggcccggtcgttgtgtgtgaagagaagagcgattgggagaagctctctaaatccgtaagaatatccaagaggatgcgtcaaggcattgtctcaaatttacaaggtcaagtttgtgttattgaggaaaatacgggattacaggtgccttttgatggaaagactgttggtgagcttgtaattcgtggaaatatggttgcatcttatgatccagatcggcatgtgactcttgatgcagcaagtcaatggcttttcacaggggatctggctgtcgttgaaaatgatggctatgtcagaattgtagatagaaagagagatattattatttctggtggtgagaatatttctagtctggaattggaaaatatactgtcaaactatcccggtgttttagctgccgccgttgtagcaaagccagattcacattggggtgaagtaccgtatgcatttatagagctcgaagaaacttcatcagttacagagtatgaattggacaattatatttgtacggtaatggcgcgctataagcgccctaaaggttatacttttttaactttacccagaaacgcaagtggaaaaatcataaaagggcaattgagacaattgattaggaattcctga

SEQ ID NO: 28171 - protein, 536 aa, Photorhabdus luminescens subsp. laumondii TTO1
MTDSNFFLSEYDGVALSPISFLRRAILSNGDDIAVIDGECHWTWSQYASRCERLAIALKKMGVCKETVVSALLPNIHELLELHFAVPMAGGILNALSTRTDSNTLNFIFKKLNPKVLFIDRTFISLLDDVSLDKQVKIIVIDVDGAVISESISDREFIQYESLITTHKSGELSFSLRDEQEAISINVTSGTSGQPKLIVYSHRGVFLNSISNVLDWDIPKRPTFLWTLPMFHCNGWCFPWAITARGGTHICMRKFDAEEAILLMQKHKVTHYCGAPIVHCALGTIARKQGLHFKEKIHGLVAGAPPTEMMFSLLDSIGIAVTQVYGMTETYGPVVVCEEKSDWEKLSKSVRISKRMRQGIVSNLQGQVCVIEENTGLQVPFDGKTVGELVIRGNMVASYDPDRHVTLDAASQWLFTGDLAVVENDGYVRIVDRKRDIIISGGENISSLELENILSNYPGVLAAAVVAKPDSHWGEVPYAFIELEETSSVTEYELDNYICTVMARYKRPKGYTFLTLPRNASGKIIKGQLRQLIRNS

SEQ ID NO: 28172 - DNA, 1650 bp, Rhodopseudomonas palustris CGA009
  CDS (1)..(1650): transl_table=11
atgagcaccccgcaaggtcactacagcatcggtctggacaagaccccggccaacttcgtgccgctgtcgccgttgagcttcctggaacgcaccgccaacgtctatccggagatgacctccgtggtgtacgaggggcggcactacacctggaaagagactcgcgcacgctgccgccgctttgcttcctggctgacccgcagcggcatcggccgtggcgacaccgtcgcggtgatgctgcccaacgtgccggcgatggtcgaagtgcatttcgcggtgccgatggccggcgcggtgctgaacgcgctcaacattcggctcgatgctgcggcgatcgcgttccagctcgatcacggtggcgccaagatcatcctggtcgatccggagttctccagcgtcgtcgccgaggcgctgaagctgatgaccaagccgaagccgctggtgatcgacgtcgacgacaagatgtatcccggtagccaccgtatcggcgaactggaatacgaatacgcggtcgcgtccggcgatccgaccttcgccggccatcgccccgaggacgagtgggacgcgatctcgctcggctacacctccggcacgaccggcaatccgaagggcgtcgtcacgcatcatcgcggcgcgtatctcaacgccgtcagcaacattctcgccggcaatctcggccagcatccggtgtatctgtggacgctgccgatattccactgcaacggttggtgcttcccgtggacgctcgcggccgcggccggcatcaacgtctgcctgcgcaaggtcgatccggccaagatcttcgaactgatcccgaagcacggcgtcactcatatgtgcggcgcaccgatcgtctacaacgcactgatcaatgcacctgaagcgccgaagggcgttccgacgaagcccgtggtcggcctgatcgccggcgccgcgccgccgatggcggtgctggccggcgccgagaccatcggcatcaagctgacgcatgtgtacggcctgaccgaggtctacggccccgcctcggtctgcgccgagcagcccggctgggacgagctgccggtcgccgagcgcgccaagctgaagcgtcgccagggcgtgccctacccgatgcaggaagccgtcaccgtgctcaatccggagacgatgcaggaagtgccgcgcgacggcgagaccatcggcgaggtcatgttccgcggcaatatcgtgatgaagggctatctgaagaacgagaaggctaccaaggaagcgctcgccggcggctggtttcacaccggcgacctcggcgtgctcgatgccgacggctacgtcatcatcaaggaccgctccaaggacatcatcatctcgggcggcgagaacgtctcgtcggtcgaggtcgaagacgtgctgtacaagcacccggcgatcctgttcgccgccgtggtcgccaaacctgatccgaaatggggcgaagtcccctgcgccttcgtcgagctgaaggacggcgccagcgccaccgaagccgagatcatcgcctactgccgcgaacacctccccggcttcaagaccccgaagagcatcgtgttctcgtcaatcccgaaaacctcgaccggcaagatccaaaaattcatgctgcgcgatcaggtgaagtcggcgaaggcgatcttggagtag

SEQ ID NO: 28173 - protein, 549 aa, Rhodopseudomonas palustris CGA009
MSTPQGHYSIGLDKTPANFVPLSPLSFLERTANVYPEMTSVVYEGRHYTWKETRARCRRFASWLTRSGIGRGDTVAVMLPNVPAMVEVHFAVPMAGAVLNALNIRLDAAAIAFQLDHGGAKIILVDPEFSSVVAEALKLMTKPKPLVIDVDDKMYPGSHRIGELEYEYAVASGDPTFAGHRPEDEWDAISLGYTSGTTGNPKGVVTHHRGAYLNAVSNILAGNLGQHPVYLWTLPIFHCNGWCFPWTLAAAAGINVCLRKVDPAKIFELIPKHGVTHMCGAPIVYNALINAPEAPKGVPTKPVVGLIAGAAPPMAVLAGAETIGIKLTHVYGLTEVYGPASVCAEQPGWDELPVAERAKLKRRQGVPYPMQEAVTVLNPETMQEVPRDGETIGEVMFRGNIVMKGYLKNEKATKEALAGGWFHTGDLGVLDADGYVIIKDRSKDIIISGGENVSSVEVEDVLYKHPAILFAAVVAKPDPKWGEVPCAFVELKDGASATEAEIIAYCREHLPGFKTPKSIVFSSIPKTSTGKIQKFMLRDQVKSAKAILE

SEQ ID NO: 28174 - DNA, 1653 bp, Geobacter sulfurreducens PCA
  CDS (1)..(1653): transl_table=11
atgaccgataccctgataccccgcaccccctcagcctacgactatcccctgctcatcaagagcctgctccgcaatcccgtggtcgacaaccccgaccaggaaatcgtctaccggggcgtgatccgccacacctaccgcgatctgcgcgagcgggtccggcgcctggccaatgttctcacgggcctgggggtcaaggcgggcgataccgtggcggtcatggattgggacagccaccgctacctggagcttttcttcgcggtgcccatgatcggcgcagtgctccataccatcaacgtccgcctctccccggagcagatcctctataccatcgaccatgccgaggacgatctgctgctggtgaacagcgaattcctccccattctggagcagatccggggcaggatcgacacggtgcgggggtatgtgctcctcaccgacgaggaaaagatgcccgagagccacatcccctttgtgggtgagtacgaggcgctcctggccgcggcctcaggcgagtacgattttcccgatttcgatgagaacacccgggcaaccaccttctacaccaccgggaccaccggcctccccaagggggtctacttcagccaccgccaactggtgctccacaccatgggagttatggcgtccctggggacggtcttcgcccatggccgcctccaccagggggatgtctacatgccgatcacccccatgttccatgtccacgcctggggcgtgccctatctggccaccatgctcggcatcaaacaggtctatccggggcgctactcgcccgatctgctcctggacctcatcgaaaaggaacgggtcacctttacccactgtgtccccaccatccttcatatgctcctcaagcatccccatgccaagcgggtcgacctggcgggattgaagatgatcatcggcggggccgccatgtcccgggccctctgctgcgaggcgctggagcgcggtatcgacgttttcaccggctacggcatgtccgagacctgccccattctgaccttctcacgtctcacgcctgaaatgctggcgggaagcccggccgagcaggccgaggtccgctgcctcacggggctgtcgctgccgttcgtggacctgcgggtggtggatccggaaaccggggcagagcagcctcgggacggccggagcgccggcgagatcgtggtgcgcgccccctggctgacccaggggtacctgaaggaccaccgtacctcggaaaagctctgggagggaggctttctccataccggtgacgtggcggtgcgggacgaacggggatacgtacggattaccgaccggaccaaagacgtgatcaaggtggcgggagaatgggtctcttcactggagttggaggatatcctggctcatcatcccgccgtggccgaagtggcggtcatcggccagcccgacgagaaatggggggagcgccccctggccctggtggtgctgaagcccgaggaggccggccgggtgggggaaaaggacctggcgcattttgtccgggaatacgccgacaaggggatggtcagcaagcaggtggtcctgctgaaagtgcggctcgtggatgccatcgacaagacgagcgtgggcaagatcagcaaagtgaccctgcgggagaagtacctggcatag

SEQ ID NO: 28175 - protein, 550 aa, Geobacter sulfurreducens PCA
MTDTLIPRTPSAYDYPLLIKSLLRNPVVDNPDQEIVYRGVIRHTYRDLRERVRRLANVLTGLGVKAGDTVAVMDWDSHRYLELFFAVPMIGAVLHTINVRLSPEQILYTIDHAEDDLLLVNSEFLPILEQIRGRIDTVRGYVLLTDEEKMPESHIPFVGEYEALLAAASGEYDFPDFDENTRATTFYTTGTTGLPKGVYFSHRQLVLHTMGVMASLGTVFAHGRLHQGDVYMPITPMFHVHAWGVPYLATMLGIKQVYPGRYSPDLLLDLIEKERVTFTHCVPTILHMLLKHPHAKRVDLAGLKMIIGGAAMSRALCCEALERGIDVFTGYGMSETCPILTFSRLTPEMLAGSPAEQAEVRCLTGLSLPFVDLRVVDPETGAEQPRDGRSAGEIVVRAPWLTQGYLKDHRTSEKLWEGGFLHTGDVAVRDERGYVRITDRTKDVIKVAGEWVSSLELEDILAHHPAVAEVAVIGQPDEKWGERPLALVVLKPEEAGRVGEKDLAHFVREYADKGMVSKQVVLLKVRLVDAIDKTSVGKISKVTLREKYLA

SEQ ID NO: 28176 - DNA, 1536 bp, Strongylocentrotus purpuratus
  CDS (1)..(1536)
atgccttcagttgatcgcttagcagccggtttggtatcgatcggggcgaagcgaggggatcgcatcggtatctggggacctaactccctggaatggacgcttacattgtttgcatgtgcccgtttaggcgccatcttggtcaaccttaaccctgcttacgtggagaacgaactggagtatgctttgaagaaggcaaacataaagctgatagtagcatcgacgcctttcaggacaatgaggtactatgatattcttgctagcatctgtcctgagctcgagaggtcacccccaggtcatctcaacagtcaacgcctaccagatttgaaatccgtaatcataatgggcaacgaccaacatcctggctccttagtcttcaatgacgtcattgatatgggaagggaggagcattatgacatcatcgaacagagaaagaaatctgtacaatttgacgatatcattaatatccagtttacatcaggtactactggtcatcccaaggcgacgtgtctcactcactttcaattaatcaacaacatggtgatcttagaaagcgtgaccaatgttgtcggaatcgacaaggcaggctgtgttcctatgcctctgtttcattgtggcggcatgtcatatcttatccttgggttggtcttcgggagtaagaccgtctttccgtccgctggtttcgatgccaccgcctgcttacgagctatacacgaggagagatgcgcacatttaattatggtaccaaccatggtcatcgattttcttcaacaccctaagctgtcgacctttgacctcagtcctctacaaagcctgtcttccggcggaagtgccgttccatcacaagtgcgaagggatgcagaagagttattgaaagtgaagacaaaggttctatacgggatgacagaagctgcccttggtgtattggtgtcgctagatactgacccggaatcagcccggatgaaaccggcaggccgtgcttttccttggatagagataaagattacgaacccgtcaacggacgaaatcgtggatgtaaacactcctggtgaactttgtattcgaggtccgtgtgtgatgtcggggtactttgacgatgacgagaaaaccaaggagaccatcgatcacgccaggtggcttcattcgggagatctcgcttcgatggatgaagatgggtacgttgagatcctgagtcgcattaaagacatggtgatcagaggaggagagaacattttccccgttcagatcgaaatacttcttcataaacatcccaagatcaaagacgttcaggtgattggtgtaccagatgctagaatgatagaagaactctgcgcatgtgtcaaactgaaagaaggagaaacgttaaccgaagatgaaataaagaatttctgcaaaggaaagatttcccatttcatggttccgcgctatgtgaggtttgtcaactcatatccgctaacacaaagtggaaagatccagaagtttcaactcagagaggatatcatcaaagtgatgagaaaagaagggatactaaacgagtaa

SEQ ID NO: 28177 - protein, 511 aa, Strongylocentrotus purpuratus
MPSVDRLAAGLVSIGAKRGDRIGIWGPNSLEWTLTLFACARLGAILVNLNPAYVENELEYALKKANIKLIVASTPFRTMRYYDILASICPELERSPPGHLNSQRLPDLKSVIIMGNDQHPGSLVFNDVIDMGREEHYDIIEQRKKSVQFDDIINIQFTSGTTGHPKATCLTHFQLINNMVILESVTNVVGIDKAGCVPMPLFHCGGMSYLILGLVFGSKTVFPSAGFDATACLRAIHEERCAHLIMVPTMVIDFLQHPKLSTFDLSPLQSLSSGGSAVPSQVRRDAEELLKVKTKVLYGMTEAALGVLVSLDTDPESARMKPAGRAFPWIEIKITNPSTDEIVDVNTPGELCIRGPCVMSGYFDDDEKTKETIDHARWLHSGDLASMDEDGYVEILSRIKDMVIRGGENIFPVQIEILLHKHPKIKDVQVIGVPDARMIEELCACVKLKEGETLTEDEIKNFCKGKISHFMVPRYVRFVNSYPLTQSGKIQKFQLREDIIKVMRKEGILNE

SEQ ID NO: 28178 - DNA, 1524 bp, Magnaporthe grisea 70-15
  CDS (1)..(1524)
atggagtccatgtcgacagacctagtcgcctaccacgccagggccaaccccaaagccctagccgccgttgagatagcgacggctcgctgctggtcctaccgtcagcttcacgatgatatcaacaaggcatgtgcagttctcgctgcgcacggtgtgcagaagggtgatcgtgttgcggtgctggcggccaacagcgtattcgtcgtcatcctgcagcaagcactcatgcggcagggtgcaatcattgttcctctgaactggagactttcggcctcggaaatcgggtccctgatcgaggactgctcgccaaaactcctattctgggacgccactctgagcttggcttggccagatttcgagccccatttcccagcactttgccaacgacttcccttccaagatttcatcacaaaactggaccagtcgacgttacccacctccccagtacagcaccaaaacgcatccaccgccacaagactgcccaacacgaccgccgccatcgtctacacgtccggcacgtcagggcgacccaagggcgtcaagatcacggcgcacaacctgctcgccaccgccatcaactacgccgtgctgggcgaggtggagcccacgtcggtgctgctgtgcgacgtgccgctcttccacctcatgggcctggccgtctgcgtgtggagcacgctgctccgcggcggcaccgtcgccatgtcgcggcgcttcgacgcctccgccaccaacgagcgcctcgcgcccaacttccggcccgcgcgctgggccgcgctccgcgcgctcttcacgggcggcgcgcccaacccccccgcccggatccgctggtggctcgaccgcggcgtcaggatggtgaacgggtatggcgccaccgaggcggggcatttcttcggcatgccgctggccgaggacgtgctccgccaaaaggccggctcggtcgggctggcgggccccatgaccgacgtcgagattgtggatccagagaccggggcgcccgtcctccccggcgagccgggggagattgtcgcgtctggcatgagcgtcacggctgggtactggggccgcgcggatcgagatggggggctcgaggttgtggagcacggggcgggggtgcgctggtaccgcacgggggatattggccggcaggatgaggacggcttcgtctacatcgtcggccggcgcaaggacatcttcatcaccgggggcgagagcgtcgcgcccggcgaggtggagacggcgctgatgcagcacccgctggtggccgaggctgcagtcgttggcgtgcccgacccgacgtggggggaagtcgggtacgcgtggcttgtgttggagcaaggtgtcaaagagcgtgtgtcgaaggaggatctcatctctcactgcgaaggactcatagggcgatacaagatcccgaagcattttagatgtacagagagtctgccacggacagggtctggaaagattatgaagcacgtgttgaagaagaaactcgagtcggaggggtttgggagggagaaagagcattag

SEQ ID NO: 28179 - protein, 507 aa, Magnaporthe grisea 70-15
MESMSTDLVAYHARANPKALAAVEIATARCWSYRQLHDDINKACAVLAAHGVQKGDRVAVLAANSVFVVILQQALMRQGAIIVPLNWRLSASEIGSLIEDCSPKLLFWDATLSLAWPDFEPHFPALCQRLPFQDFITKLDQSTLPTSPVQHQNASTATRLPNTTAAIVYTSGTSGRPKGVKITAHNLLATAINYAVLGEVEPTSVLLCDVPLFHLMGLAVCVWSTLLRGGTVAMSRRFDASATNERLAPNFRPARWAALRALFTGGAPNPPARIRWWLDRGVRMVNGYGATEAGHFFGMPLAEDVLRQKAGSVGLAGPMTDVEIVDPETGAPVLPGEPGEIVASGMSVTAGYWGRADRDGGLEVVEHGAGVRWYRTGDIGRQDEDGFVYIVGRRKDIFITGGESVAPGEVETALMQHPLVAEAAVVGVPDPTWGEVGYAWLVLEQGVKERVSKEDLISHCEGLIGRYKIPKHFRCTESLPRTGSGKIMKHVLKKKLESEGFGREKEH

SEQ ID NO: 28180 - DNA, 1707 bp, Nasonia vitripennis
  CDS (1)..(1707)
atgcttacctcctgtagaatcgtgactcgcaaactaaaacttaagccaagttgcttgagagctctacgttttgacaagtacagcaccaaggtgctaaaaagccattatggtgaagtcgaagtgccagatcagacgcttagccaatacgttttctccaaatcggaaaactggaaaaaccgcccgtctctgacatgcggcaccacgggaagatcctacacgttcggtatgagcaaggacttctgcagacgcggtgccgaggctttactgtcaaacacgggcctgcggcctggagaccgggtcggtctattgctgcccaatgtgccggagtactcgttggcggttcacgcgagtctgcaggccggcctcgtcgtcacctttgccaatccgttgtacacggctcacgagctcacgagacagttccaaagcgccaaggtcagatgcatagtcaccataccgcagctgatggagacggcccaggcggtcgccaacaatctggagaactacgactgcacaatcaatatcggaggaaaggctgtgccggataagaaaattttgggcctggagtctctgctgatcccttcacagtccatccagctgcccgaagtcaagcccgacgacttagcggtgctaccctacagttccggtaccaccggagtacccaaaggcgtgatgctgacgcaccgcaacctggtgatgaatatctctcaactcatgcacccgggaatcgtcaaagtgaacgaaactacggacgacttccaggaaacggtcctcaccgttctgcctttcttccacatctacggcttcaatatgatcctcaattacacgaccttagtcggtacccacattgtcaccatgcccaagttcacaccgcaagattacgtcgagtgtttgatcaagtacaagccgtcggtactgttcgtcgtgccgtcgctgctgttattcctggtgacgcatccggagatcacggcacagcatctgtcgagtgtaacgcaaatcttctgcggggctgcgccgatgaagaaaggacttatcgatacgttcctgcaaaaaattaatcgccaagactgccacatatcgcaaggttacggaatgaccgagacaagtcccggaataacgttgactccttacacaatgccgtacgagaagagcggcagctgtggccgactcctaccgtctacgactgcacgagttgtggacccagctacgaacgaagacgtgtcagggcccaaccaacccggtgagcttctggtcaaaggtccccaggtgatgaagggctacctcgacaaccagaaggccaccgacgaggtcattgactctgacggctggcttcatactggtgatgtcgtctactacgacgaggacgagtacttctacatcgtcgaccgcacgaaggagctgattaaagtcaagggtaaccaagtctcgccaacggagctggagtacataatcctggagatacccggagtagcagatgcagcggtggtcggtatccctgacacctttgcaggagagctgcccaaggccttcgttgtgaggaagccaggtttcgaaaatgtcacccccgaccacgtccaggaattcgtcaaccccagggtggcggcgtacaagaagctggctggaggcgtcacgttcgtcgacgcgatcccaaggaatccgtccggcaagattatgcgcaacgaactgaagaagatagcgagctcgtcataa

SEQ ID NO: 28181 - protein, 568 aa, Nasonia vitripennis
MLTSCRIVTRKLKLKPSCLRALRFDKYSTKVLKSHYGEVEVPDQTLSQYVFSKSENWKNRPSLTCGTTGRSYTFGMSKDFCRRGAEALLSNTGLRPGDRVGLLLPNVPEYSLAVHASLQAGLVVTFANPLYTAHELTRQFQSAKVRCIVTIPQLMETAQAVANNLENYDCTINIGGKAVPDKKILGLESLLIPSQSIQLPEVKPDDLAVLPYSSGTTGVPKGVMLTHRNLVMNISQLMHPGIVKVNETTDDFQETVLTVLPFFHIYGFNMILNYTTLVGTHIVTMPKFTPQDYVECLIKYKPSVLFVVPSLLLFLVTHPEITAQHLSSVTQIFCGAAPMKKGLIDTFLQKINRQDCHISQGYGMTETSPGITLTPYTMPYEKSGSCGRLLPSTTARVVDPATNEDVSGPNQPGELLVKGPQVMKGYLDNQKATDEVIDSDGWLHTGDVVYYDEDEYFYIVDRTKELIKVKGNQVSPTELEYIILEIPGVADAAVVGIPDTFAGELPKAFVVRKPGFENVTPDHVQEFVNPRVAAYKKLAGGVTFVDAIPRNPSGKIMRNELKKIASSS

SEQ ID NO: 28182 - DNA, 1734 bp, Nasonia vitripennis
  CDS (1)..(1734)
atgcttggggactccaggcacgcggctatcgttctccaaaagcgtcggcactccgtatctaccgcagcggctctcccactgccggacaagccgaaactctcatacctgcgcaacccgggcagcagacccctcctggagacgacgatcggcaagctcctggaaactgccgccggaagatggcccgagcgcgattgcgtcatctcgatccaccaaagctcccgactgacctacggggaactccttctccgagccgacaagctcgccgcaggcttaaaaaagctgggcctccgcaagggcgacaggatcggtatctggggaccgaacgagatcgagtggctcatcagctatatgggagccgccagagccggtctcatagtcgccggtatcaacccctactatcagctcggtgaactgcactactgcctgaaaaaaatcggcgccaaagccgtcctcgcacccgagagctacaggacccagaggtacgcggagatgctgctgaccgtcaagaagaatctgccgatgctggatcatatcatcgtttacgccgacgatcacgtgacaggaacgaggcgattccgcgacgtcgagagtctagcggatagaaaggaggtagagatggtaaaggaggaacaggtggaaatctcgccgtacaatgggaccaatattcaattcacttccggcacgacggggaaccccaaggctgtgctgctttcacagaggggactggtcaacaattcgagacaggcggtaacgaggctcgacacggacggccgaaaaatctgcctcaacgtcccgtacttccacgcgttcggtatggtgatgggaatcgtgggtccgcttcacgccggatccacggtcgtactggaaagtccgactttcaatccgatcaagtccatcgaggccataatcgctgagaagtgtagcgtctgcttcggtaccccaaccatgtggaccaacatgattgacgtgcaaactcggacgggggccaagatcgatacgctgtacaccggatcgaccggaggggcacctgcttcgccggacctttacaagagggtgagggagtgtttgaggatggagaggataaagtccatatacggcctgacggaaaacacggcgatcgtcaatcaggctcttcccgaggaggataatcagctcacggagacgaccatcggatacatttccgatcacttggagatcaaagtcatagacgagaagggcgagatggttcccttcggtactccaggcgagttgtgcaccaggggctacagcataatgttgggctactgggacgacgaggagagcacgaggaaggcgatcatggaggacgaatggctgaagactggagatcaatacgtgcttcgcgaggatggatacgggatcatcgttggaagactcaaggacatgatcatcaggggcggagagaacatctacccgaaggaaatcgagcactttctggaatcacacccctcgatactggaggtccacgctttcggcgtccacgacgacgtctacggcgaggagatgtgcgcctgcgttcgtctgcgctccggagctaaaatcagcgtcgatgatgtcgtgaattacgccaaggggaagatagccaaattcaagatcccgaggtacatcgtcttccgcgaggagtttccgaagaccaccagcggcaagattcaaaagtacaaattgagacaggagatggaggatcagggaatcgtgccgaaagcgccgcagagctga

SEQ ID NO: 28183 - protein, 577 aa, Nasonia vitripennis
MLGDSRHAAIVLQKRRHSVSTAAALPLPDKPKLSYLRNPGSRPLLETTIGKLLETAAGRWPERDCVISIHQSSRLTYGELLLRADKLAAGLKKLGLRKGDRIGIWGPNEIEWLISYMGAARAGLIVAGINPYYQLGELHYCLKKIGAKAVLAPESYRTQRYAEMLLTVKKNLPMLDHIIVYADDHVTGTRRFRDVESLADRKEVEMVKEEQVEISPYNGTNIQFTSGTTGNPKAVLLSQRGLVNNSRQAVTRLDTDGRKICLNVPYFHAFGMVMGIVGPLHAGSTVVLESPTFNPIKSIEAIIAEKCSVCFGTPTMWTNMIDVQTRTGAKIDTLYTGSTGGAPASPDLYKRVRECLRMERIKSIYGLTENTAIVNQALPEEDNQLTETTIGYISDHLEIKVIDEKGEMVPFGTPGELCTRGYSIMLGYWDDEESTRKAIMEDEWLKTGDQYVLREDGYGIIVGRLKDMIIRGGENIYPKEIEHFLESHPSILEVHAFGVHDDVYGEEMCACVRLRSGAKISVDDVVNYAKGKIAKFKIPRYIVFREEFPKTTSGKIQKYKLRQEMEDQGIVPKAPQS

SEQ ID NO: 28184 - DNA, 1740 bp, Magnaporthe grisea 70-15
  CDS (1)..(1740)
atggcctcaatacaaccagcaacgagcatagaggctcccgccgtcgagcgggagaggctctcgatcctgcacgggccggtcgacccgccgctggtggactttacgctgggcgagctgttggagctgcagtgccagcagtacggaaccgaggagtgcgtcgtgatcccctggacgggcgcgcgctggacctacaacgagctgaaccagcagagctgcctgatcgcccgggcgctgctgtccatgggcgtcggcatgggcgaccgggtgggcatcatggccggcaactgtgagcagtacattgctgtctttttcgccgttgccaggatcggtggcatcctggtgattctcaacaatacgtatacaaagacggaggcgcagtatgctttgggctttacagattgcaaggtattttttactacccgccacattggccgactagacaacgagctactgctggccgagctggccgaacagccaggctctccaacggtcgtcatactccgtggcgactcgggcaggttcatgacgtgcaaggatgtgttgcacagcggcatcaggtacagcccgcgcagtctgcacgaggcgcagctaaaggtgcttccgtacaacgtctgcaacctgcagtttaccagcgggacgacaggcaggcccaaggctgccatgttgacacatcacaacctcgtcaacaacgcccgctacatcggcgaccgcatgcgtctcacacctgcagacgtcttgtgctgcccccctcccctcttccactgcttcgggctcgtcctgggcatgctggcaaccatcacgcacggcggcaaggtcgtgtatcctgccgaggtctttgatgcgccggcgacgctccgcgcggtccaagaggagggctgcaccgcgctgcacggcgtgccggccatgttcgactccctcctcgcgctgccggaagcccagaagctcaaggcgtcggacctcaagctccgcacgggcatcgtggcgggggcgccggtgccgcgacacctgatggagcagatggtgtcccggctgggcatgggcgagttcaccagcagctacgggctgacggaggcgagcccgacgtgcttcaacgccttcacggacgacgtggtgtcgcggcggctgacgacggtggggaggctgatgccgcacgcacacgccaagattgtggaccacgacggcaacgtggtgccgctgggccggcgcggcgagctctgcatcgcggggtaccagctgcaggcgggctactggaacaactcggagaagacgggcgaggtcatggtgcgggacgagaacggcgtgctgtggctcaagacgggcgacgaggccgtgttcgacgccgacggctactgcagcatcaccggcaggttcaaggacatcatcatccggggcggcgagaacatctacccgctcgagatcgaggagcgcctggtccagcaccctgccgtcgccaccgccgtcgtcgtcggcctcaagtcggagcgcctcggcgaggtggttggcgccttcctgggccccgccgacagccacggccagaggagcctgcccgacgacgccgaggtgagggagtgggtcagggccaagctggggagccacaaggcgccgtcccatgtgttttggcttgggcaggggggagtgccgagcgaggtgccgttgacgggcagtgggaaggtgaggaagtttgaaatggcgaatctggggaacaagttgattgaggacaaggtgaaggcgaagctgtga

SEQ ID NO: 28185 - protein, 579 aa, Magnaporthe grisea 70-15
MASIQPATSIEAPAVERERLSILHGPVDPPLVDFTLGELLELQCQQYGTEECVVIPWTGARWTYNELNQQSCLIARALLSMGVGMGDRVGIMAGNCEQYIAVFFAVARIGGILVILNNTYTKTEAQYALGFTDCKVFFTTRHIGRLDNELLLAELAEQPGSPTVVILRGDSGRFMTCKDVLHSGIRYSPRSLHEAQLKVLPYNVCNLQFTSGTTGRPKAAMLTHHNLVNNARYIGDRMRLTPADVLCCPPPLFHCFGLVLGMLATITHGGKVVYPAEVFDAPATLRAVQEEGCTALHGVPAMFDSLLALPEAQKLKASDLKLRTGIVAGAPVPRHLMEQMVSRLGMGEFTSSYGLTEASPTCFNAFTDDVVSRRLTTVGRLMPHAHAKIVDHDGNVVPLGRRGELCIAGYQLQAGYWNNSEKTGEVMVRDENGVLWLKTGDEAVFDADGYCSITGRFKDIIIRGGENIYPLEIEERLVQHPAVATAVVVGLKSERLGEVVGAFLGPADSHGQRSLPDDAEVREWVRAKLGSHKAPSHVFWLGQGGVPSEVPLTGSGKVRKFEMANLGNKLIEDKVKAKL

SEQ ID NO: 28186 - DNA, 1764 bp, Magnaporthe grisea 70-15
  CDS (1)..(1764)
atgtcgggccctccctcccgcctgaaggcggtcctcggccacctcggcctagccaatgcaggggcggaagccacgcaaggcactgggcgaccgaaccacctgcacgcgctttcgccaaccctcttccttcaacgtgccgccgccatcgagccagaagccgaggccgtcgtgcacgtgaccgccaacggacgcaccctacgccgatcctacgctgagctggcggatcgcgcgcgtgggttggcctactatctcgctaagaagggcttcttccgcgtcggcatcctggcccccaacaccccggccttcctcgagagcatctatggcgtcaatgcctccggcggcgttatcgtgccggtcaactatcggttgaagcaggaggatattgcttacatctttgaatttgcaaacgtggacgccataatcgtcgatgctgagtttgtcgggctgttggaactttaccaaaaagatcacgtgaatgtgccgttgatcattgacacggatacggacgccactgaaggcgagctcagtggcccttttgacgagtgtattgctcaggggctgcagcatgaccgcgaggcgggaggcaagggctgggacggcttgtgccagcagcccaatgacgaggatgacattatagccatccccttcacctcaggcaccacgtcaaaacccaagggcgtcgaatacacacatcgtggcgcatatcttgctgcccttgccaacattgtcgagtctgggctgaattataatgttgggagatgtaaatacctgtggacgcttcccatgttccacgccgtcggttggacgtttccatgggctgtaacagccgtgcgaggcacgcacgtctgcctccgcaagatcgactaccccttgatctggcgcctgctgaccggggagcgtgtgacgcacttcaacgccgccccgaccgtctgcacgctgctctgcgccgccgacgaggcccagcggctgcccgacccaccggtgcgcgtgacggttgccgcgtcgccgccgacggcgcacctattccggcagatgacggagctgaacctctcgcccgtccacgtctacggaatgaccgagacgtacgggcccatcacaaagggctaccacatgccggcgtgggagacgctgcccgaggccgacaagttcgcccgcatggcccgccagggccacggcttcctcaccagccttcccatcaggatcgtgaagcctgaagaagccgagaatggcgtgctgatcgacgtcgccaaggacggcgtcgagattggcgagattgtcttcgccggcaacatctgcgcaaagggctactacaacgaccccgaggccacaaaaaagatgtttgccggtggcgtgcttcactctggcgacctggccgtgtggcatccggacggaagcgcgcagatcctggataggcaaaaggacataatcatctccggaggtgagaacatatcctcggtcgccctggagagcatgttagtccagcatccggacgtcctcgaggccggcgtggtggccgtccccgactcacattggggcgaaaggcccaaggcttacgtgacggtcaggaggagcaaggaagcaggcatggagccattgacggggcaggggctcatagactgggccaagcaccagagtgccatatcaaagttcatgatccccagggaggttgagatcgtcgacgagctgcccaagacgagcaccggcaagatcaagaagaacgagctgagggagtgggccaagcatggaaagagtagcctagaataa

SEQ ID NO: 28187 - protein, 587 aa, Magnaporthe grisea 70-15
MSGPPSRLKAVLGHLGLANAGAEATQGTGRPNHLHALSPTLFLQRAAAIEPEAEAVVHVTANGRTLRRSYAELADRARGLAYYLAKKGFFRVGILAPNTPAFLESIYGVNASGGVIVPVNYRLKQEDIAYIFEFANVDAIIVDAEFVGLLELYQKDHVNVPLIIDTDTDATEGELSGPFDECIAQGLQHDREAGGKGWDGLCQQPNDEDDIIAIPFTSGTTSKPKGVEYTHRGAYLAALANIVESGLNYNVGRCKYLWTLPMFHAVGWTFPWAVTAVRGTHVCLRKIDYPLIWRLLTGERVTHFNAAPTVCTLLCAADEAQRLPDPPVRVTVAASPPTAHLFRQMTELNLSPVHVYGMTETYGPITKGYHMPAWETLPEADKFARMARQGHGFLTSLPIRIVKPEEAENGVLIDVAKDGVEIGEIVFAGNICAKGYYNDPEATKKMFAGGVLHSGDLAVWHPDGSAQILDRQKDIIISGGENISSVALESMLVQHPDVLEAGVVAVPDSHWGERPKAYVTVRRSKEAGMEPLTGQGLIDWAKHQSAISKFMIPREVEIVDELPKTSTGKIKKNELREWAKHGKSSLE

SEQ ID NO: 28188 - DNA, 1788 bp, Gibberella zeae PH-1
  CDS (1)..(1788)
atgtcaccgttcctccgctgcatcgcccgtcggcgccatactactaccgctacctccgtcagcatcctccggcccgctgctacctccagaatgctctccacgcttccgcgtttaccgctcttcgaggcggtttctaaacatgaccccgactccaaggtcgtcgtccattctatctccggtcgaacctttaagtatggagagcttctgggcgatgtgagtcgcgcaaggggtcgcatcgctgaagctgctggtcggcgggatctcaatggcgagcgcattgcgttccttgttgagaatagctatgactacgtagtgacgctcctggctgcaatggctgcgcgttccatcgctgtgcccctgtctcctgcattccctgcgccggaactacaatatattcttaaccagagcgaagcttcattgctagtctcgtctccgaaattcgcatcaaaagctaaagaggttcttgcgacggagctaaacaccaagccggcgcatcttgaactccaaaagcatcaaggtggaggtaatcatgaaaaggttgagctaggtgatgccgaccccggcgaagctggcatgatgttgtatacttcaggcacaaccaacaaaccaaaaggagtcctactgccacaagctgtcttgacagcccagtctcgttctctcactgaagcctggaactactcaccctctgatcatctcctccatgtccttccactccaccatatccatggcacggtgaatgccattctcacacctctgcttgccggctcgacgattgaattcatgttcccctttaacgccgatgctgtctggaagcgcttttcatcacccttcctacccaacgacgcatctataccaaaagagaaaatcacctttttcacagtcgttcccaccgtgtacagcaaactcttgtcttcacacaagagtctcccccctgatatgcaagaagcttctcgcaaggccatctctccagagaacatgcgcctttcaatctccggctccgccgctctcccaacccctatcaagactgcttggaaagatctcagccacggcaacgtgctcctcgagcgttatggcatgaccgaggttggtatggcactaagctgtggacttgacttctccgatcgtgtagatgccagtgttggctggccattaccatctgtcgaagcccggctggtcgatgtcgacactaatgatgtgatcaaggagggagaagaggttgatgcgcaaggtcgtgaacgctctggagaaatccagcttcgtggaccaaccatcttccgcgagtactggcgcaacccatcagcaacggcgagcgagttcgtcgagggcgaagacggtcagggggagtggttcaagacaggtgacgttgcggtccgccgaccagttccctctgccaacgctgcccaatcctggaaccatggccccctttacttcatccaaggccgcaagtccgccgatatcatcaagacaggcggcgaaaaggtgagcgctctagaagtcgagcgtgaactcttgtctttgcctcaagtctccgaggcggctgtcgtggctgtgcccagtggtcaatggggtcacaaggtcggtgctgtactggttctagataccgacgttgtcaagaagtggtctgcgctcgacatgcgccgagctctcaagggacgtctcgcaagttacaagattccccaagtgatgaggcttgttgatcaaatcccccgaaatgctatgggcaagatcaacaagaaacagttggtcaaggccatctttcctgacgacataagcggcgatgaaagctag

SEQ ID NO: 28189 - protein, 595 aa, Gibberella zeae PH-1
MSPFLRCIARRRHTTTATSVSILRPAATSRMLSTLPRLPLFEAVSKHDPDSKVVVHSISGRTFKYGELLGDVSRARGRIAEAAGRRDLNGERIAFLVENSYDYVVTLLAAMAARSIAVPLSPAFPAPELQYILNQSEASLLVSSPKFASKAKEVLATELNTKPAHLELQKHQGGGNHEKVELGDADPGEAGMMLYTSGTTNKPKGVLLPQAVLTAQSRSLTEAWNYSPSDHLLHVLPLHHIHGTVNAILTPLLAGSTIEFMFPFNADAVWKRFSSPFLPNDASIPKEKITFFTVVPTVYSKLLSSHKSLPPDMQEASRKAISPENMRLSISGSAALPTPIKTAWKDLSHGNVLLERYGMTEVGMALSCGLDFSDRVDASVGWPLPSVEARLVDVDTNDVIKEGEEVDAQGRERSGEIQLRGPTIFREYWRNPSATASEFVEGEDGQGEWFKTGDVAVRRPVPSANAAQSWNHGPLYFIQGRKSADIIKTGGEKVSALEVERELLSLPQVSEAAVVAVPSGQWGHKVGAVLVLDTDVVKKWSALDMRRALKGRLASYKIPQVMRLVDQIPRNAMGKINKKQLVKAIFPDDISGDES

SEQ ID NO: 28190 - DNA, 1989 bp, Gibberella zeae PH-1
  CDS (1)..(1989)
atgcgacaaaacttaccaacagaatccgctaccagcggaaatgtacaagacttgtactatcccgacaacatgcttgctcgccaccccagcaagcctcatatcggcagtctggaggagtaccagcaaatgcaccagctctccgtaacagagcccgatgctttttggggaaacctcgcccgcgaacttctcacatgggagcgtgatttccacaccgtcaagagcggatctctcatcgagggcaacccttcgtggtttctcggcggaaagctaaacgcttctttcaactgcgtggaccgccatgcgctcaaggaccccaacaaggtcgctatcattcacgagaccgacgacggcaccaatggccagtccatcacttacggagagctcctcaagcaggtcagcaaggtttcttgggccctcaaggatctaggcgtgaaaaagggcgacaccgtcgctatctacatgcccatgattcccgaggctctggtcgccattcttgcctgtacccgtatcggcgctgttcactctgttgtttttgctggattttcagctggttctttgagagatcgcgttgagaacgccaagagcaaggttgtcatcaccactgacgagagccagcgaggtggcagaacgattggtatcaagaagattgtcgacgaggccttgtcaactctcgagggtgttcaaactcttgttttcaaacgaacaggcgctgatgtcgcttgggtcgagggacgggatcactggtggcacgaacaagtcgccaagtggcccagctacatcgcccccgaggccatggacgccgaggaccctctgttcctcctctacacctctgggtcaaccggcaagcccaagggtgtcttgcacacaaccggtggttaccttgtcggagctgctgccacaggcaagtacgttttcgacattcacgaccaggaccgatacttttgcgctggcgatgtcggttggatcacaggccacacctatgttgtgtacgcgcctctcctcctaggtgtttccaccgttgttttcgaaggaacacccactttccccaacgcttctcgattttgggacattatcgccaaccatcgtatcacacacttttacgttgctcctactgctctccgtctgctgaagcgagctggctctgaccctgttgatcacgacaccaacagccttcgtgttttgggttcagttggcgaacctattgctcctgagatttggaagtggtactacgacattatcggaaagggcaattgtcacattgttgacacttactggcagactgagactggttctcatgtcgttactcccctcgccggtgtcacacctaccaagcctggatccgcgtgcttgcccttcttcggtatcgacactgttctgattgaccccgtctctggtgtcgagctccacggaaacggagtcgagggcgttctcgctttcaagtcttcatggcctagcatggctcgcacagtctacggtgaccaccaaagattcgaggagacctacctcaaggtttaccctggatactacttcactggtgatggagctgcccgtgatgacgatggtttctactggatccgcggccgtgtcgacgatgtaatcaacgtcagcggtcaccgtctctctaccgccgaaatcgaagccgcaatggtcgaacacgctgccgtcgccgaatccgccgttgttggtgtcgcggacgaagtcacaggccaatccgtcattgcctttgtttgcctcaaggaagctttccgctccagggagaccgaagtgcacgccgagttgagactgcaggtccgcaacagcatcggaccctttgctgcgcccaagaagatctttgttgtgcctgatctgcccaagacacgatctggaaagatcatgcgacgtgttttgagaaagattgtcatgggtgagcaggatcagcttggagatatttctactttgtctgatccctcgatcgtcgagaagattatcgatattgtccagcgtggttaa

SEQ ID NO: 28191 - protein, 662 aa, Gibberella zeae PH-1
MRQNLPTESATSGNVQDLYYPDNMLARHPSKPHIGSLEEYQQMHQLSVTEPDAFWGNLARELLTWERDFHTVKSGSLIEGNPSWFLGGKLNASFNCVDRHALKDPNKVAIIHETDDGTNGQSITYGELLKQVSKVSWALKDLGVKKGDTVAIYMPMIPEALVAILACTRIGAVHSVVFAGFSAGSLRDRVENAKSKVVITTDESQRGGRTIGIKKIVDEALSTLEGVQTLVFKRTGADVAWVEGRDHWWHEQVAKWPSYIAPEAMDAEDPLFLLYTSGSTGKPKGVLHTTGGYLVGAAATGKYVFDIHDQDRYFCAGDVGWITGHTYVVYAPLLLGVSTVVFEGTPTFPNASRFWDIIANHRITHFYVAPTALRLLKRAGSDPVDHDTNSLRVLGSVGEPIAPEIWKWYYDIIGKGNCHIVDTYWQTETGSHVVTPLAGVTPTKPGSACLPFFGIDTVLIDPVSGVELHGNGVEGVLAFKSSWPSMARTVYGDHQRFEETYLKVYPGYYFTGDGAARDDDGFYWIRGRVDDVINVSGHRLSTAEIEAAMVEHAAVAESAVVGVADEVTGQSVIAFVCLKEAFRSRETEVHAELRLQVRNSIGPFAAPKKIFVVPDLPKTRSGKIMRRVLRKIVMGEQDQLGDISTLSDPSIVEKIIDIVQRG

SEQ ID NO: 28192 - DNA, 1728 bp, Gibberella zeae PH-1
  CDS (1)..(1728)
atggctcttcattcacgatggtctcagcctatcccgaaatgctcactccagcaatggatattcggctcgagcaatggacccatggaagacgccgataaatccattctcattgatgcagaccgcccagacacacatttcctcaccaaatctcaataccgattgctgtccaagcaagtggcactcggtctcatcaagaacggcgttcaaccacaaagcagagtcctcgtattttctgccaacaatgtctacttcccgagcgtatttctcggcattcttatggccggcggtattttcactggcgccaatccgtccttcacgccccgagagcttgcctaccagctccagaactccgaggccacgcacatgtttgttcatgcaggccagctgcctactgctttgaaggcggccgaggaggttggattgaagaaggagaatatctttgttcttgatccctctgttctcccacctgtcggacccaacccagctcttccagctgctcgagacgatggtcttcgcttgtggaccgagttaatagcagataaccacgagcaagcgaaatcttggcaatgggtcgagccgcaagatccagaggacacagcttgttgtttaaactacagcagtggcacaactggagtccccaaaggtgttgagatttcgcatttctcgtacgttgcaaatggctcaggcgttgtcatgatgtcagacatggagcccgatcctgaacaccgaaagcacgcaaagggtttggcctttctgcccatgtaccatgcgtatgcacaaacttattacgtctctatctaccccaaggtcagcatccctgcctacatcatgcccagcttcgactttgagaagatgctacagcacattcaacgcttccgcgtcacaagtctgctgtgcgtccctcccatcctggtatatctgtccaagcaccctcttgtcaagaagtacgatctcagcagtgtcaatcgtgtcagctctggagcggcgccgctgagccacgaagtcattcataacgttgagaagctatggccgtcgggcgatgtcaccgtcaagcaaggctggggcatgacagaggtgacgtgtacttgcatgacatgggatcctcgacacaagacagaccctgacaaggtgggagagctggcgccgaattgctcggccaagatcatggaattagacggaaagacacagattaataagccaaacgaacgtggtgagctttgggtcacgggtccaacgctgatgaaaggatattggaagaacccaagtgctacagaatccactatttccgttgatgaagatggcacaaggtggttgaagacaggcgacattgcgtatgttgatgccttcaaaccaggaggcattttccacatcgtcgatcgtatcaaggaactcatcaaagtcaagggcaaccaagttgcacccgcagaactggaagcggtgctcttggaccaccccgagatagcagacgccgcagtcattggcatcccatttgaaggagatgaggcccctcgtgcctacatcgtcaaggcccccgggtcccagcttaccgagaagcaagtggtggattggatggaaagcagagtggcgagatataagcgcctcaagggtggcgctacattcgtggacatgatcccaaaaaacccatctggaaaaatccttcgacgagcgctgcgagataaggcgaaggcggaaatggatgccaacaaagcaccttcttcacgcctctag

SEQ ID NO: 28193 - protein, 575 aa, Gibberella zeae PH-1
MALHSRWSQPIPKCSLQQWIFGSSNGPMEDADKSILIDADRPDTHFLTKSQYRLLSKQVALGLIKNGVQPQSRVLVFSANNVYFPSVFLGILMAGGIFTGANPSFTPRELAYQLQNSEATHMFVHAGQLPTALKAAEEVGLKKENIFVLDPSVLPPVGPNPALPAARDDGLRLWTELIADNHEQAKSWQWVEPQDPEDTACCLNYSSGTTGVPKGVEISHFSYVANGSGVVMMSDMEPDPEHRKHAKGLAFLPMYHAYAQTYYVSIYPKVSIPAYIMPSFDFEKMLQHIQRFRVTSLLCVPPILVYLSKHPLVKKYDLSSVNRVSSGAAPLSHEVIHNVEKLWPSGDVTVKQGWGMTEVTCTCMTWDPRHKTDPDKVGELAPNCSAKIMELDGKTQINKPNERGELWVTGPTLMKGYWKNPSATESTISVDEDGTRWLKTGDIAYVDAFKPGGIFHIVDRIKELIKVKGNQVAPAELEAVLLDHPEIADAAVIGIPFEGDEAPRAYIVKAPGSQLTEKQVVDWMESRVARYKRLKGGATFVDMIPKNPSGKILRRALRDKAKAEMDANKAPSSRL

SEQ ID NO: 28194 - DNA, 2091 bp, Gibberella zeae PH-1
  CDS (1)..(2091)
atgtcaattgataagcttgcgccttctgctgcagcacctccttccgaggacagtgtcctttggcaacacccagatcccaagtccactcatatgtggaagtttcttgagcatgtcaacaaaaagcacggtctgagtcttgacggctacccagcgctctacaagtggtctatcgacgatgtttcttcattttgggaggaagtctggcattttaccggtgtcacagcgtctaagtcttttgacgaggtcctccctcaaaatgctcccatgtatcctcggcctgacttcttctccggctcgcttctcaactttgccgaaaacctactctttcccgcaacttctccacaacccgaaccttcggccccggctgtgataaccgtgaccgagttgcccaactccacagtgactacttcgtgggccgagctccgtgacgccgttcgccgctgctccaatgctctgcgcgcagccggcctcaagcccaacgatgttgtggcgggttttgtctctaaccatgttgaagcaattgttgctatgctcggagcggcagcgataggcgccatttggaccggtatcagtcccgacaatggcgtttcagccgtactagatcgtctaaatcagatcgctcccaaagttctattcgcggacaatggcactgtctacaatggtaaggagtggtctagcgtgtcaaaaacgacagagattgtgggtgcattgaaggataatggtcttgaaagggtggttgtgatcaacaacatcagctccggaggtcttggcctcgaagaacttgagaaacatggagtggtagctgttgactacaccaaaatgcttgagtctgcttcagaagagcccctgaaattcgagcaacttcctccaagccatcctctatatgtcctctattccagtggaaccactggtcttcccaaggccattgttcatacggctctgggtacgctgctccaacataagaaggagcatctcctccattgctcactcgactcgacatcccgaatgctctactacacgactacctcctggatgatgtggcactggagtattggagctctcgccgtgggatccaccgtcgttgtatactctggttctcccttccgacctcatgcccatctctcactcccacgtctcctctccgatctcgaggtcactcactttggtacttcggctgcctatctgactgctttggaagccaataatgtctaccctgtccgtgacagctcgatcgatctctctcgattacaggctatttactcgaccgcctcgcctcttcctccatctaccttcaaattcgtttacgaagccttccccaagcacatcaacctcggctccatcactggtggcacagatatcatctcgctgtttggtgccccttgtccacttcttcctgttcgtgttggtgagatccagtgtgcaggtctcggtatggctatccgtgctgtcgactcagctacaggagagtcaatcaatgccgatgagcccggcgatctcgtttgtgttaagccgttcttgtgtcaacctctcacattcttcggtcctagcggagaggccaagtacaagtcggcatactttgagcgtttcgaagacatttgcggagtggatggtgctgtatggcatcatggtgacttcatcaagatcccagacccttcaactggaagcctggtcatgcttggtcgatcagatggcgtgctgaagccgtctggtgtacgtttcggatctgctgagatctataacattctcacacgcttctttgctgccgagattgaagatgccgtgtgcatcggacgtcgacgagagacagactctgatgagactgtttgtctttttgtggtaatggttcccggacacgaattcaacgatgacctccgtctacggatcaagtccaagatcaaggctgagttgagccctcgacacgttcctggagtggtcgaggagtgtggagcgggcgtgcccaagacgagtaacggaaagaagatcgaagttgccgtgaagcaaatcctttccggcatgaaggtcaaaaccaacgccagcgttgcgaaccccgaagcactagattggttcaagagttgggcagagactcgctga

SEQ ID NO: 28195 - protein, 696 aa, Gibberella zeae PH-1
MSIDKLAPSAAAPPSEDSVLWQHPDPKSTHMWKFLEHVNKKHGLSLDGYPALYKWSIDDVSSFWEEVWHFTGVTASKSFDEVLPQNAPMYPRPDFFSGSLLNFAENLLFPATSPQPEPSAPAVITVTELPNSTVTTSWAELRDAVRRCSNALRAAGLKPNDVVAGFVSNHVEAIVAMLGAAAIGAIWTGISPDNGVSAVLDRLNQIAPKVLFADNGTVYNGKEWSSVSKTTEIVGALKDNGLERVVVINNISSGGLGLEELEKHGVVAVDYTKMLESASEEPLKFEQLPPSHPLYVLYSSGTTGLPKAIVHTALGTLLQHKKEHLLHCSLDSTSRMLYYTTTSWMMWHWSIGALAVGSTVVVYSGSPFRPHAHLSLPRLLSDLEVTHFGTSAAYLTALEANNVYPVRDSSIDLSRLQAIYSTASPLPPSTFKFVYEAFPKHINLGSITGGTDIISLFGAPCPLLPVRVGEIQCAGLGMAIRAVDSATGESINADEPGDLVCVKPFLCQPLTFFGPSGEAKYKSAYFERFEDICGVDGAVWHHGDFIKIPDPSTGSLVMLGRSDGVLKPSGVRFGSAEIYNILTRFFAAEIEDAVCIGRRRETDSDETVCLFVVMVPGHEFNDDLRLRIKSKIKAELSPRHVPGVVEECGAGVPKTSNGKKIEVAVKQILSGMKVKTNASVANPEALDWFKSWAETR

SEQ ID NO: 28196 - DNA, 1728 bp, Gibberella zeae PH-1
  CDS (1)..(1728)
atggcgaccgaaatcacgaacgtaccctccgcaccgtcgcggcaacaacaaaagctatccgtgcttgaaggccctgtcgaccctccgttagttgacttcacattgggtgagctgcttgagcttcagacttaccagcatggcaaccaagagtgtcttgtcatcccatggaccggtgcccgctggacgtacaatgagctgaaccagcagagttcttctttggcacagtctttgctggacatgggcattggagttggtgaccgcgtcgcaattatggccggaaactgtgagcagtacgcagctgtcttctttgccgtagccaaaatcggcgccattcttgtcatcctcaacaacacctataccccgacggaagccatgtatggcctgaagttttctgatagtaaaatcttcttcacaacaccaagaatcggccgactcgaccaaacgcaactgctacaacaactcgagaacaagaagacggctcccaaggtggtgatgcttcgaggagatgaaactggcaaatatgagacctatgatagtttggttactgctggtcgtcgacgaaatcaccagcgtctgtatcaagccatgacaaaagtgctgccacatcaagtggtcaatctccaattcacaagtggaacaaccgggcttcccaaggctgctatgctcacacaccataatctggttaacaactcacgatttattggcgatcgtatgcggcttggacctgctgacgtattgtgctgtcctccgcccttgttccactgcttcggtctggtgcttggcctccttgctgttgttactcatggcggcaagattgtgtacccagctgaagtatttgatattcaagcgacactccaagccatctctgatgagcaatgtaccgctgtccatggcgttcccgccatgtttgattccctcttccaagccaaatggcccgaaaatttcaactgcgacaacctgcgcaccggaatcattgctggtgcaccagtgccgcgatatctgatggagcttcttgtcaatcgtttcggaatgactgaatttaccagcagttacggtctcactgaggcatcgccaacttgctttaacgcattcaccgacgattccatcgatactcgtcttacaactgttggtacgctgatgcctcatgcgaaggccaagattgttgatcgcgatgggaatattgttcccgttggtgagcgtggagagctttgcgttggcggttatcagctacaggccggatactggaacaactcagagaagaccaatgaaaccatggctagggatgcttcaggtgttctttggcttcatactggtgatgaagctgtattcgatgagaatgggtattgctcgattactggccgcttcaaggatatcattattagaggtggagagaacatctatccgctcgagatcgaggagcgcctgatggaccatcctgcaattactcgtgctattgtggttggtctcaagaacaagcactatggcgaggtcgtgggtgcctttgttgagctagccgacggtcatcagaagcctgaattcgaggaacttaaggactggtgtcgcaagagactcggcggtcacaagtcaccagcccacgtcttctggttgggccatgatgatgtgccagcgacagttcctctgacaggaagtggtaaagtgcgtaaattcgagatggcgaagttgggtgatgatcttttgcgaaagcaggaaaacgtatcgaagctgtaa

SEQ ID NO: 28197 - protein, 575 aa, Gibberella zeae PH-1
MATEITNVPSAPSRQQQKLSVLEGPVDPPLVDFTLGELLELQTYQHGNQECLVIPWTGARWTYNELNQQSSSLAQSLLDMGIGVGDRVAIMAGNCEQYAAVFFAVAKIGAILVILNNTYTPTEAMYGLKFSDSKIFFTTPRIGRLDQTQLLQQLENKKTAPKVVMLRGDETGKYETYDSLVTAGRRRNHQRLYQAMTKVLPHQVVNLQFTSGTTGLPKAAMLTHHNLVNNSRFIGDRMRLGPADVLCCPPPLFHCFGLVLGLLAVVTHGGKIVYPAEVFDIQATLQAISDEQCTAVHGVPAMFDSLFQAKWPENFNCDNLRTGIIAGAPVPRYLMELLVNRFGMTEFTSSYGLTEASPTCFNAFTDDSIDTRLTTVGTLMPHAKAKIVDRDGNIVPVGERGELCVGGYQLQAGYWNNSEKTNETMARDASGVLWLHTGDEAVFDENGYCSITGRFKDIIIRGGENIYPLEIEERLMDHPAITRAIVVGLKNKHYGEVVGAFVELADGHQKPEFEELKDWCRKRLGGHKSPAHVFWLGHDDVPATVPLTGSGKVRKFEMAKLGDDLLRKQENVSKL

SEQ ID NO: 28198 - DNA, 1767 bp, Gibberella zeae PH-1
  CDS (1)..(1767)
atgtcggatcctccttctcgcattcgttctatcctcagtcatcttcgtcctcatccagcagcgcctgtcaactatcacacactatcccctacaacatttcttgagcgcgctgctgccattgagcctgatgctgaagccatcttccacatcactgtgaatggagctgtactgcgtcgctcctatgccgagtttgctgatcgcgctcgtggcctggcttactatctcctcaagcacggctatcggcgcgtaggcgtcctcgctcccaacacgcctgctttcctcgagtccatctacggcatcgttgcggcaggcgctgttattgttccagcaaactaccgtctaaaacaagaagacatcgcctacatcttcgactttgctgaagtggattgcattattgttgacaatgagtttgttggcttgcttgatgcgtacaaggagaagcacgagaatgtgcccttgattgttgatatggttgattttctcccccacgaacaggcagaagcttgttttaaggctgttgctaaccttgcttatcaggataatgatgctactgtgggtcaattgtctggtccttttgatgatgccgttctcgagggcttgaaacatgatatcgcccaaggaagccaaggctgggcgggccttcattctcaggcccggagcgaggacgacatgcttgccattccctttacttcagggacaacttcaaagcctaagggtgtcgtctacacacatcggggttcttacctcgccgccatggccaacattgtcgagtcaggcctaaatattgggcgttgcaaatacctatggaccctaccaatgttccatgcagtaggatggaccttcccctgggccgtcgttgcagtgcgtggcaccaacgtctgtcttagaaagatcgattatcctctcatctggaagctactgaaggaagaaggtatcacacatttcaatgcggcccccacagtcaatacgttactggtagcggccaaggaagctgaaaaactaccacatgaggtcaaagtcacggtggctgctagccccccaacaggatacctttttgaacaaatgacaaaactaaatcttatccctgtccatgtttacggaatgacagaaacatacgggcccagcactaaatgctacactctacctgagtgggatagtctacctcctacagaaaaatacgcaaaaatgtcccggcaaggacatggcttcataaccagtctaccaatccgcatcatcaagccagaccagccgcaaggggttcttatcgatgttgcgaaggatggcaaggagattggcgaaattgtctttatgggaaacatctgcgccaaagaatactacaaggatcccgcagctacacgggaactttttgcaggaggcgttcttcactcgggtgacttagcagtgtggcacccagatggcagtgctcagatccaagaccgcgcgaaggacattatcatctctggaggcgagaacatctcgtccgttgctcttgagagcatgttggcccagcacccagatattcttgaggctggtgctgtcgccgttccggattctcactggggtgagaggccgaaggtctatgtcacagtcaaggatggcaagagcgtaactggagatgagattattcagtgggccaaacatcaaagtgacattagcaggtttatggttcccagagaggtagagatcgtggacgagctacccaagaccagcactggcaagatcaagaagaacgtgcttagagagtgggctaagcatgggaggacatag

SEQ ID NO: 28199 - protein, 588 aa, Gibberella zeae PH-1
MSDPPSRIRSILSHLRPHPAAPVNYHTLSPTTFLERAAAIEPDAEAIFHITVNGAVLRRSYAEFADRARGLAYYLLKHGYRRVGVLAPNTPAFLESIYGIVAAGAVIVPANYRLKQEDIAYIFDFAEVDCIIVDNEFVGLLDAYKEKHENVPLIVDMVDFLPHEQAEACFKAVANLAYQDNDATVGQLSGPFDDAVLEGLKHDIAQGSQGWAGLHSQARSEDDMLAIPFTSGTTSKPKGVVYTHRGSYLAAMANIVESGLNIGRCKYLWTLPMFHAVGWTFPWAVVAVRGTNVCLRKIDYPLIWKLLKEEGITHFNAAPTVNTLLVAAKEAEKLPHEVKVTVAASPPTGYLFEQMTKLNLIPVHVYGMTETYGPSTKCYTLPEWDSLPPTEKYAKMSRQGHGFITSLPIRIIKPDQPQGVLIDVAKDGKEIGEIVFMGNICAKEYYKDPAATRELFAGGVLHSGDLAVWHPDGSAQIQDRAKDIIISGGENISSVALESMLAQHPDILEAGAVAVPDSHWGERPKVYVTVKDGKSVTGDEIIQWAKHQSDISRFMVPREVEIVDELPKTSTGKIKKNVLREWAKHGRT

SEQ ID NO: 28200 - DNA, 1758 bp, Gibberella zeae PH-1
  CDS (1)..(1758)
atgccctttctatcatctcccgacagcgcgaccacgcttcagcgctcatcattccttgaggctatccagaaacatgagccagcttcgcttgcagttttggagaatgattctggagctaccttctcttatggtactctactcaagagcatcgcccacgctaaagaccagctgttgagcaagaccggcagaacggatgtctctggtgaaagaattgctttcatggtggaaagtggttatgaatatgtcgtcacactcttggctattcttgcctctaatgccattgctctaccattggcaccagctttccccgcacctgagctgcgatatatccttgaaaacagccaagctcttgttctcatctcatcctccaaatacgcctccaaagcagaggaagtcatcagccaggacctggccagcccaccactattctaccagctcgatggaaccggtcacgctactgccgaggagaaggagattgagcttggagaactttcgaattctcagcaaggtggaatgatgctctttacttccggaacaaccgccaggcccaagggtgtggtactcacacaagccaatctcactgcgcaagcatctagtcttttggaagcgtggcgatactcacctagtgatcgacttttgcatgtcttgcctcttcaccacatccacggcacagtcaatgctcttcttacaccacttctggctggaagcagcgttgagttcatgtttccgttcgtcgtcgacaaggtctggaaacgattgacggcgccttttcagacagcagcaggcgaaaaggcacaggtccccatttcattcttcaccgcggtgccaactatctgggcccgtatgctaaagtcatatgactctttgtcaccagagatgcaaaaggccggcaaggaagccatttcccctcgaaacctacgactcaacttttctggatcagctgccctaccaaagccaatccgcgatggatggattcaactttctgaaggcaatattcttctcgagcgttatggaatgacagaggtcggaatggccttgtcgtgtggtctcgccgacgtcgaccgtgtggacggttctgttggctggcctcttccttccgttgaggcgcgtctgatggagactgatgatgaaactggtgtccaaactgtcgttcaaccaggagacgagatcgactctgctaccggaaaggaacgtatcggagagattcagctgcgtggacctaccatcttcaccggttactggcgcaaccctgaagccacagccaaggaattcactgaagatggatggttcaagactggcgacatcgccatccgccgaagtgtaccgggctctggtaagggtgagtctggttcttgggctcaaggaccagcatacttcatccaaggccgccgaagcgccgacattatcaagacaggtggcgagaaggtgtcagccctcgaagttgagcgagagattctgtccctagaccaaattgatgagtgtgctgtcgttggacttccctctgaatcatggggtcagaaggttgctgccgtggtagtcctgtcacagaagggcgatgagaagatgacgttgccacaattacgagctgctctgaagccaaggatcacagcgtacaagataccccaggatttggagattgttgagacgttgccgagaaatgccatgggcaagattaataagaaggagttgatcaacagtgtatttggacctgtggagaagattagaaggagaagtattgatttgggagccagacgatag

SEQ ID NO: 28201 - protein, 585 aa, Gibberella zeae PH-1
MPFLSSPDSATTLQRSSFLEAIQKHEPASLAVLENDSGATFSYGTLLKSIAHAKDQLLSKTGRTDVSGERIAFMVESGYEYVVTLLAILASNAIALPLAPAFPAPELRYILENSQALVLISSSKYASKAEEVISQDLASPPLFYQLDGTGHATAEEKEIELGELSNSQQGGMMLFTSGTTARPKGVVLTQANLTAQASSLLEAWRYSPSDRLLHVLPLHHIHGTVNALLTPLLAGSSVEFMFPFVVDKVWKRLTAPFQTAAGEKAQVPISFFTAVPTIWARMLKSYDSLSPEMQKAGKEAISPRNLRLNFSGSAALPKPIRDGWIQLSEGNILLERYGMTEVGMALSCGLADVDRVDGSVGWPLPSVEARLMETDDETGVQTVVQPGDEIDSATGKERIGEIQLRGPTIFTGYWRNPEATAKEFTEDGWFKTGDIAIRRSVPGSGKGESGSWAQGPAYFIQGRRSADIIKTGGEKVSALEVEREILSLDQIDECAVVGLPSESWGQKVAAVVVLSQKGDEKMTLPQLRAALKPRITAYKIPQDLEIVETLPRNAMGKINKKELINSVFGPVEKIRRRSIDLGARR

SEQ ID NO: 28202 - DNA, 1908 bp, Gibberella zeae PH-1
  CDS (1)..(1908)
atgcagactgtaatacgtcaaagtcttagaaagacatgtttatcgacaaggacggccgttagaacatgtcaactaagacggctttcttcatctaatctcagtattcgatggggtcctcaagatcctcccctctataatggaacaatcccagaacacttcgcctcagtcgtctcagcacacggcgaccgcgaagcagtcattgcccgcactccaacccctcactctcacgagtcaacactaacatactacgcccttgactctctatccaacagcctcgctcactcactctcctcactgggtgttcgcaagggcgaccgcgtagccgtttctctcggcaacgggcctgaattcgcagctctgacgtacgcctgcttcaagctcggcgccattctcgtgccgttgaatccaggcttcaatgagcaccaggtcatagcggcgctgaagcacttggctatcaagacactcatcattggtgccgtgacagatctagcgtataaacctggacgcggaagaagtaacgagcatcttcttcgcagcgtagttggagatgtatcggcttcgaagatccagagcgaagctgtcccctctttgtgcaacgtggtggttttcgataacctagcgtgccatccagacatcaaatttgacctcaaggggtgtcgagcgtttaccccttattcttcgctggtcgacggatcagttaactcagtgaagcctgattctcccttgtcaccaagcgacgttatcaatatccagttcacatcggggactacttcgatgcccaaggcggctatgctctcgcatcgtgctattctcaacaacggtgctttgatagcgcatcggatggggcttcacgcagacgatcgtatcgtggtgcctccgccgctgtttcactgctttggctgtgtgttgggatacatggcgacggctaccacaggtgctagtattttgttccccagtccggcctttgatcctgaagcaactttacacatggtcgttgaccacgaagctaccggtctttatggtgtgaacaccatgctcgttgctgttctcgaggctctcaaccgaggagacgtcgttcctcatgaccccaaacacctaaccaagggtattgtagccggtagcagtgtgccgccttctctaatgagcacactatataagcgtctcggtcttgacgatctcgttatctgctatggtatgaccgagacagcgcctgtgagctgcatgaccagtccttcagatccaattgacaagcggacttcatccatcggtaaggtcatgcctcacacagggctcaagatcgtcgatcccttagaccacagcaagatcctccccgttggaaagagaggcgagctggcgacagcaggatacctcgtcatggagggctattacggcgacgaggcccgcacatctgaagtccgcgtaccagatcccgaagacggaacagtgtggatgtactctggcgatgaggccgagatggatgagcaaggctacgtccaaatcacaggccgaatcaaagatctcattatccgcggcggagaaaacattcatcctttagaagtagaagactgtctcctgacccacaaaggcgttcgagaagccagtgtgataggagttcccgacgagcgatacggcgaagcagtcgcagctttcatcattcctgcaagaggatggacgccgttagatcatatgaaagacgtggcagtggatgaggaaaaggttgatgaggacggtgttttaacgagagacgggttgaggcaatgggtcgcgacgaagctgtctaagcatctcgcacccaagtatgttttctggatcgacgagtatcccaagacaccaagtggaaaggtgcagaagttcaagttgaaggaatacgcaaaggaaattctgggagatgaggacggcaaggcatag

SEQ ID NO: 28203 - protein, 635 aa, Gibberella zeae PH-1
MQTVIRQSLRKTCLSTRTAVRTCQLRRLSSSNLSIRWGPQDPPLYNGTIPEHFASVVSAHGDREAVIARTPTPHSHESTLTYYALDSLSNSLAHSLSSLGVRKGDRVAVSLGNGPEFAALTYACFKLGAILVPLNPGFNEHQVIAALKHLAIKTLIIGAVTDLAYKPGRGRSNEHLLRSVVGDVSASKIQSEAVPSLCNVVVFDNLACHPDIKFDLKGCRAFTPYSSLVDGSVNSVKPDSPLSPSDVINIQFTSGTTSMPKAAMLSHRAILNNGALIAHRMGLHADDRIVVPPPLFHCFGCVLGYMATATTGASILFPSPAFDPEATLHMVVDHEATGLYGVNTMLVAVLEALNRGDVVPHDPKHLTKGIVAGSSVPPSLMSTLYKRLGLDDLVICYGMTETAPVSCMTSPSDPIDKRTSSIGKVMPHTGLKIVDPLDHSKILPVGKRGELATAGYLVMEGYYGDEARTSEVRVPDPEDGTVWMYSGDEAEMDEQGYVQITGRIKDLIIRGGENIHPLEVEDCLLTHKGVREASVIGVPDERYGEAVAAFIIPARGWTPLDHMKDVAVDEEKVDEDGVLTRDGLRQWVATKLSKHLAPKYVFWIDEYPKTPSGKVQKFKLKEYAKEILGDEDGKA

SEQ ID NO: 28204 - DNA, 1707 bp, Gibberella zeae PH-1
  CDS (1)..(1707)
atgccaattgaatcgcgtttctcagttcaagttcccaactgctcgatacaacaatggatctttggctcatcttcaggtccattgccggacaaaaaggccttcatcgatgctgatcatccccaagatcgctacttcacttacagtcaagcccggttacttgcgaagcgtatagctgttggtctaactgacaatggcctcaggccaggggatcgtgtgcttctttttgcccacaacagtatcttcttcccaactattgtgatgggtatctggatggccggaggcatattcactggagcaaaccctggctatgtcgctcgtgaacttgttcatcaattgaaggatagccaggcaatgttcattatttctgaccacggtgctttaggggtggctttggacgcatcctcccaagttggcatgaaaccgtctcaagtatttgtgttggattcaacatggccagatacttcaattgagatacaaccctctaaaggaagcaggcattggacagaactcatcgcagccaagtcaaggggtgagacttttgaatggactgagccggaagactccaagaattcaatctgcagtatcaattacagctcaggtactactggaatacccaaaggcgtggagatctcacactacaatcatgtcgccaatagccgtggcgttacactcttccaccagcttcatccggaatttgaggctcgacgagatcgtgccgctgctctatgtttcctcccaatgtatcatgcctttagtcaaggctacttcatcaccagctttccatatgagcgagttcctgtctacatcatgccttcttttgagttccctaaaattctcacccatatccagactttcagaattacaaaacttctagccgttccgcctatcctagttctcatctcaaaacacccactcgcacgcagtgcggacctcagtagcatcgacatgattgcgtctggtgctgcaccattggcgagagatacacaacgtgagatagcaggcatgatacccttgggtgaggccgtcgttcggcagggttggggaatgaccgaagctacttgtactgcactgtcgtgggaccctaataaggccccaagctctgcggccggcgaactgacgccagattctcaagccagactggtcgacatcgaaactggcgaggaaatcaacactgccaacactcctggagagttatggattacgggtcccaccgtgacccgtggttactggcgcaatcctattgcgacacaagaggcctttgttgtcgactctgatggcactcaatggcttcgcactggagacgtcgcttatgtggaggaatatgcaaagggaactcttttccacattgtggatcgtgtcaaagaactcatcaaagtcaagggcatgcaagttgctcccgctgaactcgagtctcttcttcttgaaagagaagatgttgccgatgccgctgttgtaggggttgttatcgatggtgaagagtttccacgcgcctatatcgtcaaaacgccgaacggaaagaatacatccaaacaggatattgcagactggttagcgagccgtgttgttaagtacaagcaacttataggcggcgtggtctttgttgaatccatccccaaagttccttcaggcaagattctgagaaaagtacttcgtgagagagcaaagcgcgaagttagcaacggccttgaggtgcgcgccaagctatag

SEQ ID NO: 28205 - protein, 568 aa, Gibberella zeae PH-1
MPIESRFSVQVPNCSIQQWIFGSSSGPLPDKKAFIDADHPQDRYFTYSQARLLAKRIAVGLTDNGLRPGDRVLLFAHNSIFFPTIVMGIWMAGGIFTGANPGYVARELVHQLKDSQAMFIISDHGALGVALDASSQVGMKPSQVFVLDSTWPDTSIEIQPSKGSRHWTELIAAKSRGETFEWTEPEDSKNSICSINYSSGTTGIPKGVEISHYNHVANSRGVTLFHQLHPEFEARRDRAAALCFLPMYHAFSQGYFITSFPYERVPVYIMPSFEFPKILTHIQTFRITKLLAVPPILVLISKHPLARSADLSSIDMIASGAAPLARDTQREIAGMIPLGEAVVRQGWGMTEATCTALSWDPNKAPSSAAGELTPDSQARLVDIETGEEINTANTPGELWITGPTVTRGYWRNPIATQEAFVVDSDGTQWLRTGDVAYVEEYAKGTLFHIVDRVKELIKVKGMQVAPAELESLLLEREDVADAAVVGVVIDGEEFPRAYIVKTPNGKNTSKQDIADWLASRVVKYKQLIGGVVFVESIPKVPSGKILRKVLRERAKREVSNGLEVRAKL

SEQ ID NO: 28206 - DNA, 2226 bp, Yarrowia lipolytica CLIB122
  CDS (1)..(2226)
atgctgagacctcgagctccttccaccctccgtcgagcttctacacaactctcggcacggccacagggcatcacaggcccccaaagaagctttcatctcgcttgcagccgacccactagatctacgacttcggaggaagaccggcctaagtggttgactcccagaaatgtacgactaggctctttacctttctcacgacttctccagggtcattcccagcgactgtactcgggtttgtctactcctggcatatctgaggtcactggctgctcttctccagctctgattgagtcccactcgtgggactattacacaacaccagcgcagcgggaattgtggggctcgaagggcgaataccctgcactgatttcagcgtaccaacagcctgatattgcaaacgccattctggatcgaactagcgattacacaaacgaaactcacctctcattctcggagctgctcaagctctctaacttgtttgccgactctttgtacgcccacgctcgtgaacaaggccttgttttcaaatcaggagactctgttgcggtgtgtggcggtaatgtctgggaatacactgccctccagatgggtctctcgaagctcggactggtgctggttcccctcaaccctgcatttacggcaaaccagtttgcagctgccctggccgccacagaggccaaggctctcataatgacctcccatctccctggtggaaaggacaaagccactggcaagatgaccttgaagtcagctgctcccatttgccaagaggtcatcgacaacttgaatgcttctggcaagtcgaagctgaagcttctcatcaatttggcttccggtgaaactcctggagctgacaccatcaaggatgtgaagtttcagggctcccaatcggacatgcatgaaatcgttttccaacacaagaaggctgttgccaatggtaccctccctgcatctgtacccaccgagatcagacgactcacagctaccgttaaccccgatgacatcaccaacatgcaattcacctccggaaccacatcgcagccaaaggtgtcctgcttgacgcatcgaaacctgctcaacaatggtcatctcattggaacccggatgggcctcaagcctgccacaggtcctgctgttaatggaattgcccccaaccaggaccgtttgtgcatccctgttcccatgtttcactgctttggtctagtactgtctaacctggctgccctgaccactggtgctgctttggtctatccctccgagtggttttgtgctcgttctgcaatcgacaatgttcgaaagtataagtgcactggtctccatggtgtccctaccatgtacgtggctgagctggagtatctgaaggacctggagctcaaggaggcaaaggcccccgggcagaatttccttcctggctttgaactgctccgaactggtatcgctgctggatctgctgtgcctggagaactcatgactaagcttggccagtccatgaatctcaaagcactcactatctgttacggaatgacagagaccgctcccgtgactttcatgacacgtcctgacgatcctgtcgagaagcgagttgaaactgtcggtcagattatgcctcacacctcatgcaggatcatcaagtcccagcaggaggacctttctgaatctgagcttgacttcactccattggccactggccagaagggcgagatcatcacttccggctatgcgctacagaaatactacaaggacgatcccaaaaagacctctgctgctatggttgtcgatcccgccaccggcgtgcgatggatgcgaactggtgatgagggttgcatggacaatgagggattcctcaaggttacaggtcgactcaaagatctgatcattcgaggcggggagaacatccacccactggagatcgaaaacgtgctttttgctcacgataagattgcccaagcatctgtggtgggtgttaaggaccccaagtatggtgaagctgtttgtgcctttgtcacaccccacgctttcttccacaagggccaccagcatgttaagcacgatgactcggacaagctcacgattgagcaagttcaggagtgggttcgaaacaagcttggccactacatggtgcccaagtatgtattctttgttggcgattatcctaagactgcttctggcaagattcgaaaggtggatcttcgaaagacagctgagtcacagctgggcctgtgctaa

SEQ ID NO: 28207 - protein, 741 aa, Yarrowia lipolytica CLIB122
MLRPRAPSTLRRASTQLSARPQGITGPQRSFHLACSRPTRSTTSEEDRPKWLTPRNVRLGSLPFSRLLQGHSQRLYSGLSTPGISEVTGCSSPALIESHSWDYYTTPAQRELWGSKGEYPALISAYQQPDIANAILDRTSDYTNETHLSFSELLKLSNLFADSLYAHAREQGLVFKSGDSVAVCGGNVWEYTALQMGLSKLGLVLVPLNPAFTANQFAAALAATEAKALIMTSHLPGGKDKATGKMTLKSAAPICQEVIDNLNASGKSKLKLLINLASGETPGADTIKDVKFQGSQSDMHEIVFQHKKAVANGTLPASVPTEIRRLTATVNPDDITNMQFTSGTTSQPKVSCLTHRNLLNNGHLIGTRMGLKPATGPAVNGIAPNQDRLCIPVPMFHCFGLVLSNLAALTTGAALVYPSEWFCARSAIDNVRKYKCTGLHGVPTMYVAELEYLKDLELKEAKAPGQNFLPGFELLRTGIAAGSAVPGELMTKLGQSMNLKALTICYGMTETAPVTFMTRPDDPVEKRVETVGQIMPHTSCRIIKSQQEDLSESELDFTPLATGQKGEIITSGYALQKYYKDDPKKTSAAMVVDPATGVRWMRTGDEGCMDNEGFLKVTGRLKDLIIRGGENIHPLEIENVLFAHDKIAQASVVGVKDPKYGEAVCAFVTPHAFFHKGHQHVKHDDSDKLTIEQVQEWVRNKLGHYMVPKYVFFVGDYPKTASGKIRKVDLRKTAESQLGLC

SEQ ID NO: 28208 - DNA, 1758 bp, Yarrowia lipolytica CLIB122
  CDS (1)..(1758)
atggccaagggcaagctgtcgtctggcggcgtcaagagctctgtggcggacaaaaccaccgcggcagccatccacacgctgccccgaatccagggagacgacactgtctacgtgcccgacaaggtgaaccgacacaacatgaacccgacctacttcctgccccgagcggccgagatcgagcccaacgccaaggcctacatccacaagggcgccgacggcgttcgtgtggagcgcacctacggcgagatggccgaccgagtgctgggactcgccacctacttcaaaagcaaggagtttaagcgggtggccatctgtggacccaatacgcccgcccacctcgagaccatgttcggagccgtggccgcaggtgcctacgtgctgggcctcaactaccggctcaccatgggcgaaatcacctacaagatggagctgggagacgccgactgcgtcgtggtcgaccgggagtttgtgcacctgatctcgcccgagatccgagcaaagtgccaggtcattgtggacgacgatgtgtctggagcctccaagccccagcagcccggagagattctctactccaatgtcgtccagcagggcatgcagctggctaaggagcaaaagacaacctgggacaatctgcacgtccagaacgaagacgaagacgaaattctaggcctcttctacacgtctggaaccaccggaaaacccaaggccgtcgagtacacccatcgatccgtctacctgtgtgccatgtccaacatcatcgaggctggtctcaactgcgagaccgtcgatggacacaaccgatgccactatctgtggactctgcctctgttccacgccgccggttggaccttcccttactcggtgacggcggttcgtggcacacacgtgctgctgcgaaagattgagcccgattacatctgggatctgcttgttgacgaccgaatcacccacttcaacgccgcccccaccgtcaacaacatgctggtgaacaaccccaaggcccgacgtctcccccagaccgttcgtgtcaccgttgctgcctctcctccctccgcagctctcttcaacaagatgttcgacatgaaccttcaccccgtgcacatgtacggcctcactgagtcctatggcccgtttgtgcgaaactacttcctgcaggactggcacggagccactggcgatgagcggtacgctctcatggcccgtcagggattcgcctttgtcggctcgcagtctgtccaggtgattgccaacaacgacatcaaccagcccgtaccccgaaatggacaggagattggcgagattgtgtgccgaggaaacgcagtcatggcccgatatcacaaggaccctgaggccacggccaaggcgtttgagcagggctggttccacaccggcgatctggcagtcgtcaaccccgacggctccatcaagattctcgacagaaagaaggacattatcatttccggcggtgagaacatctcttccgtggccgtcgagggcatcatctgcaagtatgacaacgtcctggaggttgctgtggttggcatccctgacgaaaagtacggtgaggtccccaaggcgttcctgattctgaaggacaagtccaagcctttcgacactgacaagatgattgcctggatgcgggagcgaatgggtgcctaccagattcctcgacaggtgtctgtggtcgacgatctgccccgaacctccactggtaagatcaagaagaacgttcttcgagactctgtgcaggctgcctag

SEQ ID NO: 28209 - protein, 585 aa, Yarrowia lipolytica CLIB122
MAKGKLSSGGVKSSVADKTTAAAIHTLPRIQGDDTVYVPDKVNRHNMNPTYFLPRAAEIEPNAKAYIHKGADGVRVERTYGEMADRVLGLATYFKSKEFKRVAICGPNTPAHLETMFGAVAAGAYVLGLNYRLTMGEITYKMELGDADCVVVDREFVHLISPEIRAKCQVIVDDDVSGASKPQQPGEILYSNVVQQGMQLAKEQKTTWDNLHVQNEDEDEILGLFYTSGTTGKPKAVEYTHRSVYLCAMSNIIEAGLNCETVDGHNRCHYLWTLPLFHAAGWTFPYSVTAVRGTHVLLRKIEPDYIWDLLVDDRITHFNAAPTVNNMLVNNPKARRLPQTVRVTVAASPPSAALFNKMFDMNLHPVHMYGLTESYGPFVRNYFLQDWHGATGDERYALMARQGFAFVGSQSVQVIANNDINQPVPRNGQEIGEIVCRGNAVMARYHKDPEATAKAFEQGWFHTGDLAVVNPDGSIKILDRKKDIIISGGENISSVAVEGIICKYDNVLEVAVVGIPDEKYGEVPKAFLILKDKSKPFDTDKMIAWMRERMGAYQIPRQVSVVDDLPRTSTGKIKKNVLRDSVQAA

SEQ ID NO: 28210 - DNA, 1683 bp, Aspergillus nidulans FGSC A4
  CDS (1)..(1683)
atgccatttagatcgcgctggcagattgagatccccaatacacatctcgcatctcttcttctcacatcacccactgaacctttgtctaaaacgcaccgatgcttctccgaagcggctcgtccagatacgcactacttcacgacccatgactttcgcctctggagccagagattcgcagccgggctgcgcaagtcgggcctccagaagggtgaccgggtgttgctcttctcgggcaacgacatattcttccctgtaatattcatggggatcatcatggcgggggggattttcaccggcgcgaaccctacctttgtcgctagagagcttgcctaccagttgcaggatagcggggcgatttatctcctctgtgcagaagatagtctagacactggtattgaggcttcgaagattgcggggttggatatggacaaggtgtttgtgttcaacaatgcactttatgatggaaagggggaggggatgaaagggtgtcgatattggggggagctggttgccagcgttgaggagggggcaggatttgcgtgggaggagctggacacaccggagaaagctaacaccacgcttgcgctgaattacagtagtgggacgacggggaggccgaagggggttgagatctcgcacaagaattatgtctcgaacatgttgcagtacaaccaccttttttacctgaacccgaactggagggagaaggcgaaacgggcaagatggctatgcttcctgccgatgtaccatgcaatggcgcagaacatcttcattgcagccgcactcaaccggggagtgcctgtgtacgtgatgccgaaattcgatttcattaagatgctggagtatacggaaaaatttcgcatctcggactatattctggtccctccggtggtggttgcactggcgaagcaccctgctgtgaagagcgggaagtacgatttgagcagtgtggaagatattggtagcggagctgcgccgttgggtcgagaagtctgcgaagaggtcgaagccttatggccacctgggaaaatcaatatcaagcaaggctggggaatgacagaggccacatgctccatcctcggctggagtcccatggagaaatgccttacggcatcagttggagagctcaatcccaactgcgaagcaaagattgtcgccgacgacggggtaacggaattaggcaagaatcagcgcggagagttgttggttcgcggcccgaatgtcatgaaaggatactggcggaacccgcaagcaactaaggagaccctgacagaggacggatggttgaggacgggagatatcgcctttgtcagtaatgaagggtggttccatgttgttgaccgaaagaaggaactcatcaaagtgaaaggcaaccaagtcgcacctgcagagctagaagccatcctactcgaacatccagccgttgccgatgcggctgtcatcggtgtgccaaaggacgaagatgaggccccgcgagcgtatattgccctgaagccagggaagaatgccactgccaaagacattacaaccttcatggagggcaaggtatcacggatcaagagaatcactggtggagtggtctttgtggaggcaatacccaagaatccatctgggaagatcttgcgaaaggcacttcgagaacaggccaagcaggagttgcaaggggtttacgcgaagttataa

SEQ ID NO: 28211 - protein, 560 aa, Aspergillus nidulans FGSC A4
MPFRSRWQIEIPNTHLASLLLTSPTEPLSKTHRCFSEAARPDTHYFTTHDFRLWSQRFAAGLRKSGLQKGDRVLLFSGNDIFFPVIFMGIIMAGGIFTGANPTFVARELAYQLQDSGAIYLLCAEDSLDTGIEASKIAGLDMDKVFVFNNALYDGKGEGMKGCRYWGELVASVEEGAGFAWEELDTPEKANTTLALNYSSGTTGRPKGVEISHKNYVSNMLQYNHLFYLNPNWREKAKRARWLCFLPMYHAMAQNIFIAAALNRGVPVYVMPKFDFIKMLEYTEKFRISDYILVPPVVVALAKHPAVKSGKYDLSSVEDIGSGAAPLGREVCEEVEALWPPGKINIKQGWGMTEATCSILGWSPMEKCLTASVGELNPNCEAKIVADDGVTELGKNQRGELLVRGPNVMKGYWRNPQATKETLTEDGWLRTGDIAFVSNEGWFHVVDRKKELIKVKGNQVAPAELEAILLEHPAVADAAVIGVPKDEDEAPRAYIALKPGKNATAKDITTFMEGKVSRIKRITGGVVFVEAIPKNPSGKILRKALREQAKQELQGVYAKL

SEQ ID NO: 28212 - DNA, 1665 bp, Aspergillus nidulans FGSC A4
  CDS (1)..(1665)
atgattttcgaaccagatctccgtgttccagtccctaataccgatatcctgacctatatcttcgccaaccctccctatgaccctaacaagccggtctatgtcgatgtgtccaaccctgcccgttcaatatcgctcgcgcaagcgcgcacaataatccgccagctcatcgcgggcctgcgggcctggggcgtgaaggagggggattgtgttgctatccattcattcaacgatatatactattcgatactcgtcctcgctaccatcggcgtcggcgggatctttacaggcacgaatcccagttacacctcccacgaattggcgcaccatttccgcacagcagatgtgagcttcgtgctctctgagccagagattctgggtccggtgctggaggctgcgaaggtcgtggggatccctgagagcagtgtgcggatcttcaacccgctgcctgagcaggcggttccagagggcagagcctcctggaaggaactttataatcatggcgaggaatgctgggtcgagttcgatgacgaggtcaaatcaagaacgacggccgctgcgagactgtttagttcggggacgacggggctcccgaaggccgtgacgaacacgcataggaatcttatcgcgcagcaggagcttgtctttcagatccacccgcgagactatgaaagaaggcatattttcgcaacacccgtattccatgccgccgtcgcgccgagcacacatgtcggcgccctgaaatcaggtcatacagtgcacttgatgcgccgatttgatctcgcactatacctgcaagcctgcttaaagtatcagatcacagatctgatgctggtgccgcccctcgtcatcgcattgctgatgaacgacatggcatacgagaagccgtacctgcgctctgtgcggagcgcggcctgcggcgcagcgccgctggataaaaacgtccaggggagactgcgcaaactcctcggccccggcgcttcattcacgcaggtctggggcatgactgagaccacctgcattgcgacatcttttatttacccagaaagcgatgacaccgggtcggtggggaggttgattgcgaatttggaggctaagttagtcgacgatcaagggaagaatatctccgcctacaacacgcgcggcgagctctgcgttcgcggccccaccgttacgccggggtacttcaacaacccttctgcgaatgcagaatcctttgatgaggacggctggtaccacaccggcgacatcgcatactgcgacgccgccagcaggaaatggtacattgtcgatcggaagaaggaacttatcaaggtgcgcgggttccaggttgcgccaccagaactcgaggccgtgctgctttctcacccgcttatcgttgatgcggcggtcattggaatcaaggataaaagggaggacgggagtgagctggtacgtgcgtatgtggttagaagacctgggaagggtgaggggttgacggaggatgaggtcaaggagtatttggggcaacgattggcaaagtacaaggctctgacggggggtgtgaggttcgtggaagcgatccccaagaatgcctctgggaagatcctgaaaaggatgctcaggaaggaggccgagagggagagtaaggggagagagagcgcgggagagaacaaggcgaagctgtaa

SEQ ID NO: 28213 - protein, 554 aa, Aspergillus nidulans FGSC A4
MIFEPDLRVPVPNTDILTYIFANPPYDPNKPVYVDVSNPARSISLAQARTIIRQLIAGLRAWGVKEGDCVAIHSFNDIYYSILVLATIGVGGIFTGTNPSYTSHELAHHFRTADVSFVLSEPEILGPVLEAAKVVGIPESSVRIFNPLPEQAVPEGRASWKELYNHGEECWVEFDDEVKSRTTAAARLFSSGTTGLPKAVTNTHRNLIAQQELVFQIHPRDYERRHIFATPVFHAAVAPSTHVGALKSGHTVHLMRRFDLALYLQACLKYQITDLMLVPPLVIALLMNDMAYEKPYLRSVRSAACGAAPLDKNVQGRLRKLLGPGASFTQVWGMTETTCIATSFIYPESDDTGSVGRLIANLEAKLVDDQGKNISAYNTRGELCVRGPTVTPGYFNNPSANAESFDEDGWYHTGDIAYCDAASRKWYIVDRKKELIKVRGFQVAPPELEAVLLSHPLIVDAAVIGIKDKREDGSELVRAYVVRRPGKGEGLTEDEVKEYLGQRLAKYKALTGGVRFVEAIPKNASGKILKRMLRKEAERESKGRESAGENKAKL

SEQ ID NO: 28214 - DNA, 1575 bp, Aspergillus nidulans FGSC A4
  CDS (1)..(1575)
atgcgcaaggccgaggcgatataccacattacagcaaataaccaagtgctacgaagaacctaccaagagactgcggatcgggctagagggctcgcctattttctcaagaagcatgggtataagagagtcgggatcctgtgcccaaacacaccggcttttctggagtcgattttcggtattgccgctgcgggggccgtgaatgtttccgtgaattatcgacttaaggaggacgatatcgcttatatatttactcattctgacgccgaaattatcatcgctgacaaggaatacttgccgctgctgtcggcctatagagcagcgaagccgcatgttcgtgtcattttggatacagatacagatgcaacagagggccaacttgcgggtccatttgacgaggctattctcgaggggttgaattatgaccgggatacaggcagaaagggctggagtgctcttgagagccaagccgcgtctgaagatgatgttattgcgctggcatataccagtgggacaacggcgcgcccgaagggagtggaatacactcatcgtggttgttatcttgctgctatgggcaatatcattgagtctgggctcaactttcaaggacggcgctgtaaatacttgtggaccttgcctatgtttcatgctatgggttggactttcccttgggccgttactgcagtgcgcgggactcactactgcctgcgcaaaatcgactatccgcagatctggaaacttctcaagcaagagggcgtcacccactttaatgcggctccaacggtgaatacgttgctttgcagctctcctgaagctgagccgcttcctgaaccagtccatgttacagtcgcagcgagcccgccaacacctcatttgttcgaacagatgacgggcttaaatttgcatccagttcacgtttacggtatgacggagacttatggacctatcactaaagggtactatatgacggcctgggaaaacctccctcgcaaggagaaatttgcgcgaatggcacggcaagggcatggtttcctgaccagtcttccagtacgggtcatccagacagaggtgcctgagggcaccatcattgatgtcaagcaggacggcaaggagattggtgagattgtgtttgtcgggaatatctgtgccaggggctactataaagaccccgaggctacgcggaaattgtttgctggcggagtcctccattcaggagacttggctgtctggcatccagatggggccattcagattcttgacagagccaaggatattatcattagtggaggtgagaacatctcgtccgttgcactcgagtcgatgctggtcacccatccggatattctagaggccggtgttgtcgccgttcccgacagccattggggtgaacggcccaaagcttttgtgactgtcaaaccagggaggcagctgaagggtaaagatgtcgtcgactgggccaggaacactagcggaatcagcaagttcatggttccacgggaagtggaggttgtcgcagagcttcccaagaccagcactggcaagttgaggaagaacgttcttctatggctcgaccgatga

SEQ ID NO: 28215 - protein, 524 aa, Aspergillus nidulans FGSC A4
MRKAEAIYHITANNQVLRRTYQETADRARGLAYFLKKHGYKRVGILCPNTPAFLESIFGIAAAGAVNVSVNYRLKEDDIAYIFTHSDAEIIIADKEYLPLLSAYRAAKPHVRVILDTDTDATEGQLAGPFDEAILEGLNYDRDTGRKGWSALESQAASEDDVIALAYTSGTTARPKGVEYTHRGCYLAAMGNIIESGLNFQGRRCKYLWTLPMFHAMGWTFPWAVTAVRGTHYCLRKIDYPQIWKLLKQEGVTHFNAAPTVNTLLCSSPEAEPLPEPVHVTVAASPPTPHLFEQMTGLNLHPVHVYGMTETYGPITKGYYMTAWENLPRKEKFARMARQGHGFLTSLPVRVIQTEVPEGTIIDVKQDGKEIGEIVFVGNICARGYYKDPEATRKLFAGGVLHSGDLAVWHPDGAIQILDRAKDIIISGGENISSVALESMLVTHPDILEAGVVAVPDSHWGERPKAFVTVKPGRQLKGKDVVDWARNTSGISKFMVPREVEVVAELPKTSTGKLRKNVLLWLDR

SEQ ID NO: 28216 - DNA, 1797 bp, Aspergillus nidulans FGSC A4
  CDS (1)..(1797)
atgtttcgagccatgtattgccccagccgtgtcctgtgcggcagaacaccgagactagccgaccggtccctcttgcagtcgctgtcattgactcgacgcggtttacttacacaaagctatgcgcgcggtccaacagagcctccgctattcgaaaccacaattggagagcactttgctaaaatcgtccaacagtatggagacaggacagcggtcacctactctggcctcgacgctaagagtaatgcactcgcacgaggactgcaatccgtgggcgtcaagaagggagaccgtgttggagtgatgctggggaactcgatggaacatgcgactgtgccaatcaacccctccttcaatgcaactcaggtcgtcgcggccctgagccatctagggacaagccacctgattataagcaccgagtccaatctgcccaggaagcaaccacgcagcaacatccctctcctccgccacctagtccaggacctctacgcgtccaagctcgagtccgccgtcgttccaacgctgcagaagatcatcctcgtcgacaactccacggaccgcatcaacaccaacagctccctcttttccttcaaagccctgaccccttacaagtccatcacgtccctcaaccctgcggacggtgctgcgctccctgagcagaacttgactcccaatgaaattgttaacatccaattcacctccggcaccaccgccatgcccaaggcagcctgtctaagccaccgctccatcctgaacaatggcgcccagatcggcgaccgcatgcgcctctcgccagccgacacagtctgctgtccgccgcccctctttcactgtttcggctccgtcctgggctacatggctacagcgacgcatgggtcggccattgttttccccgcagaagcttttaatgccagggacaccctacgcgccgtccaggaagaacagtgcacagccctctacggtgtgccaacaatgtttctcgaagagctcgggctcctggaatcaggccaggtcccacacaagggatttgaatatctccgtaccggcatagcggcaggaagcagtatccccgctgaactgatgaaaaagcttcacaagacgttgaatctaacggaactgacaatctgttatggcatgacggagacgagtcccgtgtctgcaatgacaacgacagatgacccaattgataagagaatcaataccgtcggacgtctgatgccgcatgttgaggcgaaggtcgttgatccgctcgaccgtaacaagattctccctataaattctcgcggtgaactcgccgtgtctggatacctgcttatgaaaggatactggggtgatccggagaagacggcggaggtgatgctgaaggataaagacgggaaggtttggatgcataccggcgacgaagcaactatttcgccagacggctacgtcaccataaccgggcgtattaaagacctgattatccgtggcggcgagaacatacacccacttgaaattgagaactgtctcttgaccttccccggtgtcgcggatgtctctgttgtgggggtccccgacgcccattatggcgaggtcgtggcggcttttgtgatatggaaacaggcgcatcagaatacggaagagcaggcagagacgggagagaagctgaggaagtttgtaagggagaaactgagtgcgcatcttgtgccgaagtatatattcttcctcgagccgacggattcattcccgaagacggcaagtgggaagatccagaaatttaagcttaaggagacagcgatcaagcttttgggtgggcactga

SEQ ID NO: 28217 - protein, 598 aa, Aspergillus nidulans FGSC A4
MFRAMYCPSRVLCGRTPRLADRSLLQSLSLTRRGLLTQSYARGPTEPPLFETTIGEHFAKIVQQYGDRTAVTYSGLDAKSNALARGLQSVGVKKGDRVGVMLGNSMEHATVPINPSFNATQVVAALSHLGTSHLIISTESNLPRKQPRSNIPLLRHLVQDLYASKLESAVVPTLQKIILVDNSTDRINTNSSLFSFKALTPYKSITSLNPADGAALPEQNLTPNEIVNIQFTSGTTAMPKAACLSHRSILNNGAQIGDRMRLSPADTVCCPPPLFHCFGSVLGYMATATHGSAIVFPAEAFNARDTLRAVQEEQCTALYGVPTMFLEELGLLESGQVPHKGFEYLRTGIAAGSSIPAELMKKLHKTLNLTELTICYGMTETSPVSAMTTTDDPIDKRINTVGRLMPHVEAKVVDPLDRNKILPINSRGELAVSGYLLMKGYWGDPEKTAEVMLKDKDGKVWMHTGDEATISPDGYVTITGRIKDLIIRGGENIHPLEIENCLLTFPGVADVSVVGVPDAHYGEVVAAFVIWKQAHQNTEEQAETGEKLRKFVREKLSAHLVPKYIFFLEPTDSFPKTASGKIQKFKLKETAIKLLGGH

SEQ ID NO: 28218 - DNA, 1689 bp, Aspergillus nidulans FGSC A4
  CDS (1)..(1689)
atgcctgtctattcgcaataccctccagtggacattcccaacatcgacttatgggcattcctctttgagcgaaaggataggcagttccctgacaacaaggttatctacacggatgccgacacccgacgctcctatacctacaatgatgtgaaacagtctgccattacttttggccaaggcctgaagtctctctttgactggcgtaaaggcgatgtgctcgcgctctttacccctaacagcatcgacactcccattgtcatgtatggcgcgctctgggcaggcggtgttgtctcgccctctaacccagcgtatacagttgaggaactcgcgttccagctaaggaattctggtgcaaaggcagttgttactcaactacctgttctctcagttgcgcgagccgcggcgaaagaggtaggcatccctgacgaccgcattatcttgataggagaccagcgcgatcctgaggccaggttcaaacacttcacctctatccgcaatatctccggagccactcgttatcgtcgcacgaagatcaacccggagaaagatctctcgtttcttgtttacagctctggcaccactggggttcccaagggtgtcatgctcagccatcgcaacattgtcgccaacagccttcagttggctgcaggcgaagccggtaacctgacgtggaatggcggggcagatggtaagggtgaccgcttacttgctttccttccattcttccacatatacggcttgacatgtcttgtccaccaaacgatctacaagggctatgagctttttgtcatggccaagtttgacctcgaaaaatggtgccagcatgttcagaactaccgtatcacattcagctacgtagttcctccggttgttctccttctgggcaaacaccctatagtcgaaaagtacgatctttccagtctacgaatgatgaactccggtgccgcgccgcttactcaggagcttgttgaagctgtctacaaccgcctccacatcggtatcaaacagggttacggtcttagtgagaccagccctactactcacactcaaccatggggtgaatggcgcgagagtgtcggctcggtcggtaaactcctccccaacatggaggccaagtatatgacgatgcccgaggacggttcagaacccaccgaggtgcctacaggtgaggttggggagctctatctccgtggaccgaatgtcttccaaggctatcacaacaacccagccgcaacagcagactcaatctctccagatgggtggtttcgcaccggcgacgtcggctaccaggactccaagggcaacttctatatcacagaccgtgtcaaagaactcatcaaatacaagggcttccaagtcgctccagccgagctcgagggtatcctggtcgataatcctgcagtcgacgatgttgccgttgtcggtgtcgagagcgctgaacatgggactgaggtccctgttgcatttgtcgtaaggagcgcgaagagcaagagctcgggtgtttcggcggcggaggaagcaaagaatatcgccaagtggctggatggcaaggttgcgcatcacaagcgcctgcgcggcggcgtgcgatttgttgatgagattccgaagagtgctgcaggaaagattttgaggagactacttaagaagcaagcgcaagaggaggcggcttctccgaaggcgaagctttaa

SEQ ID NO: 28219 - protein, 562 aa, Aspergillus nidulans FGSC A4
MPVYSQYPPVDIPNIDLWAFLFERKDRQFPDNKVIYTDADTRRSYTYNDVKQSAITFGQGLKSLFDWRKGDVLALFTPNSIDTPIVMYGALWAGGVVSPSNPAYTVEELAFQLRNSGAKAVVTQLPVLSVARAAAKEVGIPDDRIILIGDQRDPEARFKHFTSIRNISGATRYRRTKINPEKDLSFLVYSSGTTGVPKGVMLSHRNIVANSLQLAAGEAGNLTWNGGADGKGDRLLAFLPFFHIYGLTCLVHQTIYKGYELFVMAKFDLEKWCQHVQNYRITFSYVVPPVVLLLGKHPIVEKYDLSSLRMMNSGAAPLTQELVEAVYNRLHIGIKQGYGLSETSPTTHTQPWGEWRESVGSVGKLLPNMEAKYMTMPEDGSEPTEVPTGEVGELYLRGPNVFQGYHNNPAATADSISPDGWFRTGDVGYQDSKGNFYITDRVKELIKYKGFQVAPAELEGILVDNPAVDDVAVVGVESAEHGTEVPVAFVVRSAKSKSSGVSAAEEAKNIAKWLDGKVAHHKRLRGGVRFVDEIPKSAAGKILRRLLKKQAQEEAASPKAKL

SEQ ID NO: 28220 - DNA, 1653 bp, Aspergillus nidulans FGSC A4
  CDS (1)..(1653)
atggtggtatatctccctgagaaggactatgaattccctaatatcgatttgttaactcttctttttgaatcgcccattccacatagcacagagagcacagtacttcatgctgaagcggcggatccctcgaacgcaaccaccaaagctcagacgcgtcttctcacccgccagattgcgtacatcttgcgcaaccacttcggtgttgggagccaaggcgcagggaaggatgtcattgtgggtgtttccgaaggccaggtgttattaccgtccgtcttctatggagttatagcagctggtggtgtgtggagtgccgcttcctcaaccgctactcctcctgagttggaaaggcaaatccgtcagggaaacagccgtttgctcatcacaggcccagggtgcaaggatgtggtgttaaaggcagccaaggctgctggggtgccacagagccgcgttcttattttgcgaagtgcaggccatgagcgtgtgtttgaaaactctgccacgggacaaaactatttagatggcttgaagccgtccgaggtgcttgactgggagcgcatcacagaccctaagaaactggaagactcgcttatttgtttgctgtacagttccggcacgactggtgtgccgaagggtgttaacatctcgcatacaaacatggtcacagaggctctgatccccctctactatgacctcgagtatattgcgaagagacgagcgacggaccctacctatgagcacccgtaccgcacactggcgcaccttccgactgcccatgttgctgggtgccaggggtactttgcgaaccctgccgttgctggaggcacagttttctggatgccaaagttcgattttcagaagttccttgggtacaacaaaaagctggaaatcacatcgtttttttctgtgcctccaatctatttgttgatcgctcagagcccggacgttacggaccagttcaagtcattgcgtcgcgcgtactctggcgctgcccccatgggagcggatctgcagaccaaggcgcaaaagaaacttggatgcctgataaaccagacatggggcctgagtgaaacgacaggtagcaccacaggtagtgtgagtcgtctatggccaaacatgcgtctgcgtattgtcgacgaggacggcaaggatgtcgaggagggtaaagagggcgaattccttgtaaaaggacccgtggttaccaagggctattatgggaatccgcaagccaccaaggaagccttcaccgatgacggctggttcaagtctggagacattggtgtgcgccgcgacggactgttctatatcgttgatcgaaagaaggaactcatcaaatacaaaggtctccaagtcgcccctgccgagctcgaagcccaccttatctcgcaccctctcatctacgatgcagccgtcattggtgtcccagcacctgacggctctgggaacgaagttccacgcgcatatatcgttgcggataaagcgaaaatcagcgaagaccaggtcaaggactttgtcaaaagccaccttgcacattacaagcagctccgcggtggcgtggtatatctgccagccatcccaaagagtccgagtggaaagatcttgcgccgcgaacttcgtgagctggtgaagaaggaggctggcggttccaagttgtaa

SEQ ID NO: 28221 - protein, 550 aa, Aspergillus nidulans FGSC A4
MVVYLPEKDYEFPNIDLLTLLFESPIPHSTESTVLHAEAADPSNATTKAQTRLLTRQIAYILRNHFGVGSQGAGKDVIVGVSEGQVLLPSVFYGVIAAGGVWSAASSTATPPELERQIRQGNSRLLITGPGCKDVVLKAAKAAGVPQSRVLILRSAGHERVFENSATGQNYLDGLKPSEVLDWERITDPKKLEDSLICLLYSSGTTGVPKGVNISHTNMVTEALIPLYYDLEYIAKRRATDPTYEHPYRTLAHLPTAHVAGCQGYFANPAVAGGTVFWMPKFDFQKFLGYNKKLEITSFFSVPPIYLLIAQSPDVTDQFKSLRRAYSGAAPMGADLQTKAQKKLGCLINQTWGLSETTGSTTGSVSRLWPNMRLRIVDEDGKDVEEGKEGEFLVKGPVVTKGYYGNPQATKEAFTDDGWFKSGDIGVRRDGLFYIVDRKKELIKYKGLQVAPAELEAHLISHPLIYDAAVIGVPAPDGSGNEVPRAYIVADKAKISEDQVKDFVKSHLAHYKQLRGGVVYLPAIPKSPSGKILRRELRELVKKEAGGSKL

SEQ ID NO: 28222 - DNA, 2016 bp, Candida albicans SC5314
  CDS (1)..(2016): transl_table=12
atgccaacagaacaaactcataatgtcgtccatgaagccaatggcgtcaaattaagagaaacccctaaagaattttttgaaagacaaccaaataaaggtcacattcatgatgtcaatcaatacaaacaaatgtatgaacaatctattaaagatcctcaaggatttttcggtccattggccaaagaattgttatcttgggatcacgatttccacactgtcaaatcaggtactttgaaaaatggtgatgcagcttggtttttgggtggtgaattgaatgcttcttacaactgtgttgatagacatgcatttgctaacccagataaaccagctcttatttgtgaagctgatgacgaaaaagattcccatatattgacttacggtgatttgttaagagaagtttctaaagtagctggtgttttacaatcttgggggatcaagaaaggtgacactgttgctgtttacttaccaatgaatgcccaagctatcattgctatgttggctattgctagattgggtgctgcccattcagttatttttgctgggttctcggctggttccattaaagacagagtcaacgatgctagttgtaaagctcttatcacttgtgatgaaggtaaaagaggtggtagaaccactaacattaaaaaattatgtgatgaggctttggttgattgtcctactgttgaaaaagttttggtttataaaagaactaataatccagaaattcatttaactgaaggtagagattactattgggatgttgaaactgccaaattcccaggatacttgccaccagtttcagtcaactctgaagatccattgttcttattgtatacttctggttctactggtactccaaagggggttgttcattctactgctggttacttattgggtgctgctctttccactaaatacatttttgatattcatccagaagatatcttgtttactgctggtgatgttggttggattactggtcacacctatgccttgtatggtccattgttattaggtgtcccaaccattattttcgaaggtaccccggcttatccagattacggaagattctggcaaattgttgaaaaacacaaggctactcatttctatgttgctccaactgctttaagattattacgtaaagctggtgaacaagaaattgctaaatacgatttgagttctttgagaactttaggttctgttggtgaaccaatttctccagacatttgggaatggtataatgaatttgttggtaaaaaccaatgtcacatttctgacacttattggcaaactgaatctggatctcatttaattgccccattggctggtgttgttccaaacaagccaggttctgcttcttatccattctttggtattgatgctgccttgattgatccagtcactggtgttgaaattgaaggaaatgatgctgaaggtgttttggctatcaaggaccattggccatcaatggcaagaactgtctacaagaaccacaccaaatatatggatacctacatgaatccatacccaggttattactttaccggtgatggtgctgctagagatcatgatggatactactggattagaggtagagttgatgatgttgtcaatgtcagtggtcatagattatccactgctgaaattgaagctgctttaattgaagacaaaaaagtcagtgaagctgctgttgttggtattcatgacgacattactggtcaagctgtcattgcttacgttgccttgaaagaaggaaacagtgacgaggattctgaaggattaagaaaagaattggttttacaagttagaaaaactattggtccatttgctgcaccaaaatctgttataattgtccaagatttgccaaagactagatctggtaaaattatgagaagaattttgagaaaagtcagttctaatgaagctgatcaattgggtgatatttctactttatctaacccacaatcagttgaaggtataatttctgcctttggtgcccaattcggtaagaaataa

SEQ ID NO: 28223 - protein, 671 aa, Candida albicans SC5314
MPTEQTHNVVHEANGVKLRETPKEFFERQPNKGHIHDVNQYKQMYEQSIKDPQGFFGPLAKELLSWDHDFHTVKSGTLKNGDAAWFLGGELNASYNCVDRHAFANPDKPALICEADDEKDSHILTYGDLLREVSKVAGVLQSWGIKKGDTVAVYLPMNAQAIIAMLAIARLGAAHSVIFAGFSAGSIKDRVNDASCKALITCDEGKRGGRTTNIKKLCDEALVDCPTVEKVLVYKRTNNPEIHLTEGRDYYWDVETAKFPGYLPPVSVNSEDPLFLLYTSGSTGTPKGVVHSTAGYLLGAALSTKYIFDIHPEDILFTAGDVGWITGHTYALYGPLLLGVPTIIFEGTPAYPDYGRFWQIVEKHKATHFYVAPTALRLLRKAGEQEIAKYDLSSLRTLGSVGEPISPDIWEWYNEFVGKNQCHISDTYWQTESGSHLIAPLAGVVPNKPGSASYPFFGIDAALIDPVTGVEIEGNDAEGVLAIKDHWPSMARTVYKNHTKYMDTYMNPYPGYYFTGDGAARDHDGYYWIRGRVDDVVNVSGHRLSTAEIEAALIEDKKVSEAAVVGIHDDITGQAVIAYVALKEGNSDEDSEGLRKELVLQVRKTIGPFAAPKSVIIVQDLPKTRSGKIMRRILRKVSSNEADQLGDISTLSNPQSVEGIISAFGAQFGKK

SEQ ID NO: 28224 - DNA, 2028 bp, Candida albicans SC5314
  CDS (1)..(2028): transl_table=12
atgccggaatctactcaacaatctcatctttctttggaccatgagaagatgcaacaacctcctaaagggttcactgaacgttctaaaacaaaaccaaacttacctgattttgaaacttatcaaaaattatataaacaatcaattgaaaaccccaatgaatttttcactcaacaagccaaagaaaatttggattggtttaaaccatttgatttagctagattccctattgatcctaaagatgattacaaaaatggtgatttgccagcttggttcatcaatggacaattgaatgcttgttataatgctgttgatagatgggccattaaaaaccctgataaaccagcaattatttatgaaggtgatgaacctgaccaaggaagaattatcacttatggagaattattaaaacaagttagtaaattagctcaagccttaactaaattgggggttaaaaagggtgattcagttgctgtttatttaccaatgattcctgaagccattgtcactttattagccattgttagaattggtgctatgcattcagttgtttttgctgggttttcttctgcttcattaagagatagaattttggatgctgattcaagaattgttattactgctgatgaatctaaaagaggtggtaaaaccattgaaaccaaaaaaattgttgatgatgccttgaaagaatgtccaaaagttagaaatgtcattgttttcaaaagaactggtaattctcatgtcccattttctcctggtagagatttgtggtggcacgatgaaatggctaaatatggtccatacttcccaccagttcctgtcaattctgaagacccattgttcttgttgtatacttctggttctactggtaaaccaaagggggttcaacacaacactgctggttatttgttaggagcagttttaaccaccaaatacacttttgatgttcatgaagatgatattttgtttactgctggtgacattggttggatcacaggtcatacttattgtgtttatggtccattgttagctggtgccacatcagtggtttttgaaggtaccccagcttatccaaattattccagatattgggaaattgttgataaatataaagttaatcaattttatgttgctccaactgctttaagattattgaaaagagctggtaccaaatatgttgaaaaatacgatttatcatctttaagagtcttgggttctgttggtgaaccaattgctgctgaagtttggcattggtataatgataacattggtaggggtcaagctcatattgttgatacttattggcaaactgaatcaggatctcatttgttgactccattagctggtatcacaccaactaaaccaggttcagcttcattaccattctttggagttgatccaaagattttagacccaaccactggtgaagaattacctgataatgatgttgaaggggttcttgccattaaatcagcttggccatcaattactagaggtatttacaatgattacaatagatttattgatacttatttggcaccatacgccaattattatttctccggtgatggtgctgctagagatagagatggtttttactggattttgggtagagttgatgatgttgttaatgtttctggtcacagattatcaactgctgaaattgaagctgccttgattgaacatccaattgtcggtgaatctgccgttgttggttatgccgatgaattgactggtcaagccgttgctgcatatgtttcgttaaagaaggataaagccgttggtgaagatgtagaaaacattaaaaaggaaatgattttaacagttagaaaagaaatcggaccatttgctgctccgaaaatgattttattagttgatgatttacctaaaactagatctggtaagattatgagaagaattttaagaaaagtattggctggtgaagaagatcaattgggtgatatttctactttatctaatccaggtgttgttcaacaaatcattgatgttgttcatcatgcaaagaaataa

SEQ ID NO: 28225 - protein, 675 aa, Candida albicans SC5314
MPESTQQSHLSLDHEKMQQPPKGFTERSKTKPNLPDFETYQKLYKQSIENPNEFFTQQAKENLDWFKPFDLARFPIDPKDDYKNGDLPAWFINGQLNACYNAVDRWAIKNPDKPAIIYEGDEPDQGRIITYGELLKQVSKLAQALTKLGVKKGDSVAVYLPMIPEAIVTLLAIVRIGAMHSVVFAGFSSASLRDRILDADSRIVITADESKRGGKTIETKKIVDDALKECPKVRNVIVFKRTGNSHVPFSPGRDLWWHDEMAKYGPYFPPVPVNSEDPLFLLYTSGSTGKPKGVQHNTAGYLLGAVLTTKYTFDVHEDDILFTAGDIGWITGHTYCVYGPLLAGATSVVFEGTPAYPNYSRYWEIVDKYKVNQFYVAPTALRLLKRAGTKYVEKYDLSSLRVLGSVGEPIAAEVWHWYNDNIGRGQAHIVDTYWQTESGSHLLTPLAGITPTKPGSASLPFFGVDPKILDPTTGEELPDNDVEGVLAIKSAWPSITRGIYNDYNRFIDTYLAPYANYYFSGDGAARDRDGFYWILGRVDDVVNVSGHRLSTAEIEAALIEHPIVGESAVVGYADELTGQAVAAYVSLKKDKAVGEDVENIKKEMILTVRKEIGPFAAPKMILLVDDLPKTRSGKIMRRILRKVLAGEEDQLGDISTLSNPGVVQQIIDVVHHAKK

SEQ ID NO: 28226 - DNA, 1674 bp, Ustilago maydis 521
  CDS (1)..(1674)
atggcgcctcagatcctcaagtcgctcgaaccggatccgccacgcgtgcagcgcggcaacttgttcgacttcctccacagcaatccgaacaaggtggatgagaacaagccagtcttttatcgactagacggcaaaaaaatcacgcgcaagcagctttacgatgattcgcgacgactcgcatacgccttgcggaacaagcttggcttgaggcctggagcgaggattggcatcatctctcccaacagcaccgcatacccttgggtcgtccatgctggtctatgcgcaggcgtggtgctggttcccctgaacccagcatatggagccgaagaactcgttcatccagttcaacaagctgagatcgagtacattttctgccaccagagcgttctcaacacggtgcgagacggactggagctcgcaaaggtgagcctcaagtccacaaatggtcagaaccgtctttggatcttggatgacggcgatagcctcaagaaggacgacaagggcgagcaagacgcacgaacgctgctcggcgacgaccgtctcgagacacacaaggtggtcgacgaccgcactgaggatgcctttattgtattctcgagcggtacgagtggcaaacccaagggcgtccagctggtacacggtaacatgaccgcagttaccaccgctatcgtccacacattcggagatgctatcagccccaatgaccgctacattggcgtgctgcccttctaccacatctttggattggccaaatttatgtgtaagggcgtctacatcggagccgagtgtgtcgtagtgcccaagtttgacctgggcgtgttttgcgccgcggtggaaaagttcaagtgcaacatcagctacgtggtgccgccgattctggttctgctggcaaaggatccgcgcgcaaagaagtacgacctcaagagtctcaagtgggtcatgtctggtgcagcaccgcttggaaccgagctgagtatggaagtggaagctgcgcatcctgggttgcgcgtcacgcaaggctggggactaagcgagacttcgccaacggcgacgttcgccaagccggaagactaccatgctcacatgggtacttgtggacgactcattgctggtgtagagggacgattggtggatgacgatggcaacgatgtcggtttcgagcagggcgagaatggcaagcccggcgaattctgggtgcgtggccctaccatcatgaagggctacctcaacaacaaggaggcaaccgacgactgcatcactccggacggctggttcaagacgggcgacattgccatcatgaagaacaactatttctggatcgttgaccgcaagaaggagctcatcaagtacaagggcttccaggtgcctcctgccgagctggaagcgacgctcttgtcgcaccccaagattgccgacgtggctgtaattggagtgtataacaaggcgcaggcaaccgaattgccacgagcgtatgttgtgctaaaggaagaggtcgctaagaacgaagatccagaagcggtggcgaaagagatcatcgagtggactgcgaaaaaggtagctaaccacaaacgccttcgcggcggtgtcaaggtgctggaagagatccccaagagtccttcgggcaagattctccgacgattgctgcgagacgaagctgccaaggagtcgcaataa

SEQ ID NO: 28227 - protein, 557 aa, Ustilago maydis 521
MAPQILKSLEPDPPRVQRGNLFDFLHSNPNKVDENKPVFYRLDGKKITRKQLYDDSRRLAYALRNKLGLRPGARIGIISPNSTAYPWVVHAGLCAGVVLVPLNPAYGAEELVHPVQQAEIEYIFCHQSVLNTVRDGLELAKVSLKSTNGQNRLWILDDGDSLKKDDKGEQDARTLLGDDRLETHKVVDDRTEDAFIVFSSGTSGKPKGVQLVHGNMTAVTTAIVHTFGDAISPNDRYIGVLPFYHIFGLAKFMCKGVYIGAECVVVPKFDLGVFCAAVEKFKCNISYVVPPILVLLAKDPRAKKYDLKSLKWVMSGAAPLGTELSMEVEAAHPGLRVTQGWGLSETSPTATFAKPEDYHAHMGTCGRLIAGVEGRLVDDDGNDVGFEQGENGKPGEFWVRGPTIMKGYLNNKEATDDCITPDGWFKTGDIAIMKNNYFWIVDRKKELIKYKGFQVPPAELEATLLSHPKIADVAVIGVYNKAQATELPRAYVVLKEEVAKNEDPEAVAKEIIEWTAKKVANHKRLRGGVKVLEEIPKSPSGKILRRLLRDEAAKESQ

SEQ ID NO: 28228 - DNA, 1809 bp, Ustilago maydis 521
  CDS (1)..(1809)
atgccgtacgctccaccacgctcttcgcgtgcgcccacctcgattccctttgagctgtctctctcgacgcatcccaatgcaccgcaccaccgctcgtcacttacgcccgtcgcgttcctcctacgtgcagcgctgattgcaccacgcaagctcgcgattgctcatcctgaacgtggctactctttcacctatgagcagtgggcggctcgctgtctctcgcttgcttttggcttgctctccgtacccggattcaagactggcgatcgcgtagccgtgatttcccccaatgccccgctcatcgccgatgcgcactggtcgatccccgctgctggcggtatcatcacacctatcaacatccgaaacacgcccaaagaggtcgcgtatgtgcttgagcattccggtagcaccatcatcctgtgcgatcacgagtttacccatcttgttcccgagaatccgggtaaccgagtaacggtgatcatcagcagagattcaggtggacaggatgcgagcgacgattacgaacgatttctcgatcgcggatggcaagagtggcagcgtgccgaacaggccgagttggaaaagtaccgtgctcgctcaaagcgtggtgccgaaccgaaaaccggatggaagctgctctgcgctccgcacgacgaagagcagccgatagcactgtgctacacatccggtaccactggtcgaccaaagggagtattgaccaaccatcgtggcgcgtatctggcggcggtcgccaatgcgtttgaagccaacatcacccaagaaagtgtctacctctgggttctacccatgttccacgcgtgtggctggacgtatccgtgggcagtgacggcatcgctggcaacgcaccacacgatccgcaaagtcgacaacgccgtcatctggcacgcacttgtgaaccacaacatctctcactactgtggtgcacccaccgtgcaaatcggactcgtaaaccacccggccgcacgcaaactagagcgtcgcgtcaacgtcgccgtcgctgcgtctgcccccaccgccaacctactcgccaagatggaatcgctcaatcttcatcctgtccacgtctacggcttgaccgagacctacggtccgtttaccaggagatactttgaacccgaatgggccaagctcgacgtcgattcacgagcaaggatgatggctcgccagggacattcctacctcacatccgacgaggttcgcgtggttcgaaccgagagcagcaccgattcgtctagtgacgatctgattgatgtacaacgcaacggtcaggagacgggcgagatcgtgattcgtggtaacatggtcatgattggctattacaacgataccgctgcgacgaacaaggcgatcatcaagggctggttccacaccggagacctggctgttcgacacccaggaggcgaaattcagatccttgaccgtggtaaagacattatcatctcaggtggtgaaaacatctcgagtctcatggtggaacaagaactcgcagcccacaccgacgtgctggaatgctgtgtcatcgcgcgcccgcacgagaaatggggcgagagaggccaggcatttgtcgtactgaccgaacaggccaaggcgaaacgaaacattgacgagatcaagaaacacggcagccacgaaaacagagcattcatacaatcgttgaagaagcattgtaaagacaggatgtctggctttgccgtgcccgagtggttcgacatcgtagacgagttgcccaagacgagcacgggtaaggtgcagaagaacgtgttgagggcgaggttcgcttccaagttgtaa

SEQ ID NO: 28229 - protein, 602 aa, Ustilago maydis 521
MPYAPPRSSRAPTSIPFELSLSTHPNAPHHRSSLTPVAFLLRAALIAPRKLAIAHPERGYSFTYEQWAARCLSLAFGLLSVPGFKTGDRVAVISPNAPLIADAHWSIPAAGGIITPINIRNTPKEVAYVLEHSGSTIILCDHEFTHLVPENPGNRVTVIISRDSGGQDASDDYERFLDRGWQEWQRAEQAELEKYRARSKRGAEPKTGWKLLCAPHDEEQPIALCYTSGTTGRPKGVLTNHRGAYLAAVANAFEANITQESVYLWVLPMFHACGWTYPWAVTASLATHHTIRKVDNAVIWHALVNHNISHYCGAPTVQIGLVNHPAARKLERRVNVAVAASAPTANLLAKMESLNLHPVHVYGLTETYGPFTRRYFEPEWAKLDVDSRARMMARQGHSYLTSDEVRVVRTESSTDSSSDDLIDVQRNGQETGEIVIRGNMVMIGYYNDTAATNKAIIKGWFHTGDLAVRHPGGEIQILDRGKDIIISGGENISSLMVEQELAAHTDVLECCVIARPHEKWGERGQAFVVLTEQAKAKRNIDEIKKHGSHENRAFIQSLKKHCKDRMSGFAVPEWFDIVDELPKTSTGKVQKNVLRARFASKL

SEQ ID NO: 28230 - DNA, 1995 bp, Ustilago maydis 521
  CDS (1)..(1995)
atggtcgaagccgacgttcccgaggttccaacctacgacgtcccttcccgtctgttgggaaaggacggccgtcccgttcctcacgtcgatgccgccaagtacaaggccgagtatcccgactcgatcaacaacaccgacgaattcttcggcaaggtcgccaaggagataattgactgggatgtacccttcaagacagtacgatccggtggcttcgagaacggcgacgtcgcctggttcaacgagggccgtctcaatgcagcctacaactgcgttgaccgatgggctcacaagtaccctgatcgtgtcgccatcatctacgaagccgacgagcctggtcagcaccaggagatcacctactcgcagctcctcatccaggtctcgcaggctgccaacatgctcaagtcgcttggcgttaagaagggtgacacagtcattgtctacctccccatgattcccgaagccgctgttgcgctcctcgcctgtgctcgtatcggtgccatccactcggttgtctttgccggtttctctgccgactcgctgcgcgatcgtaccaacgattgtggcgctcgcgtcgtcatcacaaccgacgagggcaagcgtggtggtcgtaccatcgccacaaagagcatcgtagatgctgcgctgaaagagtgccccggcgttgaacacgttgttgtagtcaagcgcacgggaggtcaaatcaacattgacgacaagcgcgacatttggtggcacgaggcgtgctcgcgtgagcgtgccttttgccctcccgaatcggtcagctcggaggacccgctgtttatcctctacacttcgggctcaacgggtaagcccaagggtgttgtgcacgctaccgcgggatacctgctgggtaccgcgctgacactccgacacgtgttcgatgtgcacccggacaagggtgatcgcttcgcctgcatggccgatgtcggctggatcacgggccactcgtacatcgtctacggtccgctcatgaacggtgttacgacgctcattttcgagtcgacgccggtctacccttcgccctcgcgttattgggagattgttgacacgcacaagctcacccagttctacacggcacccacctcgatccgtctactgcgacgactgggagacgagcacgtcaagaagcacgacctctcttcgctccgtgtcattggctcagtcggtgaacctatcaacccggaagcgtggcactggtacaacgacaatgtcggccgtcagcagtgtgctattgtcgatacctactggatgaccgagtctggttcgatcatgatcacgcccttgcccggtgcgaccaagaccaagcctggatcggctacattgcccttctggggcatcaagcctgtgctgctcgaccctacttcgggtaacgtgctcgagggcaataatgttgaaggtgtgcttgccatcgctcagccctggccttcggttgctcgaacagtgtataacgatcaccagcgattcctggatacatacatgcgtgcctacaagggctacttctttaccggtgatggcgctgctcgtgacaaggacgggtacatctggatcaagggtcgtgtcgatgacgtcatcaacgtctctggtcaccgtctgtcgacggccgagattgagtcggcgctcatccagcaccctggtgtcgccgagacggcggttgtgggtatcccagacgaagtcaccggtcagaccatcgctgcctacgtcacgcttaagcccgaattctcttacgactcggaagacgctctcaccaaggaactcgtcatccaggtacgaaggaacatcggtccctttgccgctcccaagaagatcattattgtttccgatctgcccaagacgcgttcgggcaagatcatgcgtcgtctgctgcgcaagtgcgcctcgcacgacacggacaacctcggtgacttgagcagtctggctgatccttcggtcatcgaacacatcaaggagaagaccaacgcttttgacaaaaagtga

SEQ ID NO: 28231 - protein, 664 aa, Ustilago maydis 521
MVEADVPEVPTYDVPSRLLGKDGRPVPHVDAAKYKAEYPDSINNTDEFFGKVAKEIIDWDVPFKTVRSGGFENGDVAWFNEGRLNAAYNCVDRWAHKYPDRVAIIYEADEPGQHQEITYSQLLIQVSQAANMLKSLGVKKGDTVIVYLPMIPEAAVALLACARIGAIHSVVFAGFSADSLRDRTNDCGARVVITTDEGKRGGRTIATKSIVDAALKECPGVEHVVVVKRTGGQINIDDKRDIWWHEACSRERAFCPPESVSSEDPLFILYTSGSTGKPKGVVHATAGYLLGTALTLRHVFDVHPDKGDRFACMADVGWITGHSYIVYGPLMNGVTTLIFESTPVYPSPSRYWEIVDTHKLTQFYTAPTSIRLLRRLGDEHVKKHDLSSLRVIGSVGEPINPEAWHWYNDNVGRQQCAIVDTYWMTESGSIMITPLPGATKTKPGSATLPFWGIKPVLLDPTSGNVLEGNNVEGVLAIAQPWPSVARTVYNDHQRFLDTYMRAYKGYFFTGDGAARDKDGYIWIKGRVDDVINVSGHRLSTAEIESALIQHPGVAETAVVGIPDEVTGQTIAAYVTLKPEFSYDSEDALTKELVIQVRRNIGPFAAPKKIIIVSDLPKTRSGKIMRRLLRKCASHDTDNLGDLSSLADPSVIEHIKEKTNAFDKK

SEQ ID NO: 28232 - DNA, 1947 bp, Ustilago maydis 521
  CDS (1)..(1947)
atgagctcggtcccaacctctcctcacttggccaagcgctccatcccccaagacttcaaaggtgaccgtgaccaaagcactcttgtaccgctcgaaacggtcgacaagctgctcgacgctcccggaagcctactcgagacccaagtcaaattcatcaatggccgactcaccaaggtttggaagcaacttccaaactctgttcgtgatctttggatgtttgctgctacaacttatgcttccagaaccatgattgttgccgaaggtgaatcacatacctatgctcatgttcacaagcgcgccatgctcaccgctacctggctttcgcgtcagtttggcgtgaaaaagggcgacagagtcgcaattgtcgcccgcaaccatgtcgaattcgtgattggcttttatgctgtacacctcttgggaggcgtaccggcgctagtcaatgccttccttcctggaaaggccatctacgactgcatcagggatgtaggctccaaagtggcccttttcgacgtggaaaggttcagacgtttgcgagatgcagaggaaaactttgtgcacaagctttttacgcaagccagtccagactgtgtcgacgactttggctgcacaccaggtgctcacagtggtctatctggtgtagctgtctttgctcgcagcttttcaggtatcctggcccaagaagagcgagagtgggctcaagccaacggcgctaacaatgtgtttgatgctttccagctcgaccgcaagtttgcttccgtcgcccagtccgccgatgcgattcccaagatcgacattcaacccgaagacctggcttccgtgctatatacctctggtaccacaggtaaaccgaaaggcgtagccgctacacaccgtcagttcctttcggcaggtcctaattctggcttctcgattgctcgcgcctacgtccgtcgtggattggcaccccccacaccccaaccggatgacgaacaagcttcctcgatcttcctcatccctctcttccactctaccggcattcaatccggcctatgccccagcgtgctgcgtggcagcaagatcgtcctcatgcccaagtacgatcttgaaaaggcaatcgaactcatccagcagcacaagatccaagtcgttctcggaatcggattcatggttcgagagatcgtgctcagcaagcacgagcttccttctctccagggtctttcgcatggcggatcgtcaagcgccaaagagttgcccgaagagtctcgtcagaagttcccgtcgatgctcatcggtcaaggttacggcagcaccgaagtcaacggtgctgcctcgggtctggccagtgacgactacttggctcgacccacttcggccggtcgtgctcctccaaccatcgagatccgtatcatcgaccccgatacgctgaccgaggtggccaatggcaaaacgggcgaaatctgggttcgcggtcccaacgtcgctctcggctactggggtaaaaaagcggccacagaagaggcctttaccaaagacggcttcttccgcaccggtgatcttggtcgcaaagaggacgatggcttcatctacgtcatggatcgatccaaacacatcatcatccgtggtggcgaaaacatcagcggtacagaggtggaaacggcgatctattcagaacgaaggatcattgactgtacagctgttcccatccccgaccaacgtttcggcgagacagtcggcgtcgtatgtgtcccacgcgccgagtatcagaagcagaacagaccgacagagcaagacgtgctcgccgtagcacgcaagttgctgcctaagcacgaggtccctgactttgtctggatccgagacgagcctctagagaggaacgctaacggtaaagtagacaaggccatcgtcaaggaggcggctaggaaaaggcatgcccaactaaaggctgctagtgccaaacccagattgtag

SEQ ID NO: 28233 - protein, 648 aa, Ustilago maydis 521
MSSVPTSPHLAKRSIPQDFKGDRDQSTLVPLETVDKLLDAPGSLLETQVKFINGRLTKVWKQLPNSVRDLWMFAATTYASRTMIVAEGESHTYAHVHKRAMLTATWLSRQFGVKKGDRVAIVARNHVEFVIGFYAVHLLGGVPALVNAFLPGKAIYDCIRDVGSKVALFDVERFRRLRDAEENFVHKLFTQASPDCVDDFGCTPGAHSGLSGVAVFARSFSGILAQEEREWAQANGANNVFDAFQLDRKFASVAQSADAIPKIDIQPEDLASVLYTSGTTGKPKGVAATHRQFLSAGPNSGFSIARAYVRRGLAPPTPQPDDEQASSIFLIPLFHSTGIQSGLCPSVLRGSKIVLMPKYDLEKAIELIQQHKIQVVLGIGFMVREIVLSKHELPSLQGLSHGGSSSAKELPEESRQKFPSMLIGQGYGSTEVNGAASGLASDDYLARPTSAGRAPPTIEIRIIDPDTLTEVANGKTGEIWVRGPNVALGYWGKKAATEEAFTKDGFFRTGDLGRKEDDGFIYVMDRSKHIIIRGGENISGTEVETAIYSERRIIDCTAVPIPDQRFGETVGVVCVPRAEYQKQNRPTEQDVLAVARKLLPKHEVPDFVWIRDEPLERNANGKVDKAIVKEAARKRHAQLKAASAKPRL

SEQ ID NO: 28234 - DNA, 2163 bp, Ustilago maydis 521
  CDS (1)..(2163)
atgtcatctcgcacgtcactgtcagcttgcgcccagttagcaggaccggccagctttcgcacttcagcttgtcgacaggtgcgactggcttcgagcttgcacgtttcctaccagctacatcctaccaagaagaatgccaatggtgcactgctctcacgagtctcgggaccgacggacaaacctctttgcgagctttcactgagccaattctggaagcaagcggtgcaaaattacgctgatcgacccgcactgatttcaaaacatgagccagccacacagcatggcaaagcagcggccgatgcgggcgactgcattcgttggtcgtacggtgccatgaacgagcacgtgcagagccttgtcgctggactacaccagctaggcgtacgaaaaggagatcgcgttgccatactcatgatgaattgttccgcatatggggctttgcagtgggcttgtgctcagatcggagccgtgctggtcactctgaatcctgcctacggcacgtccgagcttcgacgggctatagaccttgttgaggccactactctgtttattgtaccctcccttcgtggaacaaactacctcgactcgctcctcgaacttcttccgtctctgtcgagcactgcctccacctctggtgatccaactattctacaagatgagtcgctgccaagcttgaagcgcatcgtgatgctagacaatctcgacaatagacctagaaactgggaaagcaatagtgtgctggcacagcaaggcaagagcttcactgacgccatgtcggcgctgaaacaccgtgccatcgattaccgtgaccttctaatttctcccaagtctcatgctgctacatcggacgtgctcaacacagacgttattaatttgcagctcacctctggaaccacaggcaagcccaaggctgtagcactcacgtctcgaaatctcctcaataacgggatcgcaatcggtgacaatctcagattcaccgaggcagataagctgtgcaacattccgccactattccactgctttggtttagtgcttggaaatctggccgcttggactcatggagcttcgattgtctacgctgctgagggctttgatcctctgcggtctctgcgtgctgtttctgaagagcgctgcaccgccttgcacggtgtacctacccatttcatcgctgaattggagctcctcgaatcggccagggagcatgcacaagatccggcgcgctacccattacccaagggcatgcagcagaatgaagctttcgacttttcttctttgcgaaccggtcttacaagcggttccacggttcccattgcgcttatggaagctctggtaagcccaggcaagctgggtctgcgagatcaaacggtggtctatggcatgaccgagacgtctccggtcactttcggatgcggtacgtttgatgctctaggctggcgcgagacgaagattggaaattcgttgacaaaggactttcggctatgtccgcacccttccctctacgcagatgtcgacgcacccatcgtaaggagatgcgagactgttggccgagtctatccacatgtgcatgctaaaattgtctctcctgatgacccactgggccagcccctaccggtcggccaacctggggagctctgcaccgccggatacgtcgtgatgcaaggctattggaaagatccacaaaggacagacgaagccttggagcgacatccagatgagcccgaaattgtgtggatgcgaactggcgacatcgctatcatggacgaggagggctacgtacgcatcgttggccgatccaaggatgtgatcatccgtggaggcgaaaatctcttccctccgaacattgaaaactgcattgatcgcatggaaggaatcgccacaaacgctgtcatcgctgtgccagatgagaaatacggagaagctgtgggtgtttttgtggcaagatcgcatgcagaggcacccgtcacaccagcaaagatacgtgcctacgtgaaaaagcacgttgggggacagagcgcaccagcctgggtatggttcctgggcgaggaaggtattcctgccgagttccccaagacagcctcgggcaagatccaaaaggctgacgctgccttgcttcgctttgactttggtctggaccgcacccttatcgttttgccgttactctaa

SEQ ID NO: 28235 - protein, 720 aa, Ustilago maydis 521
MSSRTSLSACAQLAGPASFRTSACRQVRLASSLHVSYQLHPTKKNANGALLSRVSGPTDKPLCELSLSQFWKQAVQNYADRPALISKHEPATQHGKAAADAGDCIRWSYGAMNEHVQSLVAGLHQLGVRKGDRVAILMMNCSAYGALQWACAQIGAVLVTLNPAYGTSELRRAIDLVEATTLFIVPSLRGTNYLDSLLELLPSLSSTASTSGDPTILQDESLPSLKRIVMLDNLDNRPRNWESNSVLAQQGKSFTDAMSALKHRAIDYRDLLISPKSHAATSDVLNTDVINLQLTSGTTGKPKAVALTSRNLLNNGIAIGDNLRFTEADKLCNIPPLFHCFGLVLGNLAAWTHGASIVYAAEGFDPLRSLRAVSEERCTALHGVPTHFIAELELLESAREHAQDPARYPLPKGMQQNEAFDFSSLRTGLTSGSTVPIALMEALVSPGKLGLRDQTVVYGMTETSPVTFGCGTFDALGWRETKIGNSLTKDFRLCPHPSLYADVDAPIVRRCETVGRVYPHVHAKIVSPDDPLGQPLPVGQPGELCTAGYVVMQGYWKDPQRTDEALERHPDEPEIVWMRTGDIAIMDEEGYVRIVGRSKDVIIRGGENLFPPNIENCIDRMEGIATNAVIAVPDEKYGEAVGVFVARSHAEAPVTPAKIRAYVKKHVGGQSAPAWVWFLGEEGIPAEFPKTASGKIQKADAALLRFDFGLDRTLIVLPLL

SEQ ID NO: 28236 - DNA, 1935 bp, Cryptococcus neoformans var. neoformans B-3501A
  CDS (1)..(1935)
atgaaacggagccgcgcgcgacgaaagatccatcgggtgtgcctggctctgtatatccggagtcgaaatgttgacacatggaacatttctttgtcggccatggaaaagcagctcagcatagcagagtgtgaccgcatcttgacaggtcctggctctccgatggagaccgaggagaaggtgatctttggtagacgtctgactgtatggaagcatctgccctcaacgtttcgagacttcctgatcttcaacctccagaagtactctcagagagagttcatatcatcgcctttacctctaagggaacctttcaaatcatccgaaacccttactgacaaagtcgatccaagagaacacctgacttttggtgatgttttggaccgttcactgaaattggcagcatggatgcgcagtcgagggataaaaatgggggatagagtagtaattgggggtaaaaactgtactggctggatcgtgtcgtttatcgctgtccatctgatcggcgcagtcactgtgtgcttgaattgctgggttccaagagagcaaatggtttactcaataaagatggtcgagccgagcttagcacttctggacgaagagcgtgcagagatcctcggcccattcacccacgtcaaggagaatggccttcctcctatgttctgctgggcagaatcaggacatttaccttcggttgtggagatctacagcacccccaacaatcaacggacaaaagaagttttggatggcgtgggtctcgatggacttggacccgaaagcgatgctgtcattttctattcctctgggacgagtggcttcccgaaagctgttctgagtactcaacggatggccttgtccaacgccatctctggcatggtcgccacggcccgagcagtccttcgcgccggccttcccctccctcagccgcccaagccgactgacccccaacgagtcgttctcctttcaatcccccttttccacgttactggttgtctctcctggcttctccgtgcaatcactaatggttcaaaatttgtcacctctcgaaagtgggatgtcaaggaagctgtgaggctgattgttgaggaaggggttcataccgtgggaggtgtaccggctattgccagtcagattttacagtcgcctgacctacccgataacactaccctcgacagcatcttttacggaggagcgcctcctagcaaacacatggccaatgaagtgaggaaacgatggcccaaagcagctgtcatccatggatacggtttgacagagacaaacgctgttgcttgcgccgtctgtggtgccgactatctttcacgtcctgacagcactggccctcctgtacccatctgcgaaatccgcattgtaaaccccgatactcgaaaagcattgcccacgggccagcaaggacttattctgatcaaaggcgctcaggtcatgaaatgttattacgggaatgagcaggccacgaagcaagcaattgatgaggagggctggttggatacaggtgatgctggatatctcgatgaagaagggttcttgttcatcaaagatcgcttgaaggatctcattatccgcggcggcgagaacatcgcatcagtggacgtggaaaacgcccttacctctcatccgcatattgacgaagtcgcagcaatcgcccttccacatccgatccttggggaagttgtgggtgctgcagtcacgcttcgtgaatctgcaaaggcaagaggggtaaaggtgacggaagaaagtatcttgggacatgtcagaagcaaactgccgaaacatgccgtgcctgccatggtaatgatttgggaagggagtctgccgaaaaacgtgaatggtaaaaccatgaagaaggagatcaaaagtgtagccatcaaagaatgggaacgaaggcagggtgcgaatagcaggggagccaaagcgaagctttaa

SEQ ID NO: 28237 - protein, 644 aa, Cryptococcus neoformans var. neoformans B-3501A
MKRSRARRKIHRVCLALYIRSRNVDTWNISLSAMEKQLSIAECDRILTGPGSPMETEEKVIFGRRLTVWKHLPSTFRDFLIFNLQKYSQREFISSPLPLREPFKSSETLTDKVDPREHLTFGDVLDRSLKLAAWMRSRGIKMGDRVVIGGKNCTGWIVSFIAVHLIGAVTVCLNCWVPREQMVYSIKMVEPSLALLDEERAEILGPFTHVKENGLPPMFCWAESGHLPSVVEIYSTPNNQRTKEVLDGVGLDGLGPESDAVIFYSSGTSGFPKAVLSTQRMALSNAISGMVATARAVLRAGLPLPQPPKPTDPQRVVLLSIPLFHVTGCLSWLLRAITNGSKFVTSRKWDVKEAVRLIVEEGVHTVGGVPAIASQILQSPDLPDNTTLDSIFYGGAPPSKHMANEVRKRWPKAAVIHGYGLTETNAVACAVCGADYLSRPDSTGPPVPICEIRIVNPDTRKALPTGQQGLILIKGAQVMKCYYGNEQATKQAIDEEGWLDTGDAGYLDEEGFLFIKDRLKDLIIRGGENIASVDVENALTSHPHIDEVAAIALPHPILGEVVGAAVTLRESAKARGVKVTEESILGHVRSKLPKHAVPAMVMIWEGSLPKNVNGKTMKKEIKSVAIKEWERRQGANSRGAKAKL

SEQ ID NO: 28238 - DNA, 2043 bp, Cryptococcus neoformans var. neoformans B-3501A
  CDS (1)..(2043)
atgggcaagacagaagttgcacccggcgtccaccacgttcaccctctccccgactccgtccccgagtctgaggacctcttcgctccccctcctcgtatgcagggcaaggaaggccgcccgaagcctcaccttggtcccaattacgaggcctacgtcaatgaatgggccaagactgttggtcccaataatgatgagtggtgggccgcaaaggccagggagactcttgattggtatgaggacttcaagactgtcagggccggtggctttgagcacggagacattcagtggttccccgaaggtaccttgaacgctgcttacaactgtcttgaccgacacttctacaagaacccgaaaaagaccgccatcatctacgaggccgacgagccctctgagtcccgtgagatttcttacgaggagctcatgcaggagacttgccgagttgccaatgtcctcaagagctacggtgtcaagaagggtgacgctgtgtccatctatcttcccatgacttggcaagccgctgctgcgttccttgcttgtgccaggatcggtgccattcactctgctgtctttgccggttttagcgccgagagtttgagggatagagtcaatgactgtgaatgcaaggttttgatcaccaccgacgagggtcgacgaggtggtaagagtattgctactaagcaaatcgtcgatgccgctctccagcagtgcccccttgttgagaacgttctcgtccttcgacgaaccggcaacaaggtccccatgactgaaggtcgtgacaaatggtgggacgaagagtgtgccaagatgcccgcttactgcccttgcgagaggatggcttccgaggaccctcttttcatcctctacacctctggttccaccggtaagcccaagggtgtcgtccactgcaccggtggttacctcctcggcgccgcccttaccctcaagtacgtctttgacgctcacccggatgaccgattcgcctgtatggccgatatcggatggattaccggacatagttacattatctacggccctctcgccaacggcatcaccaccgccgtctttgaatccactcccgtctaccccacaccatccagatactgggactttgtcgacaaatggaaggctactcagctctacactgcgcctactgcgatccgattgttaagacgtatgggcgaggaccacgtcaagaaccacgatctcagctctctccgagtgttgggctctgttggtgagcccatcaaccccgaggcttggcattggtacaatgactttgcgggcaagaaccaatgtgccattgttgatacttactggatgaccgaaactggttccatctctattgctcctctccctggagccatctccaccaagcctggttccgccaccttccccttcttcggtatggatgttgacatcattgaccctcaaactggtcaggtcttggagggtaacgatgtggagggtgttctcgttgccaggaagccatggcctagtattgccaggaccgtctacagggaccacaagaggtaccttgagacttacatgaagccttaccccggctacttcttctttggtgacggtgctgcccgagactatgacggttacatgtggatcaagggacgagttgatgatgttatcaacgtgtctggccaccgactctccaccgccgaggttgagtctgcccttatcctccacaagggtgtcgccgagactgccgttgttggatgcgctgatgaccttaccggtcaggctgtgtacgctttcgttacgatgaagcccgagttcgatttaaagagtaccaaggaggcggatcttagcaaggagttggctatccaggttaggaaagttattggtcctttcgctgctcccaagaagatttaccttgtttccgatctccccaagacccgatcagggaaaatcatgcgtcgaattctccgaaagattgtcgctggcgagggtgaccaactgggagatctttcttccattgctgacccccaaattgtcgacgaagtcaagcgaaaggttaccggctctgcttaa

SEQ ID NO: 28239 - protein, 680 aa, Cryptococcus neoformans var. neoformans B-3501A
MGKTEVAPGVHHVHPLPDSVPESEDLFAPPPRMQGKEGRPKPHLGPNYEAYVNEWAKTVGPNNDEWWAAKARETLDWYEDFKTVRAGGFEHGDIQWFPEGTLNAAYNCLDRHFYKNPKKTAIIYEADEPSESREISYEELMQETCRVANVLKSYGVKKGDAVSIYLPMTWQAAAAFLACARIGAIHSAVFAGFSAESLRDRVNDCECKVLITTDEGRRGGKSIATKQIVDAALQQCPLVENVLVLRRTGNKVPMTEGRDKWWDEECAKMPAYCPCERMASEDPLFILYTSGSTGKPKGVVHCTGGYLLGAALTLKYVFDAHPDDRFACMADIGWITGHSYIIYGPLANGITTAVFESTPVYPTPSRYWDFVDKWKATQLYTAPTAIRLLRRMGEDHVKNHDLSSLRVLGSVGEPINPEAWHWYNDFAGKNQCAIVDTYWMTETGSISIAPLPGAISTKPGSATFPFFGMDVDIIDPQTGQVLEGNDVEGVLVARKPWPSIARTVYRDHKRYLETYMKPYPGYFFFGDGAARDYDGYMWIKGRVDDVINVSGHRLSTAEVESALILHKGVAETAVVGCADDLTGQAVYAFVTMKPEFDLKSTKEADLSKELAIQVRKVIGPFAAPKKIYLVSDLPKTRSGKIMRRILRKIVAGEGDQLGDLSSIADPQIVDEVKRKVTGSA

SEQ ID NO: 28240 - DNA, 1740 bp, Tribolium castaneum
  CDS (1)..(1740)
atgtcgcgtttaattttaaaaagtggtgcatccttcgcgcaaaccttccaaaattgtggattcctctccgtttttccgaccaacttcggggcccaaaaactgaaactgcgtgaacagaggcgatttatgagtgctggaatcgtccagtcgcctctgggaccaagcaaaaaaataccaaacgaaaacctcgtcgagtacatttacaaaaataacgacaaatggatcgaggagcccgccatgacttgtggcgtttccgggcgaagctacacctacggaatgctccggatgctgatcaacagatgtgcccaggcccttttgggccactgcggcatgaaaccgcgagaagtcgtcggtttgcttctaccaaacattcccgaatacgccgtagtgtgtcatggggccatcgaggccggacttgtggtcacttttgtcaaccctttatacactcctgatgaaatcaaacgccagtttgagaatgccggagtcaagatgattgttacagtgcctcaattgctagaggtggcgttaacaatagccccacaattgcaagagtatcgaactacgatttgtatcggaggagaggacgatccctcgaagaacgttaacgggcttcagagcatgttaatggcggggcatgaagccgaacttcccgggattaatcccagagagattgccattttgccgtattcgagtggcacgacgggattgccgaagggagtaatgctctcgcattataatttagtggcgaatttggtgcaaggggaacacccggctttggaggacttggaaactaaagatgggaaaaggcacaccatgctaacagtccttcccttcttccacatttacggcttcaatggaattttgaacttgtgcctcaaaaacggcgctcacatcatcaccattccacggtttactcccgaagattacctcaaaaccctcgtcgaatacaaaccgagctttattttcgtcgttccttccctgctcttgttcctggcctcgcatcctgccgtcaccaaggaacacttgagttctattgaagccgtccagtcaggagcggcccccttgactgaaggtctcttgcaaaaattcagacagaaggtgggaagagacgatattctgataagacaaggttacggcatgacggagagttcgccggttactttctgtatgcccaagttgacgccaccgtcgaaaattgcaacgattggacttccttatcccgggacggaagcaaaagttattagtttgtcaaatggggaaccgcaggggacacacaagtcgggtgaattgctagtgagggggccacagattatgatggggtacttgaacaacgaacaagccactgcggagactgtcgatgaggaagggtggctccatacaggggatgtggcctattacgacgaagatttctacttttacattgtcgataggtgcaaggaactcatcaaagtcaagggcaatcaagtgtcgcccaccgagcttgaaaatttgctcctggagatgcccggagtggctgattgtgctgttgtgggtattccggacgctttggccggtgaagtgccccgagctttcgtcgtgcgccaacccgggagcagcctgagtgaagacgacatcctactttacataaaccccaaagtggcccattacaaaaaaatcgccggcggtgttaaattcgtcgagtcgatcccgaggaaccccagcggcaaaatcctgagaaatgaacttaaaataaacgcttaa

SEQ ID NO: 28241 - protein, 579 aa, Tribolium castaneum
MSRLILKSGASFAQTFQNCGFLSVFPTNFGAQKLKLREQRRFMSAGIVQSPLGPSKKIPNENLVEYIYKNNDKWIEEPAMTCGVSGRSYTYGMLRMLINRCAQALLGHCGMKPREVVGLLLPNIPEYAVVCHGAIEAGLVVTFVNPLYTPDEIKRQFENAGVKMIVTVPQLLEVALTIAPQLQEYRTTICIGGEDDPSKNVNGLQSMLMAGHEAELPGINPREIAILPYSSGTTGLPKGVMLSHYNLVANLVQGEHPALEDLETKDGKRHTMLTVLPFFHIYGFNGILNLCLKNGAHIITIPRFTPEDYLKTLVEYKPSFIFVVPSLLLFLASHPAVTKEHLSSIEAVQSGAAPLTEGLLQKFRQKVGRDDILIRQGYGMTESSPVTFCMPKLTPPSKIATIGLPYPGTEAKVISLSNGEPQGTHKSGELLVRGPQIMMGYLNNEQATAETVDEEGWLHTGDVAYYDEDFYFYIVDRCKELIKVKGNQVSPTELENLLLEMPGVADCAVVGIPDALAGEVPRAFVVRQPGSSLSEDDILLYINPKVAHYKKIAGGVKFVESIPRNPSGKILRNELKINA

SEQ ID NO: 28242 - DNA, 1641 bp, Mycobacterium sp. JLS
  CDS (1)..(1641): transl_table=11
atgtacagcaccatgcaggacgtcccgctgacagtcgccgcgattctgcggtacgccgccacagtccacggcgaccgaacggtgacgaccgcgacgggaaacggtggttaccggcacgccacctaccgtgaggtcggacagcaggcggcccgactggcccatgcgctgcgccggctcgggatcgagggtgacgaccgcgtcgggacgttcatgtggaacaaccaggagcatctggaggcctacgtcgcggtgccctcgatgggcgcggtgctgcacacgctgaacatccggctgttcccggagcagatcgagttcgtcgcctacgaggccgaggaccgcgtgctgattgccgatctgtcgctggcgccggtgcttgctccggtgctgcgctcgctggagaccgtgcacacggtgatcgccgtcggtgagggtgacctggcgccgttcgaggagtcgggcaaacgagtggtgcgctaccacgaggtgaccgccgccgaatccgacgagtacgactggcccgacatcgacgagaactccgctgccgcaatgtgttacaccagcggaaccaccggccacccgaagggcgtcgtatacgggcaccggtcgagctacctgcactcgatggcggtctgcgggggcaacggactcgggatgagcttctccgacaaggcgctgccgatcgtgccgatgttccacgccaatgcctggggtctgccctacgccgccctgatggccggagctgacctggtgcttcccgaccgcttcatggacgccacgtccctcgtcgacctgatcgagacgcagcggccgactgtcgccggtgcggtacccacaatctggaacgacgtcatgcaccacctcgaccagaaccccggccacgacatctcctcgctgcggctcgtcggctgcggcgggtcggcggtgccggtgtcgctgatgaaggcgttcgaggagaagttcggcgtgcagatccggcagttgtgggggatgacggagacgtccccggttgcgacgatcgcgtggccgccgccggacacccccgcggagaagcactggcagatccgcagcacccagggccgtccgctctgcggtgtggaggcccgcatcgtcgacgacgacggcgcggtgctgcccaacgacggtgagtcagtcggtgaactcgaggtccgcgggccctggatcaccgggtcctattaccgcaacaccgacgactcgaagttccagtcgggttggctgcgcaccggcgacgtgggccgcatcgatccgcagggttacatcaccctgaccgaccgcgccaaggacgtcatcaagtccggcggtgagtggatctcgtcggtggagttggagaaccacctcatcgcgcatccggcggtgcgagaagccgccgtggtcggggtgcccgacgagcgttggcaggagcggccattggcggcggtcgtcgtccaggagggtgcccaggtggacgctgacgaactgcggaacttcctggccgacaaggttgttcggtggtggcttcccgagcgctggaccttcgtcgacgaaatcccacgcaccagcgtcggtaagtacgacaagaaggtgatccgggcgcgctacgcggacaacgcctaccaggtcgccgacctgcgcgagcacacgtag

SEQ ID NO: 28243 - protein, 546 aa, Mycobacterium sp. JLS
MYSTMQDVPLTVAAILRYAATVHGDRTVTTATGNGGYRHATYREVGQQAARLAHALRRLGIEGDDRVGTFMWNNQEHLEAYVAVPSMGAVLHTLNIRLFPEQIEFVAYEAEDRVLIADLSLAPVLAPVLRSLETVHTVIAVGEGDLAPFEESGKRVVRYHEVTAAESDEYDWPDIDENSAAAMCYTSGTTGHPKGVVYGHRSSYLHSMAVCGGNGLGMSFSDKALPIVPMFHANAWGLPYAALMAGADLVLPDRFMDATSLVDLIETQRPTVAGAVPTIWNDVMHHLDQNPGHDISSLRLVGCGGSAVPVSLMKAFEEKFGVQIRQLWGMTETSPVATIAWPPPDTPAEKHWQIRSTQGRPLCGVEARIVDDDGAVLPNDGESVGELEVRGPWITGSYYRNTDDSKFQSGWLRTGDVGRIDPQGYITLTDRAKDVIKSGGEWISSVELENHLIAHPAVREAAVVGVPDERWQERPLAAVVVQEGAQVDADELRNFLADKVVRWWLPERWTFVDEIPRTSVGKYDKKVIRARYADNAYQVADLREHT

SEQ ID NO: 28244 - DNA, 1653 bp, Burkholderia vietnamiensis G4
  CDS (1)..(1653): transl_table=11
atgacccagatgttcgaggccggactcggccgccgcgaagccaactacgtgccgctcacgccgatcgatttcctggtccgcgcggcggaagtctacggcgcgcggctcgcgatcgtgcatggcgacgtgcggcgcacgtgggccgagacctacacgcgggccaagcagctcgcgagcgcgctggcccgggccggcgtcgggcgcggcgagacggtcgccgcgctgctgccgaacattcccgcgatggtggaagcgcacttcggcgtgccgatggcgggcgccgtgctcaacacgatcaatacgcggctcgacatcgcgtcgatgctgttcatgctgcggcacggcgaagcgaaggtgctgatcgtcgacaccgaatatgcggagctcgcgcatcgcgcggcgctggaagtgccggggctgaagatcgtcagcgtcgccgacgcgatgcccgccgatcccgcccgtttcgccggcgcgaccgactatgaagcgttcgtcgcgagcggcgacccggactacacctggacgccgcccgccgacgagtgggaggcgatcgcgctgaactacacgtccggcacgaccggcgacccgaagggcgtcgtctatcaccatcgcggtgcctatctggcggcgatcagcaacatcctcgaatgggacatgccgaagcacgccgtgtatctgtggacgctgccgatgttccactgcaacggctggtgcttcccgtgggcgatcgccgcgcgcgcgggcgtcaacgtctgcctgcgcaggttcgacgcgaagaccgtgttcgacctgatccgcaacgagcgcatcacccattactgcggcgcgccgatcgtgcagagcgcgatcgcgaacgcgccggccgagttgcgcgccgggatcgaccacaaggtgcatgcgatggtcgcgggcgccgcgccggcgccggccgtgatcgccaagatgaaggaaatcggcttcgacctgctgcacgtgtacgggctgaccgaggtgtacggcccggcgacggtctgcgcgaagcaggcgcactgggacgacttgcccgacgacgagcgcgcgcggctcaatgcgcgccagggcgtgcgctaccacctggaagcgggcgcgacggtgctcgatccggacacgatggagccggtgccggccgacggcgagacgctcggcgagatcatgttccgcggcaacatctgcatgaagggctacctgaagaacccgcacgcgacggacgaggcgttccagggcggctggttccatacgggcgatctcggcgtgctgacgcccgacggctatatccggatcaaggatcgccgcaaggacatcatcatttcgggcggcgagaacatctcgagcatcgaggtcgaggacgcgctgtaccggcatccggccgtcgaagtcgcggcggtggtcgcgatgcccgatccgaagtggggcgaggtgccgtgcgcgttcgtcgagctgcgcaacgggatgagcgcgaccgaggacgaaatcttcgcgcattgccgccagctgctcgcgggcttcaaggtgccgaaggtcgtgcgcttcggcgagctgccgaagacctcgaccggcaagatccagaagttccagctgcgcaacgcagtcggatcggacaaggcgatcgacctggccggcgacaagaagtaa

SEQ ID NO: 28245 - protein, 550 aa, Burkholderia vietnamiensis G4
MTQMFEAGLGRREANYVPLTPIDFLVRAAEVYGARLAIVHGDVRRTWAETYTRAKQLASALARAGVGRGETVAALLPNIPAMVEAHFGVPMAGAVLNTINTRLDIASMLFMLRHGEAKVLIVDTEYAELAHRAALEVPGLKIVSVADAMPADPARFAGATDYEAFVASGDPDYTWTPPADEWEAIALNYTSGTTGDPKGVVYHHRGAYLAAISNILEWDMPKHAVYLWTLPMFHCNGWCFPWAIAARAGVNVCLRRFDAKTVFDLIRNERITHYCGAPIVQSAIANAPAELRAGIDHKVHAMVAGAAPAPAVIAKMKEIGFDLLHVYGLTEVYGPATVCAKQAHWDDLPDDERARLNARQGVRYHLEAGATVLDPDTMEPVPADGETLGEIMFRGNICMKGYLKNPHATDEAFQGGWFHTGDLGVLTPDGYIRIKDRRKDIIISGGENISSIEVEDALYRHPAVEVAAVVAMPDPKWGEVPCAFVELRNGMSATEDEIFAHCRQLLAGFKVPKVVRFGELPKTSTGKIQKFQLRNAVGSDKAIDLAGDKK

SEQ ID NO: 28246 - DNA, 1704 bp, Burkholderia vietnamiensis G4
  CDS (1)..(1704): transl_table=11
atgagacacgcagaaaaccccgacatcgtcggcgcgcgcgagcgccgtggccgcggggcggcccgcatgaaaacgacggcagaccatccctatacgaccggactcgagcgcgacccggcgaacttcattgccttgtcgccgctgacgtttctcgaacgcgccgcatccgtctggccggagcgcacggccatcgtgcacggcacgatacgccgcgactgggccgaaacctaccggcgttgccggctgctcgccggcgcgctgcgcgggcgcggcatcggcaacggcgatacggtggcgatgatcgcggccaatacaccggaactgttcgaggcgcatttcggtgtaccgctttgcggcgccgtcctgaacaccatcaacacacggctcgatgccgacacgatcgcgttcattctcggtcacggcgacgcgaagctgctgatcaccgaccgcgaattctcctcgacggtgaagaaggccctggcacggctcggccgtgccattcaggtcatcgacatcgacgatccacagttcggagaaggcgatctgctcggcgaaaaagactacgaggcgttgctgcaggaggccgcgcacacggaattttctgtcgcgatgccggacgacgaatggcaggccatatcgctgaactacacatcgggcacgacgggcaatcccaagggcgtcgtgtatcaccatcgcggcgcatatctgaacgccgtatcgaacgcactatcgtggcatctggacgaggacacgacctatttgtggaccttgccgatgtttcactgcaatggctggtgctttccgtggaccatggcgttggtggccggcaccagtgtctttctgcgccatacgcgggccgagcgaattctcgccgccatccgcaccgaggcggtcacgcatttttgtgcggcgtccgtagtgttgaacatgatcaataacgccgcgccggagctgaaagccggcatcagtcatggagtcaaggtcatgaccggcggtgcaccgccgcccgcttcggtgatcgccggcatggagcgcatgggctgggacgtgacgcacgcctacgggttgaccgagtcctatgggccggtcgtgcaatgcgtgtggcgcgactcgtggaatgcactcgatctcgatgcgaaagcgcggctcaaggcccgccagggagtgcgcggccccgctctcgaggcagtgatggtagccagccccgatacgctggagcccgttccaaaagacgggcaaacgctcggcgaggtatttctgcgcggcaacaacgtgatgaagggctacctgaagaatccggacgccaccgtggaggcattttctggcgggtggtttcacacgggcgatctcgcggtatggcaccccgatggctacctggaaatcaaggaccgctcgaaggacatcatcatctcgggaggcgaaaacatttcgtcgatcgagatcgaggacatactgtattcccatcccgccgttctggaggcggcaatcgtcgcgcgtcccgacgacaagtggggcgagacaccttgtgctttcatcgcgctcaaagccgattcggcggtgaccgaagcggacatcatcgcgttttgccgcgaacggctggcacatttcaaggtgcccaagaccatcgtgttctcgccgctgccgaagacagcgaccggcaagatccagaagttccacttgagggagcgggcgcgccagctgtga

SEQ ID NO: 28247 - protein, 567 aa, Burkholderia vietnamiensis G4
MRHAENPDIVGARERRGRGAARMKTTADHPYTTGLERDPANFIALSPLTFLERAASVWPERTAIVHGTIRRDWAETYRRCRLLAGALRGRGIGNGDTVAMIAANTPELFEAHFGVPLCGAVLNTINTRLDADTIAFILGHGDAKLLITDREFSSTVKKALARLGRAIQVIDIDDPQFGEGDLLGEKDYEALLQEAAHTEFSVAMPDDEWQAISLNYTSGTTGNPKGVVYHHRGAYLNAVSNALSWHLDEDTTYLWTLPMFHCNGWCFPWTMALVAGTSVFLRHTRAERILAAIRTEAVTHFCAASVVLNMINNAAPELKAGISHGVKVMTGGAPPPASVIAGMERMGWDVTHAYGLTESYGPVVQCVWRDSWNALDLDAKARLKARQGVRGPALEAVMVASPDTLEPVPKDGQTLGEVFLRGNNVMKGYLKNPDATVEAFSGGWFHTGDLAVWHPDGYLEIKDRSKDIIISGGENISSIEIEDILYSHPAVLEAAIVARPDDKWGETPCAFIALKADSAVTEADIIAFCRERLAHFKVPKTIVFSPLPKTATGKIQKFHLRERARQL

SEQ ID NO: 28248 - DNA, 1539 bp, Novosphingobium aromaticivorans DSM 12444
  CDS (1)..(1539): transl_table=11
atgctcgatccgctgcccgccaccataccccatgccgcgcaggcggcggcggccacctggcccgatgcaccttccgtgctcgaaaacggcgaagtctggagctttgccgagctgtggcagcgcagccgcgcggcggcttcggcgctgatcgcgcggggcataaaggccggagatcgcgtggcgatctgggcgccgaactcgcgcgagtggatcgttgcggcgatcgcgaccatggcgtgcggggcggcggtggtgacgctcaacacgcggctcaagggccgcgaggcgggcgacatcttgcggcgcaccaatgcgcggcttctgttcacggtcgagggctttctcggcatcgactatcgcgcgctgatcgtggacgaggatctgccggcgcttgaaggaacagtcctgcttgaccgggaattcgacgctttcatgcgtgacggcaggggggcgggcgatccggcggtcgatgcggcgatggcgcagatcgatgccgataccgtgtcggacatcctgttcaccagcggcacgacaggcagccccaagggcgtgttgatgacttatggccgcgtcctgcctcaggcggcggtgtggtgcgcgaacacccgcctgaccgagggcgaccgttacctgattgccaaccctttcttccattccttcgggatgaaggtgggctgggtcgcgtgcatcctcgccggtgccgtggcagtgcccatgctgcaattcgacgtgggtcaggcgattgatctgatcgagcgcgagcgcatcacgttcatgcccggtccgccgacgatcttccagatgctgctggccgaactcgacaagcgcaagtgggactgttcctcgctgcggggaggaacgaccggcgcggcgacagtgccgcccgcactggtggagcgcatccgcaacgacctgggcatggtggacctcatcaccgcctatggcatgaccgaatgcgtcaacatcacgacgtgcgtgcccggtgacgatgccgagaccattgcacggacctgtggcaaggcgtttccgggcaacgaggtgcgcatcgccgacgagaacgggaacgaactgccaaggggcgaggcgggagaggttctggtgcgggggcagggcgtcatgctcggttatctcgacaacccggaagccactgccgaggcgatcgacgcagcaggctggttgcacacgggcgacgtcggcacgatggacgagcgcggttatgtgcgcatcaccgaccggatgaaggatctctacatctcgggcgggttcaatgtgtacccggcggaagtcgaaaagctgctggccgagcatccggccatcggaatggctgcggtcgtcggcgttccggacgagcgactgggcgaggtggggcgcgccttcgtggtcctgcggcccggcgcgagtgcgaccgaggccgaacttgtcgcctggtcgcgcgagaacatggcgaactacaaggtgccgcgcagctttgtgctggtcgatgacctgccccgcaacgcgtcgggcaaggtgctgaagaccgaactgcgggccggataa

SEQ ID NO: 28249 - protein, 512 aa, Novosphingobium aromaticivorans DSM 12444
MLDPLPATIPHAAQAAAATWPDAPSVLENGEVWSFAELWQRSRAAASALIARGIKAGDRVAIWAPNSREWIVAAIATMACGAAVVTLNTRLKGREAGDILRRTNARLLFTVEGFLGIDYRALIVDEDLPALEGTVLLDREFDAFMRDGRGAGDPAVDAAMAQIDADTVSDILFTSGTTGSPKGVLMTYGRVLPQAAVWCANTRLTEGDRYLIANPFFHSFGMKVGWVACILAGAVAVPMLQFDVGQAIDLIERERITFMPGPPTIFQMLLAELDKRKWDCSSLRGGTTGAATVPPALVERIRNDLGMVDLITAYGMTECVNITTCVPGDDAETIARTCGKAFPGNEVRIADENGNELPRGEAGEVLVRGQGVMLGYLDNPEATAEAIDAAGWLHTGDVGTMDERGYVRITDRMKDLYISGGFNVYPAEVEKLLAEHPAIGMAAVVGVPDERLGEVGRAFVVLRPGASATEAELVAWSRENMANYKVPRSFVLVDDLPRNASGKVLKTELRAG
